United States Patent Application Publication US 2014/0057251 A1 - sequence listing, part 8

SEQ ID NO: 14321 - DNA, 15776 bp, Cannabis sativa
caatacatgattaccaaaaatctccacaagaacaagatccattagcaaagtggtgaaaccgcttagcatctctaattataatggttctattttcaaggagtgatatgaactttgcagtgtcatgacaatcaccacaaattctaaggttctttcttatgattattggcatgccaacatcacgagtcaccaaaatcccaaaggcaatggctaatttttcactgtgtttgttaatcatatcttctttcaaatcctcttcaacatcatgtagaacatattctgttttggacacaaatccagctttcctaatcttttgaatcaattcttccaatttcttatgtatcttctccgattcggggtgagattgatcatctaccacaaatctataaactttgttttcatgttctataaaactacaccccggtttcgggtttctggctagacctctttccttcatcaaagccctgacctttgaagcatccttccataagccagctgcagagtacatattcgataacattatatagtttcgggaatccaagggttccatagcaaacaactgctcggcaacttctttcccaagttcaatgttaccataaactctacaagctccaaataaagcaccccaaacaccagaatttggctccattgacatacttgtaataagctcataagcatcgttgagatgccccgagcgaccaagaagatcaaccatacacgaatagtgatccaatctgggctgaatcccgtacactcgagacataatcttgaagtaatttttcccttcattgacaagccccgaatggctacaagcattcagcaaatgaacaaaggtaacatgatcaggctccatgcctttcctaaccatacactcgaataattccacggcttcttttccataaccgtgcacagcatagcctgctaacattgcagtccaagaaactctatcaggatcaattagctctccaaaaaccttacatgaatcctttaacctccctagcttagcatacaaatccaaaatcgaagttaaaacagttacatttgcatttaggccacatttaacaatcaaaccatgaactgtctctgctaattttcctacccctaaattttcacaagcttgaagaacagctaccatagtaccatcatcaggtctcagtccattcatttgcatcttattaaagttaccaacaccaacctctggaaatcgattttgtgaaggaaccgaaaccattaaattccatgacacaaagttctgtacaggcattgcctgaaaaatttgacaagcaatatctaaacaaccaaactttccatacatgttaataagagaattcccaactttcacttcaaataacaaacccaatttaagaccaatcccatgaatgtacttgcccaaatcaacatcatcataatcaatacaagctgagataaagccaataagagtaacctcattaggtgattccatatccaattcaaacttcattctaaaaaatgcagttgtacacttatcaacaagaccttttcttgcaaacacagcaatcaaattattccatgagaccaaatccttgttaggcatttcatcaaacaactgttgtgcattttcaacacaacccaattttgtataacaagataccaatcgatcaccaataaacccatcactataattaatagatttgataacataggcatgaatggaattacagtagaagagggaagaacatgagcttacagcaagaatcaaagctgagacgatactttgatgagaagattgttgaagaaagacacttgtgtgaaatcctttcacggataagaatttgtaaggagctgaaattaatgggtattggaaacgtatgaaaaaagtcttggttttgaggaacaaattggagaaagggattattaactgacgtgatgaagaaggtcgtagagtcatgatttcccatcattgaaagaccaattctaacaattttgatgtacagagcaaattagcggaagagaaaatgtgaatgaaatgatgaaatgggtttaggtcttcggatttggatagcttcaaaggtgaccggagaaaagcggcggctctgggcggagatccgggagtggccgaggcagccagcgtttctgggttcgtttcttcgttctcggagtaggagggaagggatgggcctgggctgggctagaataggcccatttacatgggatcgttcgttcgtttattcttcggcgtagagaatagaaaaacgacaatcttttttctcagactataatatggaaaaacgacaatcattttctcactacaaaatggaaaaacgacaatcttttttcttagactataaaatggaaaaacgacaataattttcttagactacaaaacggaaaaacgacaatcattttgtcagactacaaaattgaaaaacgacaattattttctcagattacaaaacagaaaaaacgacaattatttttctcaaactacaaaatggaaaaacgaccatcttttttctcagactacaatatagaaaaacgacaattattttctcactacaagattgaaaaacgacaatcttttttcttaagactacaaaatggaaaaacgacaatcattttcttaggctacaaaacggaaaaacgacaatgaaaaacgacaattattttctcagattacaaaacagaaaaaacgacaattatttttctcaaactacagaatggaaaaacgacaatcattttctgactacaaacggaaaaacgacaattattttctcactacaaaatggaaaaacgacaatcttttttcttagactacaaaattgaaaaacgacaattattttctcagactacaaaattgaaaaacgacaattattttctcagactacaaaacagaaaaacgacaattatttttctcaaactacaaaatggaaaaacgacaatcattttctgactacaaacgaaaaaacgacaatctcttttctcagatgaattaactagagacgaaggagaaggagagtgtctggtgtttcgagctttggaaaaatggctactgttgttcgtttagctaaagaaattatcggtagaagacgagcaatggtgaaatctagtcgtcgaaacactgagccaacaacacgccgaggaagctggtacgacactcatatggctgccgcctctcgcgccatagctcaacgaatcccattggtcgatctggttctcgaaatcagagacgcaagggtagtaattcttttttctattctgttatcgtacatgcatatctataaagaattattttgttattgttgagatatatgtgctctctacttgtttgatgaaatgcctcaatagttgattgattttgattgttctcttttttagattccattgtcttccgagtatgaactgttaaggaaattcaactcttcttcaagacgaattgtagtgttgaacaagatagaccttgctaaccggtcacaaagcaaagttagtaacgtaaattcttaaccaaaacattgaactgatttagtgaacctttcatttgattttaagaggtttttctagttcagattctttgtcttatatatcttatcaattaaaggactttatttaatttctaggaatggttgagctattttgagcaaaacaactgtatttgttatggagttaatgctcataataaggacagcatcagacaggtatgtgaatatgattctttctcaagctaaactggttttaacaagaaatcaaaatggaaaagtaattagaacaagaagaacaaatcacatacgtgggccaaaccagacacaagggctatgagaatctatttattgatcacagtagaagaatctgtacaacaatggagtcttgctccaagaatcactctcatacagttatctagtaaaaaattgaagagcctttatgtactaagctagttaacaagagataccaactaactgtaataccgaactaccgaactccctgttaggaccaaggtgagtttcgcttatgctaggagaggtaagggtgctattgtttgggggtagtatggtcttttactgtgctgggggtacttttgtaattgctgagtgagttgcaagctgttatagtatagcgagtgaggtttatggggtttatgcatgtattgagagtctctctttgcatcaggggtcctatagggctctaaaggcttgtaaccttttttcctttgattcaataacacccaacagagctaaaattccatctaattctactgttctattcctttcttgctactgtattgaagtttcagggcacatcactccttttggttagaattctccttagcacttagtattccaaccagtcacaacagattctttctgtataacatgcacctagttgtgcatggaaaattgggtttaattatttactcagattttgtttattttttgcttctatattttctagcttcttagctcgaatcatatctatcaaaagtcaggtttatgttaaattcagaaattgctttttcttttgtacacttcttatagtttttgaacttcttacaatctcgagttagagaattgaggaagaaagataattcttttacgacaacattgttgttggttgggattcctaatgttggtaaatcagctcttgccaactctctgcatcaaattgggaggacaagtgctgcaggtgaaataagaaatccaaagtatttctttctctgaatgaatatataattttattttcgagaaagtttatttggatatgactacgattaccataatttgatttattttgaatttgtaaaattttagatgtgttttgaatttaaagtgcattgcttctttcgtagagaggggaagattaaaacatgctacagtgagtccacaccctggtgagacaaaagacataagcagcctaaaggtgtgtagtcgtttgctgttatagtatgttttataggaaaggatcttcggttaccaattatttgcttagatttattgcaaaattatgttaagattccacattgactaaatacaagactaattagtagtttataactacttgagcaccttcctttcatatgctataagcggtttaacaagtagtatcttagcaaacaccctctaattagtgacccacgttgtagaaggggcgacttatgaaatgatcaacatgtgaaggagattacttgggaaaagcttagtgtgtcattatagagtggaactcaatgaacatcagctctaaaagggagtgtattgttagaatttcaggctagtcttttggtagtgaaatctgctaagtagttataacataatattgtcatttatgtttatccctttttaggagaccacatgcttccgagaccatggccaaactcatcactgcagatcccacatccgagcttactgacaagtcttgatgattttgagatactatttcattcacatcagtatatgaaaaggaaaactacttactgcatataccatttttcgggaccaactgatacactccagctaggtacacagggaaaatcaaagagaaacagagaaaacggagaataagcatcccttaactctacactcatattagttttattttttaaaacttcccaaaaagatagatagacagatattaaaagagatctcagttaatcacactagttccccaattgaaagaaaaccttctctccatacacctttcattcttaatactagggtctaacacccacctttttttttttgtccataatacataatcataaatgttttgatctagattccattactataaacaaaatttagaaaggttgatgggaggggagatagcatggaaaatacattgtgagcatggtttcgttaggttctgagattctatctacgaatgggcatcacatgttgaattttcattacaatcaatttcattacatttatcttttccaagttttaactcttatgttatatattcagtttatagtttaaatgaaagtttatgtgaacttgcagattggaagccacccgaatatttatgtattggatactcctggaattttgccccctgagatttctgatgatgaggtctgcttaaagctagctttaacaggtagagaaactacatagctcagctttcatgtatttcaaattcaaaggattctttactaatatgtcatggagcaattaacaactctcaggttttcattttccaaaatacaggagcaattagcaacttttttggtggagaaaaagaacttgctcaatattttcttactattttaaatttgagtgaagaatacaagaggtggtctaagtttatccacaacgaaaatgagataacattgacaaaccatgaatcagattgctcaagtggctttgaaaaaaacctgaaacaaagaaggcaatatcccacagatcatacacaggtatgtataagcatttatattatcaaattatggaaccaaatgactagcaactaacaaggaaaatgttttatagttagaagaacttaagttagttgccaagtatccattgatttattattattttaatttgggttattttcattctcataatataccacttataaggattccactttgactaagtataggattggttagtaatatataactacttggaaccctaggctagtttctagaagtgagttcaacccaagtggttatataaagtgatatcaaagcaatgaacttcaaggggaccgacgtcgcagaaggagcgacctacggattagtcttgaacgtcggctccaaatgggagtgtattgttaggatcttacattaaccaagtataaaattggttagtagtatattaactacttgggcactctcttctcttaggcttcttttgtgagtgaattttacccaaatagttgtatgagggcctacattacatgtttatagtatttaaatcctcaaccttttttaactcttgtcacctaattttattgttctcctcttttcgtttcacgatctccatgcaggatttaatagtgaatgatgttcgtcaaactctctttgagataatttcatcttttgatggcaacatggaagatgaaaaggacttgaggagacttattgaagcagagaccatagccttacagaaagctttcaaaattcctgtggagttgtataatgaggatggtcactgcaaagtagctggtaagttattgaatctttaccgtactgggcggcttggacactacactctagattccatcacttgaaaacgaaaatggagattatactttgtgtatataaaacaatatttatattatcttcaaaccttttgatttgggtggagaagatgtttagtttgaaacttgaaatcatgatgttcctacaaaatgctatggttttaagtagagtttttcatggttttaagtagtagttatggaaaaagaaaaaggaaaggaaaaagaataagtaagttgtgtgacttattaagaaatgagaggtatgaaagaaattggggaataaagagaaactaagccactttacttttaacattgatccaatgcataatggtagttcttttttctcaactctcatatgtaaataatgtaatccttatcttttgggcattcttttaataataatgatactaataaggctatttaggatttttttgccttcggaactatgacttatgtattattgtagtgttgtgataaatccaacacacaagtatacatatcgttttaataagtaatactcaggtaagtgagattgtttccacaaggattgtagctaagtaccaaacaattaaatttttgtttttatttagcaatggaatgaaaatattttaaaactaaataatctaatcaaaaattaaataacaaaacaaataaataaaataattaattatggtgaaattaataatgattcaagtttaaggtgagtaattttaattgaatctatcttatctggtttaacataatttaattttcaaagttcaattttcatgtgatagtaaatttactaaagaaatttatattcaggttaggacatataaattttagagtaatttgcggcgaaatccctttatgttttaatttttatacatttaaccctcttattttttttttgttggcaaaaccctgttatgttttagtttttatacacttaacccccttattttttatttattttttttttgtggcaaaacctccttatgttttaatttttatacggtatagtacaacatgctaaacgaaccctaaattcatatacaagaagatgatcaaattgtaccgaagatatgtttaaatggaagaatgggttttgttttcatctatagtattcaaacaatatacaaagcttttctttgtgtgattacataattataattacatgacaaaactttttaactttaaaaagaaaaataacattaacattaccccaaaccaaaggaaaagcctacttacaaataaagaatatgtaaaaatcaatgtgatttgtatgtaatttgaaatcatgaaatttgactatcttctttggaagttaaggaacttgataccataggcgaagacgaagaagaagagaagaacccaaccgacatgagcaaccatcaccgggatgagaaagtcatggtcaaatcctaagttatccttgagaaaatcattcactctcattacttttccaccggaaagttcaacattggtggtgacatcgccgacttgggatgtgaaaatgccatagattgtccaggcaaccggagagccccagtagtaccatctccaccatatagggatgagctgcaatgattgcaaatgagttcttagtaaatgcagccactaaagagaattgttcataagaaaactcagtaccaatgtttttttaattgtggagaaaagaagttgtaatgttagttgaatggttttcatgtcatttaagaataaggttacgttatgttgggaggaatgaaaacacaagaataaggtggcgtttggttggaagtaatgaaaaagaatggaatagaaaggaaacaattttcattccattattttgtttggttgcatttgaaagtattggaatgacattccaatagaatgccctttccaccattttggtggaatgactattctattttgaaattgtttgaaagacctttctaatgtattgagaaaaaatttaataatttttttttttaactttttaatgaattttaaattttattccattctatttctattcctattctcattctcatttctattctcattctatttctattcctattctcattctcatttctattctcattctatttctattcctattctcattctcatttctattcttatgtttccattccttccaaccaaacgccacttaaaaattagaacggaaataggaaataggaataggaatggaccaaacaaatgagtatagtgaaaatcgatttctttccattctatttcattttatgccactaaccaaacgcgacttaaatgttggtaagatgaagagaaacttgggtttagatcacataccggtctgggaatcatgaaaccagagaacaaattccagaagctgaggaagaaagccataacaattgcagcaatttgatggccgggggttaaggcgataaccatcataccatacatagagaagtaggcaaagcacatgaacatgaagtagtagaagtagaaaaatttcacaaatgtccattcataaccaatcatggagtacagaatcatgctgtatatgaaggtctgaattagaacatatattgtttcaatagccacctgcaccacagattttataggaatcaagatcagatatacaagaaggaagtgaattaagatttttgtagataaatatgtttataaatgtcaagtgtctcacctgagcaaatgcatatggcaactctgagtacatcccggctgccctttcacggtagaagactgttctctcaaccgcaaccacaggttgtacagcagaggcattacttgctccaaggaaaagaattgcagaataagtagctcccaaaagattgatcaagtccttttgggtttttctgttaagaaacaatatatagtttgtagtagtataaggttagcatgtggccaattatttgaaaatagaaacataaattttgttgaacttacaacttggttcctttgccccagaagatgattccaaataaggcaccaatcataactgtcatgaagaatcttatggcattgaatttggagtttctccagtatgaccagtgttgtttccagaaacaagccttgcattgagtgaaaaagttggtagagtattgggtggggaaatagaggtcctttgtgcccggttgtggggtgcttagctctttgatgagttcttggtttcttctgtaattcacaaagcaatggtgatattatcagtacaaacatcaaagagggtgagacaagtggacataaaaatgataaaaattgcatggtacttacttatagagggtagagtttgcataaagttctgcaaagtcaacattaagctgagtctcagtcgcgttggaggtgacatctaacatccaggtagcaggattgtaaccctctttgatcttaggaatgcctggaatagcctgcaagatttccattgttggatttagagtcatactaattatttaggaatttatttaagtggtggaatattaacaaacctcaaaatattcaacaagtttatgcgaatggcgaccgagttctccagcataaataacttgtcctcctcttttcatcaagaaaagctgcaaaataaagcaatgtcaaatttgactcatcacaatcataacgaaatatgagagattgaagcaattataattcgagttatacctcatcgaaagcttcaaagatgtctatgctcggttggtgaattgtgcatacaacagttcttcctgtgtccacagtgttcctcacagtacgcataacaatggcagctgctctagcatcaagacccgaagtgggctcgtccatgaagataatggagggattggcaactaactctacagcaatagtgagcctctttctctgctcggttgagagtccatctactcctggaagtcctactaaggcattcctcaatggttggatttcaaccaaatccattacttcttcaacaaacatctgtatgaaacaaaaaacttgagtcactttcatgatccacatcatcagtttttttaatgttaacaatggttgaagataaaatgacatgcctttcgtttttctgtgttgatatcagaagacagacgaagccaggctgagtacaagagagactcatagacagtaacatatggtgagtggatgtcattttgttcacagtaaccgctaactcgagcaaatgtagcttgattcttcgggtaaccagaaatgtttatgcttccttcgatatatccaccagtttttcttccagccaagacatccatcaaggtagtcttaccagcaccactaacaccaaccaatgctgtcaaaacaccaggccgaaaagctccactaacatctcttagcaattgcagacgagtttcttcaactccttgtgtcttcatttcctgatgaaagacaaaaatgtttctttacattaagaaagatgcatcaagtgtttatgatcgattttctcaggaaaattggcttactgcaggcatgtccacggaatagttcacatggttgaaagcaagcgataatggttggaaaggtaaaaccattcctcgactgacttgactgtttctagcattttcagtgccatgattgttcctttcttgcatatccacacctataatttttcattaaaagtcagataccaagaataatttgatagcagaagagcttttcaatacaaaatcatttgggaatttagtttgcttaccttcagaactggatgccaattgtgtctttgttttgtttttggagtcatcatcggtaatcagagttttagtatcaccaaaagctgaatgtatatcaaaagaaatatgtgaaaagaggaatcatttgagataagtatttggaaatcatgaaaaactgattatctacttacggctcaaataggtcaatgctgcaataaagagtccattgaaaagaaaagaaaacgcgaatagtgccccgatgcaaatccaataccaatattcatccttgaacagacctctttgatctagaagaactttcccaactgtggagtttccaataggctgtgaaagagaagaaaaaccagttatgttaaatggtgaagtagtttgtatggaggaaaaatcataggtaatttgttcaatgtgaacttactgcactccatcttttgtcaagaaattcattaatggcaattgcattttgtccatacatcataggagaaacatagtatccccaaatcatccaaggcttaatgtcatctgcattaccaagaaaaaaatggttcctgttagagagtggcacaaacaaaaatctctaacgactattcgatccaaaaaataaaaaaataataataatagagccaccaaatccaaaaaccgatccaaaaagtaaagccaaatgagtcacttgtaatcgggaatagtgagccaaaaaaaaagctgtttgtgatcgagttgtccaagatggtgagcaaaaaatagctaccatcttgagaggggatgttaaagagtcttacattgctaatgtatgaaaagataatagaatattaagatccatgagttactcctctcatttccaattggttttgagatgaaagtccatgaactttaccaaattctaacatttccataacaagatgtctttaataactacaaccaatggtatttcaatgatgaaattttcttaatggtaagaaaattctaacctttggcaacaatgtaaccaccaaggacaaacaccaatagcaaggtaaaagatccaattgtgttggcaacaacatcagttcttccgagagctgcaatgaaacgaaacaaggaaagtgccatctgatggacaccgaagaaggccaagaattgtttaaagaacctgtaaatattgaaaaacaaaagtcatcaaaatgaagagaattgtgagctaaataagaattatgttgagatttttaacacttaccttgcagcagaaggtgcaaaaccaatggtgtagtatgtaagaatgatccaaatgcctgattccaaaaatgaaatgggaatcctcagtacccaaattggcaatgcaaatgcccaagcagggtaaaacaatgaatccctttgtttatagaacacaggaagccgaaaaactgtcatggcaagctcagccatcccattaaacatgacattaataagactgaaaaagagtgctccccaaaactttgctccatcttctacactgccagttttcatttctgttcttaagaacacagtcaaagcaattatagccatgatagtaatctgagtagtcttgaaaatatagataaaagagtttcgcttcatcaacatccattcccttgcaaaccctgccttgaagagttccttattggagataccatatttttctttcacaagtgcagcaggatgagctttgtttttatcatatggaattctttgatcttcagaaagactttgaccaacatgaaaagaggtgaagccactcacgaaatcggtcacagaaatgtatctgtaaggttggtttcttctaaaccagtactgttcttgatcttttttggaagtaacttcttgaagaaagtcagcaactccttttctatcagggcatttgaaccccatatgctcaaagaattcgagaacattattgcgaggaccttggtagacaatctgaccctcagaaagaaggataatatcatcaaacaagtcatatgtctcaggtgcaggttgcagaagagagatgaccattgtcacatccatgatatgaaccatttgcctcatgaacttgacaatctgaaaggttgtggaactgtccaaccctgttgatatttcatccataaaatatgctttcgctggtccaaccaacatttcacctgcagtatatcaatcaaaggtaattccaatcagaatagatttcatagttcaagcatgaaaaattcattggccaagttataatgtaaggcagctacatactgggttgttcatacaatctacaatccgtggttctaaaccccaaccaatccagactaaaacattcgagacttggaacaaatgaatccggtgttaatagtttctttaatccggactgcttatcattctccggttcgatcacattttagaattttcatcagcggttcaaatcagaccaaactacttaatttttttacatttacataattttttaatgaaataaagatattcgggaacaatattatggagaatattgatattgacttaatattgtttattagactacttttatttattgctatatattggttttgtttaagcatttaagtggtctgttttgattttgaatttttcaaaaccataatactagtttggttcaaaaaaaaataaaaatttggaccaaactaatccgtgaacagcccttacatacctgtagttacacgcttcttttgtccaccagagataccccttctcatttcatccccaaccataatatctgcacagatatcaagtccaagaatctgataaaaacaaaaaatgaaccatgttagacttgcaaacatcaagagaagaaaaggtacaacaaacaatcttaaaatggagaagaacaaacctttagaacataatcagtgatcaagctggtttcttgaccttccatagctgtggctttcataaaggcatcaatctcagcatctggtttaattccagctgctttctcccgtctagacaactctaccaacaagtcatatcttgttccaactcccaaacaccgccccgaaaagtccaatgtttcgcggactgtcatctcaccatagtgaagatcatgttgactaatataagaagaggttctctgaggtacaaactctttaaattcatggccacagtaagtcacttttccagttacctgtttgttggtcaaagtcaaaccttaagttaccaaacttgtgaacctttaaatacatatcagactaatatatattaagagaagaacacaaacccttaaatcataatcaagttttgcagcaagtgctttgagcagtgttgtttttccagatccaggtggaccaagaagtaaagtcaacctgtaaataaatcaatttgagctatatatatagcatttgaagggattaagaagaaaaattagtaaaagttagttgtgaacataacataccttgaaggctttgctataccactcacatcttggagtatcttaaccactcttttctttgatggagtgagtccaatcattccaatgattccctatttaaataagatttatagtttagagaagtgaaaggaaaaagaaaaagagtaattggtatgagctgaattatatgaaactcacctcaatcatgttaagacttgaattcaacagagttggaagagctctagttcctacataggcgtctccttcaattgataaattctcaaatctaacttcaaccttaggaatttcaatcccaaccctgcaccaaattatgaaatttgaagatctgggatttacaattaatcatattttgtaaaacaaacattaacacaaacacttacccaaaaaaaaaaacacaactacttcccttatttcagtaattttctttcattttctcataaaccaaacaaaacaaacagtcacaacataatcaatgaatcattacctgtcacttcaatcccaaccctttttatacatcaagttatgaattttgaatatctggaattcataattaatcatattttcttattcaacacaaaaaaaaaaaaaaa

SEQ ID NO: 14322 - DNA, 11740 bp, Cannabis sativa
  modified_base (27)..(27): a, c, t, g, unknown or other
  modified_base (61)..(64): a, c, t, g, unknown or other
ctgaaggacattcgggctcagatcttnattatactctgcgacagacaggaatcaagggttnnnnatctgagtggaaggagacacattattctgctgccgtcgcggtaagatttcttaactttttatgtgttttaattatcgtttttagaagttcatatttaggttgttaaatcaacataattgtgagtagatctaagatcctggtaaaataaattctgacagttttgtagtagtgtttccacaccaacttcattttaacaagcttccaaacacaaagttttgaacaatgtcatggatgtggaaatagatgctctcgaaaagaaccacacatggattgtggcgtctttaccaccaaaccaacaagtcattgaaaacagatgggtatataggattaaatataatcctgatggatcagtggaaagatttaaagcacatttagttgccaaagagtatgctcaaaaactaagaattgactatttcgaaacatatgctcctgtagaaaaattcaacaccttaaatctcctttttgctctagttgccttcaacaattggcacttacaccacatgaacatcaataatgcttttttgcatggtgatttaaatgaggatgtttacatgaaacttcctcaaggctattgtcctaaaggagaactaccagcaaatgcagtttgcaaactaaacaaaagcttgcatggccttaaacaagcctcacgtcaatggaatgccaaactcagcactaccttgttacaacacaatttcaaacaagctaaaaatgatcatttcatattcacaagacaccaatttggtgtcttcgttactctccttatatatcttgatgacataattatagccaccaatgacataaccactctaaagctgttcatatcaacacttgattccaagtttaaactcaaagatcttggcatccttcgcttcttccttggccttgaaatagctcgatgttcaaaaggaatctctgtttctcaaaggccattcacattacaacttctcaaagaagttggttgccttggttccaaaccggtctccactcctatggaacctaatactaaactaagtaacaattcaggggacctcctccaaaatccaactcaatgtaggagtctcattgacaaattactctatctcacaataacacggcctgacataatgaataaactaagccaatatctctaaaattctcgacaacctcacatgcttgctgcaactagagtacttcaatacttaaaaaattcaccaaaacaaggactctgtttttatgcttcccttccacctaaattccagctccaagcctttgctggtgcaaattggagagcctgtgtcgacacaagacaatcaatctcaagctattgtaggcaaatcactcatctcatggaaatcaaagaaacaaccaattgtctcaccgtcttcagctaaagcaaagtatcacgccattgccaaggctacatgtgaactcacatggctcacttccattttccaagaactcagcatcaacatcaatgtcccttcgatactattctgcgataacaatgccaccatacatacatcagaaaactcaatttttcataaaagaacaaatcacgtcgagatcgattatcacatagttagagagaaaattacaaatggtactctaaagttgagtcacgtttcattcaaagccaaacttacagacatcctaatgaaacctctttttcttgctcctttcaatgaaattctgtccaaaataagtgtaaagaatctctacgctccatcacaattagttaattcagaattagttaggtatttgttatacttcagctgactttatatatatacatctattaatctaattaataaaaacattttctctttttctttctaagttttctaatacaaacaaagctgggtcgataacatcacaaaactcatcaacaaaatcctcctcaatctctaaggtatcatataatgcagagaaatcatccataataagaccaaaggaaccatcggggaataaagaaagtcgtcgaaaaaaaacaccctgactctagagaatattaatggaaagtttataattttttataactgtattcgtaattaaaaagtaacttagtaataatttgttcgttgggaaagtgattaaacaaactactgtactgcagtggatgtgcattaaatattaatggagctccgaaaagcacacacacctaaataataattacaattaacgtttcaaaattcaacagtaagcatgaatttttgagttaaaaaagaataaacataaattttgatttataacagtagacttatggaacacgtggcaaaaaagtggattagttctagttctccatttccttcgttttcttttactcgtcagaagagagacaacgaacgaagactaatgctctaacccccaaacctagagagagagagagagaatttgatcagcggataggtcttagattccggtcatttctcggcgctgaccggaattttctccgacatggttgctaaaaaatcctcggagaggcttcccgccgggtggaaagtacagtataaagtccagaaggctggtcgaaaagtcaaggtatgtttcttcttatagattctagggtttctcacttgggtgttgagagcttcacagttttgacttactaagctaaaattatcctgttgttttttgaactgatcctggtcccggtgttgggatcaggacctcaatttgagctcattgagttttgatgttactaaatttaggatttgttgaatttcttgattagaagtaaatttctttaggttttttcatgcttagttcgatgttttcggctgtatggaaaatggaacgggcttcttgtttgttgtggttgtatgaagggttcttaccgtgcgttggagaagaattagctcttcaatgctgtgtagctcttaaatgaattgcatttaggcgatctgattgtgcatctttggctcgtatggaaaaattatcgatacagtatttcttctgatttacaaaagaatagttatgttgtttgttaaatgctgaattagcttgaaatgtatgatgtagtgtgatgattttactttcctctcttgttctttgtgaagcttatctgttaattctggaaatgtcaaatcgagaaatgtaattattactattggaacaatgggcaatgatgttacataagaagtgtgaggccgtgcaaatgatataaatatatatatggaacacgtcttaatgcgtattacccatgaatggttactaaataaatttaactataaatattaattttatacatagttatttttcaaataagaatgtagaacacttaaatggaaatcttgaaaatggaagtgttgtaccagagctaatggtgtcataatttacttgccttgatagatctatgcaaatgtggaaactgggaaagagttcttttccaaggaagatcttttaaactatattaaagcggaaggtaatcattctagtgactctcaatctactaatagtcacataacaaagcatgcagaaacaactcctttgcaggtgagacataatcatcttcttcacttttttgttactcttcatttgctttatcttttcaatcagttggtcactatatcttgttaacagcttgcaaatgacaaagatgagcttcccaaatggttacccaaggattggaaagttgaggtgaaaactcgacagagtggttctcttgctggaaaagagtataaggtaaactatatttgttcgacattctttgaatgtatgtatcatggttcctaccctttcatacttactaccatttctttggacattgcaaagttgccattgttgtgtccttgtttcaaatgcagatttacatcaacaatgtaccttaaagtcgttaaaccgaattaaatctttcaaatttaatttttcaagaaacactataattagtgttcacagtgtttcctagcagtcatattaaacagaagtgttgtgtaattgtaaattcgatgataaacctgatcaacattttttttcaaagcaacctgaacaacatttggttattcataagttagagagaagttatagaatgattgttttttaaacattgtattagaaattgttatgtggcttctactaggtagatatctttgtctttatatttatattgctgtttgtcaaatctgttaactagctctatatttctaaacgtgtttcatttaaagttctatatatctatggctgtctatactctgtaccaaattttgttgttggggctcaaaattccttatgtactattaagaaagaatttgattgtggtcatagacatacctagtggtttcacacttctcctcacaaataggaggtcccaagttcgaattaagaaagaatttgatccaattatgatgaactgttgagctgataagagtttatgatcttttgtgttaaatgtgagttttgcttcctgtgataacacatcctttgatttcatagttgacttattttattgcagtgttatattgacccattaagcaattgcaaatattattccaagcctgaagttcttcgatatctcaaaacggtagggggcaagaccaataaacaaggagaagctaaaacagttaagggtaatagatgcgtatccaaagaggtcacctgttcagtaaagaataatagttgtgtaaaggatgatagttgtgtaacaaaagatgccaaaacagtaaaggaaaatacatttgtatccaaaaatacgaaaccagtaaaggatgatacatgcgtatccaaaaataccaaagcagtaaaggataatatatgtttatccgaaaacaccaaagcagtaaaggacaatagctgtgcatccaaagatgtcaaaccagtaaaaggcaatagctgcatatcagaaaagaagactggaaccagcatgcactctgcagacaaagtttgtatctcatactattttgatgctacttttccctccctctttatttctttttaggaaatattctttaatagtttgtcctggtgaaaaaaaaaagattttcgttgaactcaaaataattcataatatgcttataaataaatgtcaaattattagtctaagatggataatgaataataatttgaacataatatagtgacacttgcatgtattaagttcaaagtatggtactactaaattaatacatttggaggccaaatataacttaagctgagatgtcttcatatattgtaattcaaactgacatagaaattcgcatccatatgtgaagtggcttgtcttgaaataatgttgtagcattctgcaagtatcatttttgtgttgctaagacacagccctgatgatataagtacaatttaggttgtggagaattgtgaagccgatggtttaccaccaggatggacaaaagagctaagaccacgaaagaattcaaaatcaataaaaaatgatccggtaggttttcatcttttatttttatttggtagaattgatctagagctcagccccttccctcacctcgtctcttcctctatatgcacacacaaataccgtatagatttttttttgaaattatgttgaaatcagttagctttgtttaatgagtgctgtactgatagactaaattttcagtattatatggatccggttaaaggatatatatttcgctccaagaaggcggcctggcactacataaaaactggagagattagtagacatgtaattaaaccaaaggattctgaagagtcaatgaaggatgaaatcgcagtaagtgttgacacattcctgcttcatgattgcgttgtttattttgttaaattttttctcaatgttaataaaatgaacttgcgtatggtttttttaatggtctcaacaatatggttttttaaatggtctcaagaatatgatacaagtttcggtatatgttaagagcattataacctagggaggtaagagagtttgatatgtgactcaggtatgtaatcaacaatatgtgagtttcatacctatactatataggtcaaaacattagtcattatttttgtgagtttgctaaaaggtgagagtattgaaaacattgaagattctacgagtttctgaagtgtttatgtgcgtaaaaaggaacgctataattataaataatttcatatttccttaactacgtgtaagtaatcactgaatacgttgtatggttaatgtctttaattagcagtatcgaagcatgtattttgtttgtcagctactggtatcaattaattttcactgtttttatctttcaaaaaaggaacttctttgtgttaatataaagaagagtacaaaaacagaagatcagaaatgatctttgaaatagcctgaaacacagatattgatattaactttaactcattgatagagcaaacccatttattaagggaatattgtcttactaatacttttattgctttgtttgtttggggatttatatttactcacacgcacacggcccttgcaagaatgaggagttggtgtctaaacttcccttattgatgaaaattattaacctaccaaatcgccgtaaatgtgtatatttttatgtggcaatctcttaaatactaacattttctttttattataattatacaaatagatcccttttgacatgtatcatcatatagaacaaaaaattaatattgtttgaccttgaaaatacatctttctgtccatttagccatcatctgcagctaaaaggcaaaaaatggatcatccagcaagcaggcaacaactcttttcaggtgagatcacagccattataattgcttctcaaaacttatgagcaatatcaagaggctactccaatctcaggttgccaatggcaagcagttattctgaactcatctgttccttttggggaaatcactgctgcaggtaagatggattctgagacgagcaatttagaaatgccaaaaacaagagggtcaaagatatcaagtgccaagcgggtgtcccctgaaactgaggccaacgtcacaatttctgccagggatgagactatccaggaaaagcctcagttagataatacaactcaagagcttgttgataccgaggaaaaaggtgatccaaaaaagccttcaacaataaaagctgaaaggtccaagagacgtggagaccaaaattcaccactttctgatgctggagcatctaagagaattcgaggagcaaaagacactgccaaagatactcttttctcaacaaattcacctgatatcctgaaagaaaaggcttttcttgggacagtggaattgagcagtgtcaaggaagctaatgttacttctagaaattctaaaagcaagaaagtgcataacttgcctgctcggtcttcaaaaaggcttgcgggagctgaacctgagaaggtgttgaacttggaatcgggtgaacgagctcttaaaattgaaattatgaaaagcagaaagactgaagtcattcaagatgcaggtttgactactgatgttttggcagatggatcatcagcgaagcttgagacaagtccaggaacaaagttcataggccatgctttttctaacacaaatgattcattactcagagattcttcaaagaagagctcaaaaccccttaaagatcaggtgactccagagaagttgcctgtaaatctggaaactgatcatctgaatgacagttcagaaccacagcttagtcttctgtttggctcagacccctgtctggacttcgcgttcaagactctcttaggtgaattaccactggatgattctcctctagaggaacctattttgagtcccgaagatgattcaatacaacatgtctcgcgtgagagtgttaataaaaaaagcagtactgaaatagttcgcacaagcagaaataaacccaagaacaagaaagagcgtccgttgcctcatagatcatcaaagcgacttgctggggctgaacctgagtttgtggttaagtctgtgtccgttgaacaagctccccaaaattctagtagaaagcgtaaagataaaagcactagttcatccgcaaatgtgctgcatgaagcaaatcagctgcttggggctgagccagaaacaaatcagctgcttgggtctgggccagaaacatatcagcttgttggtgctgagccagacacaaataagcttggtgctgagccaagagctaagtcagaaacaaagcttcttggggctgtgccagaaacaaatcagctgcttggggctgagccagaaacaaatcagcatggggctgtgccagaaacaaatgttcatactcagttacctagtaaagacacttcattgcaggcagagccattgaataaaacatttaactctttcaaggattctgaggcacctcaggagcaacaacagatgcacgagactcaaaaggcagaacccgagaggccagaatcagatgtttcattttcattcgcagattattggtccgacccttgcctagattttgcatttaagactctgaccggtgtaataccaatagaagaaagttttgcacagggtgattttcgggcgcaagttgatatttctcagaaccaaaggagtagtggttccacactgccagattttggttcacctagcttgtttcaaactgacatatcatcccagtttgctacaccagaaaagtctatgttaggtctgccgtctgcagtgacttctacagtaatgtccaatggaaatgtgaactttcctagttgcaacggtattcattcccaacaacagtgcttggaaggcaataataacaaggatttgcaccaaaaggtaaagtcttaaaaaactggctgctactttttgaaatgtagtaacacgtgtctaggtacgacactttgttgtaaaagttgttccctgttactcttgtgttgttgtagtggtcccaacaaaacataacaaactcaaaaatagccctcactgctgtaaacttgtcatgtttcgttccactttattgggatatgatttggtcatatggattattgtttcacctaaaattccaaggtcttaaacatattgattttgactcttactgtataatggttaatgcagttcaaattaccataatatgattattattatttattttccaatttagatattatttcagtattgtaaactggtatatgatttaactaaaattgtgatgcaactaatcggcatatatatgaaatgttgggcttaattcatttggttgtctccatccaaaccaaacctcaaatcaaaagaaagaatgcagaaaacatccaaaaccaaaccaagccaatgtttatacaactacatattccaaaacactttttatttccatcacaagaactcaactctggtatcttaaaatccacagcagatcatggatactcagtagcaagactcagatcattgacactcagattcattcagtaggagtaggaagactctttccatccccccacactctcttcttcagcaccggagttacgttcacggcgttcctaaagatgacaaacaaacagttagttccctctgcttttctaatttcagatacaacatttaagtaacaaatgatactagattcaaatgtacctcaggaatgaaattgaggccaactctgatctctccacgatattcttggtcctttactacgttatatacagttggtggaatgcttccttccgtaaacagagcgtctagtgagatactgcaacaactaaacatatgtaagtgaaaagggtttgcgggaatccaaatgaagcaatacaggtaattgaaaagccctcatttctactacaagtgtttgatatattagatgacagtacttacgttgcttctccaacgaaatcatcctgggaaatgttgtcactgtccattattttcaaggtgagttctgaaacgccctcagagttcacactgaacacaaaattttcattccattctggctcagtccctttccctgcaccaaaatatttgtacaaaaccaagttttatttatcagctctataatacattatcgttcatatctaatatctatggattataatgactatgcatatgtacacctatactttattaaatacatatgtacaataataaagctcatatttttctctttatcaagaaaaaagttgaaacgttttactcaccagatgcaacactgcttttctgctcttgagttcggcaagtaaggatgacataaggatccatgtcagctgccccccaaaaagaacaaatatttatattatataataaaccatatgggtaagaaaacaatccaaaaatttcttatgaattaaaggtggccatagctttttctttttaccaaattatcatatttataaaccgatttgaatataatagcatatcctaattccacaagagaaatccatatatcgaaatgcaaatgtagtataacttttctatgaatccggattgtgattttaacaaatgtcaaatttccattgatgcatttcataataatgcttttgcacagatcatataagaaattatcgatcaccatgaacaaattgttattgtgataaattccgatcacacataataccctgaattgacccgtttcttaggccatattttcttgtggtttctcagccaccaaacagagcagatctcaaacaatatacgacaaaaaaaacccaaatcgaaaaatgatcaaaacaataaatgaaaaatgtgaaagtgacagggaagaacttacaaagaaaatctgtatcctcaagacctttagcaccaacaagaagaacttcaagggttccttgagccatttgcttgtttggattctccgaagaaaataatgaataattagagattaaggtagagaaagaattatagatctaaaagaaactaggaaagaattgacactttttcttgggtagtaagaaaaaaacggagatgtccgagaatataataatgtaattaattataatcatggttgaggggcccataactaaaccggttcggaccaaaccgggttttccgttactttctccatattttcttattaaaaattacaaagtcaaattttatcaaaaaacgaaagaagaaaaaacgtagtcaaaataaaatggactcggcagttgtactagatcacaccgcacgtgttattattgctttttttgctagtctattattattgtttttttggtggatgatcttttagaatattattaaattaaaatatataaaatttaatatttttttttaaaaaaataattctaagactcaacatttaattggtttcatgaggcaaagtttgatgtgagctagcattgaagaaagcttatgagactaaaagatagtttttccaaagtaaagataatttaagccaacaacaatggaaaatttcaaataaacaaagcatatcattttttagttgacaatggtaattgggtctcctttgagaatacttgttgctccaaaacatcgtttcatcattttacaggtagttcattcaaacttttttactgataataatcttatcacgaagaatgtgtatgttaaatttgctaggtgtccaatgtgttagatgaatttggaagaccatgaatatttattctttaattgtcctttctcttggaaagtgatgcaaaatagtagtaggtggccacgttgccacctttggcctaacaagtttgaagacttagtccattagatgaaaattaataagccaagtcacaaatcatgttctttttttttctttttttgaaaggaaattcaactttatttatccttcaaattcagctaccacacatggaagcaaatcagttgggacat

SEQ ID NO: 14323 - DNA, 5188 bp, Cannabis sativa
taatgaaatgattaatattattgtagagctacaagaaatccatatgatccaaacaagatttctggaggctcttctagtggatctgcagcagtggtggctgctggattatgtcctgtcgccctaggtgttgacggcggaggtacactacattatacacgccaaaaactaaatttttattactttactatttttataaaacaaaaataaaatcatacataaatgggtaacaactagtacgtctcattattaactagctagagttgaagtggcctacttattaatttttacggcctcagccatttattacctagaaaaagaccttatactatttataagtcataaagtactacctgcttattaccttgtttacttacacctcagtttctaaccttaatatatatcatatacttttttctttttagagaaagtagtttcaactctcataaaagggagaactatataaaatctcattgaataaagttatcggccataacttgtggccagatacaaccataaaataagtctcactgccaaacaaaatactagagaaatctagagcatgagatataccccaattctagagcaatacaaaaatttgacattaaaggatatataactcattacaaatatcatatatatgtctttaagaataaagcccaattagagaaatctatcacaacatacaaatatatgagttactctccagctataaggtggaatattcttagaagtttcattttggtagtttcggcaattattattcacttgttttggaaaatctataacaacaatcaacaaacattttctatctatatagataaaaacaattgaacttttatcaatactatcatatcaatcaaaacaaagtgtacaatacataataataaaagacataaatcatccacaaaaaatgagacactacattttaagtggaagctcaataaagaaaaaaaaaatactaaaagaataaatatagctcatttaatttttttttcaatcagttaagtatatatttcacaaaataaacttacatcctagcagtcattatcataaacttgccctctattaaaaaaaaactcaaaccatactgtaacaattttttttgacataatacttttgatgctactttttatattatatttaatctttttaacaataatatctattgtatcaattttcatgttccaaagagcatcattcctacaccaccaaatgtggtatactgtcgccgctaatattactgaaaacacttggcgtgagatctatttagttttgctctagccagccacttcaatatttccaaaacggtatattttgtcgtagcccaaacctaatgcagccacaggttgatttcaacccaaacataaatactcaaatggcaattaaagaataagtgctcccgagtttccctatttagcccacaaattaaacatttctcatgattttggcatatgttgtatttaaacaatcgtgatttgaatctcaatctatctaataccaccactcgcaacataaacttgtgctttagtatagataatttattctaaattttcccttgcgaatcaatagtgggaaaagttagataaaatttagcatatccatcttttatcaagtacatacctcttatagtatatttggaaaagcattcagccccatcaatttactcttcacttttaccacttgcttccaattgctggaagggagcgcctcataggccctctaatttctttctcctatatacatcgtattcacccatttgacccataaagtatcttgcttagactcagtagcccaaacatacttgccaatagctgcttcattccattctttggttcttctgaatcccaatccaccttcttttttggttttgcacaagtcatcccaagctatcaaatccggttcactagagtccacccctttccaaagaaagcttctacatattgaattaacttttttcaaaacctttcatggaagaatcataccttgtgaccaataagaatggatagcgagtaaaacataattaactaaggttgcccgacccgcataagacaagtttctctaactccatcctttgattctttgcacaatgttctcaatcaagacatcacagtctgaaatagatagttttttgtcacaaatcggaatgcacaagtagcaaaatggtaactggcttcttctaaaacctgaggcatccatcaccctttagatttcttttttagtcatattgcaatagaatatttcagacttggtttcatttggttgtagcctggatgtttgagagaacagtttgagtccttgaagcatacgataaatctatttaaaattatcgtgacaaaatggcaaaatatcatctgcaaagcaaagatgattcagtttcaattgctcacgtcttccatggaatttaaaatcatcttttcccccaactttcatcatcaatcttgatagatattccactacaaagataaacagaagaggagacatggggtctccttgctgaagacctttttttgcttcaaaaagcccatgcaaacttccattaaataaaagactaaatcaaggagttcaaacacaaatcatgactagatgaataaattttcttaggaacttgaaagcaatcaacatgtcttctataaagtctcattcaatcgtatcatatgctttctttaaatctaatttaatcatacatttaggtcttttcctacttctccatagtgtttcaacaagccttgacatatcatggtattatacgcaatgaatcttccttagataaatctactttgattttgagtaatggtatcaagaagaatcattctcaatttagaatagataaacttagttgtaattttataaatcacattacaacaagctaataggtcaaaaatctaagactgagttcagcatttaccttatggaattagagtgaaggtggtagaatttatctctttgagtagcttccctggatgtaataaagagataattgcatccccaacatcctttccaattaattacctcccaattatcttgatagactaagctactaaaaccacttggccttggcaatttgttccccgggatgtcaaacactgctttctttacctattcaagtgtataatcagccaacaataggttgttgtgagtttcatttacgattgggccttgagccattacccgattgctaactgatttccttccagtaagagagttccccaagaggttcttataaaagaaaaaaaaatgccttagtcactagctcgagttgatgtatcatattaccatgctaatcttgaatagaataaattccattttgggtcctccttgcatagatactagtatgaaacaaggcagaatttttatctccatctttttgttgaaggaaagagatacaattctaatgagctacctcatgttggccctgaactaacttttcatttgtgatcatctccttgttgagtggatctttccctagctcttcttggcattctaacagcaactgtctaagtcaaatctcatttgcttgcacatttccaaatttatttttattcagctctttcaacaccacctttaatgccttgagtttttgaatcaatcttaacataggagaaccaacatagttcttgttccaaacagatttagactgttgtaagaaatttggagctttttgccaaaatctaaaatacctaaaaaattttttcccttgttggacattcgggtacaccaaaagcaaagtaggtgagtgatcaaattcttcctctgacataaacagtacctcgacagtaggaaatttgattagcaaaaattggttagctaaaacccgataaattttggagtagattcaagtttcggcatcctatttgttcgaccaagtaaaaaattactagtgaattttacatcttccaacccacacacctcaactaattctttgaattctttaaaaacatgctacctctttattcccccaatcctctcttccacgctcaagatatcattgaagttacccaaaacaatccgtggagacttcactaacacctcaatctctttcaaatcatcccacaatattttcctactttcctcatcgttgaaagcatagacaaaggctgccaagaattcttccaaactagttctcgattgaacttttaaatgcataaattgactagtacatttcttaatgtttatagtaaacataatagaattccaactcactatttatagagaagcaccaaccagaaaatatatttacatatacaacacccaatttattttggtttcaaggagaccaacaagacctacttgggaagagaagattattcgtttaacctcctcttgcttttggcgcttgttgatccccctggtattctagcatagtattgtatccatttcccccaggagactctcccctccctgtgtacgatcctattcactagtcatagaacattcaccaatttgtggtaacatcctaaaattgctcaaagtatcaatcccttcacttactttcttttccttccacaccaccttagctccttttttgacttgttggaagccctcagcattggacttctttttaggatccacagtctctcttcctttctccccccatacttgttttgacacttcctttttctcacacttctgacttatgtcccatacccaagtaatgatcacatacaattggtaaccatttatgaatcacaagcaacataatgtattgattcaatttattagtaagtgaaaccaaatcagaaaattcatgatgtacctaaactcctaacattattcgaggatagttcaacatttctttgttctttgtcacctcaaatagcattccccagtgtgccaaattttttgaataaagttccttctctccaatacataagatccaaaccatgaatttgaatctaggtagctacagagcaaacatctttccgagtgaaatctatttatggatccattctttcataataactggtttcttgtcaaaaaataggtaccctccctaaagaacctcatctctctgagctacagtcaagaatctcacaatataaattcctttggctaacaaacccactttctacagacctttgttcttccatattctattggcaaaaccattaaacacactaaaaggaggattttcccccatacatagcaaactaaggctaatttccaaaattcaatctcttctttaatatct

SEQ ID NO: 14324 - DNA, 5153 bp, Cannabis sativa
aaattttagtttattaccaagtttatattttagaataccttatttctcaagctcatacaaccctatttcacttacatgtccaaacctcatgtgccacaactttatttgatccatgcttgcacttttaattggctactttgcagcctttccaaccattgtcttactaggaagataggggatccatttatgagatcacctttcattacaactgaagagcattttagtacttcaagtgaactatcactttaaatgttgaaatctttggatgttagtttacaataagaactcacttgtaacaatggtgataagacacacaacatgtcattaacattcttccttatctctcttcttttctctacaactctctttgtttctctcactagattttaggattatgttacaaatgactttaaggcttgactataaatagcctttaatctagctattaactgttataaatgacagttagttagtatttcatctagataattagttgtcttgtggccaaaaacaacaatggtcagactaaatataagcattaaatatgaatccataacaggtataatgagccatatccaacatggatgaaatgtttaaagaggataatgtttctccaattaattaataatttcactaaaatatatgaaaatatatatagtcagaacatacagaaagtatatgtatataaataaacattgctttaaattctactctctacatttattaaacactaagcaatcggccacaactggtttaagtttaagaagcagtaacattcactctttctcatcaatttttattaaatactgtttttttaatcaccattattttatttttttatatctatataagttgtgaataaattaaggattgtttgatttattacttttataaggatacggctgagatgaaagtacataataatataccttgtcaaagagtaaaatatatatttttaaataaaaagttgtattttaacatttaattaacatttaaattttaatcaactcccccatttcaaaaaaaaaaaaaaaacaactacaccttctactcatagaaaagtacacaaaaatttcacttctagttctatttatataatggaaaataataattattttttgattgaaaaaaaaattaggtagtgtaaattttatctctaattcttttagcttaatagtaatttcagagattatcgaagagagagctgagagcctaagatttatacatagactctaagatggttgctagttgatggcctataaggcacattggcacctattgctcctaaagaaagaaccacttttaaggcaaagattaaagtgttctaactctaaaacgcaatcaagtgaggaaccttttgcaaagtatctcaaccattataccacacacttagtgaataataacaattaaaataaaagttttggtgtttaatgtaaatatttggtggattggtatcagagccgaccttgagaatatatgagcctaaggtaaattagattttggaccctcagaaatatttatataaaatattgaaaaagagtgttatgggattcgaacccatagcattatataatatgtcatacacatcaactaactaagctatgaatatttgttgtttacaatacacttaattttacttaaataaaagtctaatgaaactttttttattttttattttggacccacaaaaagtgtgggccctaaggacgggcctagcccgcctatgcttaaagtcgttcctaattggtatgggaaacttacaaaaatactggaatttcggttaacttttacaaaaatactgccacacgatttttttctcaaaaatattgtatttttataaaacaacagtagaacacaaaataaaactaaaaacaacaatggaacaattaaaaaacaaccgagaacaacagtaaaaactgaacacaatacacattataaacagtatttttgaaaaaaaaaataattccaccttacagttaaaaagtaaaaaaaaataaaaaatttcagtatgtggtataaataattctatatattttgttaaataacaattcatattgtatattttacaaaataaattaaattgatacattaaacttaacttcggtaaaataattataactaaattagaatcttatcaactaaaatttgttgaataaatgtttaattataacggagctaaggtatcaaatatttaatatattttgtaagatataatatttaataaattgttatataattgtacactaaatacgaatgccaaattagtatttttgatgaattgaaatacattatatatatttaaggaagctatataattaagctagcacagcaaaatacatacatgaaattaattaattagcaagctaagtacaattattgttttgaattaataatacaaaatatggcatttttttggtcacatgaacaacaaacggcgcaccttacttaatttgattgtaacattattaataataaccctttaatcaaaccaattcttccatgtctaagttatatataatatcaatcactatatatacacatataattatcataacatatattatacataccaaattttgagtttcaattagtgtccaaaaatctatatggccaccaaactaagcttgtcactatttctttgcccaatactaatattgatcaactcaaccctattttgtgatgcggcagcatcttacaatgttgtcatgaggttcggggccaaaccgaatggtcaaagtgactccaccgaggcgtttcttcaagcatgggccgcagcgtgtgcctctactgagtctgctcttatatatgtcccgaagggtaggtacttgcttcggcctcttattttcttagggccatgcaaaagccctcacatcatgtttagaatcgacggaactctagtggctccgacggactaccgtgtgcttggtggagttgagaattggattaatttcaaaagagtgagtagtgttactattcttggtggctcacttgatgccaaaggacctgccttgtgggcttgcaaagctaaacccaacaactcttgccctactggagctacggtacgtatgtagattcatataataattactatataagtaaaatcctcatagatttttttaagtagttttagctagataatgaagagtgtttatatccaatctattttttttttttgtgaaaaatatttcattttaaatttttttggtaaaaaaatatataagtatatatttttagtattttcaatatatagctaattttgtattaaacgatgacaactaaacttttcagactgttataaattttttttattaaattattgaaattgttaggtttaaaattttttgtccaatttcattcaattttgttaatgtggtaattgttcatgtgtgcccccgaactttaatatttactaaatcataacctctaaattttagtatgtatcaaattgtaccctaaattttcatttacactagaatttctttaataaaattgaataaaagtccttaaattcaaaaatttcaatagttcaggaaaattttttaacgatttgaaaaattcaaaaataagtatgattttacaatatagtacatatcaaattttagagagcaacaatttgaattagcctacttttttttatatatgtgaatattcaaaacagttagtcccatcttagataaatataattgattgattgggaaaaaatagtatggtttaatgtatattttgggtttatatggtttaaatattacgattttaatatatatatatatatatatatgttgactaatattaatctatatttacagactttgaccattacatactcaaacaacatcaaaatcgtgggactattatcattaaacagtcaaatgttccacattacaataaatcattgtgaaaatgtagagataaaaggagttagaatattagctaaggaaaatagccctaacacagatggcattcatcttcaattttcaaaaaacatagcaatatttaactcttcagttaaaactggtgacgattgtgtctcaattggtccgggcactcaaaaccttttgattcaacgcatggcatgtggtcctggtcacggcattagcattggaagccttgctaaagaattggaagaagaaggtgttcgaaatattacggttaaagaagttgtttttactaaaacccaaaatggggttaggataaaatcatgggctagacctagtttgggatttgttaaggaagttcagttcttcaatattgtcatgagaaacgttcgaaatcctattattattgatcagaattattgtcctcacagtatcgattgccctaatcaggtataataaactagtaagtttatgcattattgtattttagaatcatatatctatacatattaggggctcaatgcatttttttttgtctctcgtaactattttgaactctattttcttttataaatgtgtaattaattatttagaactctatttttatataaattatataattttttttaaaaaaaaatggtgaaatatttattattccatcatataaaataatttaagttattcctattagtagaagcaaaactgcgataaaatatcctataataatttttttttatgttgagtcggtcttgaaattgaatggactttaagaataaataaaattattgagccctttattatataaatatatagtatttttaaaaactactaaatactatgtatttattttcggttcctaagttgggtaggtcatagacgctgacttagcctaatttagcccaagtatcatctaatcaaatacaaaatacattatatatgaaactaattatgtctttcttcttcatactttcgaattattaggtatcgggtacaaaaataagcgatatagtatatcgaaacatcaaaggaacatctacaaaaccgattgtgatgaaattcgattgtagcagtaaatatccttgcactggaattgtacttgaagatgtgaatctaacaagttatgatgatactaatgtgactcagtccgtttgtgcccatgctcatggaaagtctcttggcctagttctaccaagtagttgtttattaaagtgataaacataattagttattaatcattgtcaaaatgcaaataagcttttttatttattctagtaattt

SEQ ID NO: 14325 - DNA, 3775 bp, Cannabis sativa
ttaacaaaacagatggtccaattagtaacttttacaaaacgcagggtccaaaatagtatttacccttaaaaaataatatatgtagtaatttctctattttttgtatatttactcttaagaaattctaatttttttatatatataattatatacattatagttatttaatatctccacttaatttacattaatattgaaactataattcaaaataacttattttataaaaatagtttctataaaacttttaattaataaaataattttacaaaaaaaacttattagtaaaataatcttgtatgatcgtaaaaacaactataaattagactgtgtgattataaatacgaccatatatttacacggtatgactattatgatcgcataaaataaattaagtaaaattattttataaattttaatattttacattattaattaatttaacaaatttcacatatattttatgttttaaaaagcaaaaaatcatattcgcaccaaagaaattctaataattatatagtaatagaatatgttgtcggatatctcagcattttaagacacttttttcttttctttttttgacaataagagtacatatatttgagaatttttttttatatatatatatatatatatatatagaacgttttttcttcttttttgagataatttaattctacaaagggtttatttatttatttattagcaatttaaagccagtacctttagaaaagaaaaaacaaaactaattaaagttagccacttaacctcattaatacaataagctgaacaaaaatgcattgcatattagatattaaactaactaatctatctgaattattttaaaactatatagtttgttatgatccatctctttcacaagaccaatagccaattttttgtttggtagatttttttccacgtctcaaatgatcagaagtgatgcttttccttttatttaatcaataatagtaaattaatacttaacactgaaacaatattacaaaaaaaaaaaaaatcgaaattaaaaatgacatcatcttatcttattgctctgaataaaaaagaaaaaaacaggctgtaacggcaaatgttgtctattatgtgaattaattttacattaatcttagtcattaaaaacaattatggctaatatggagaatccaagacaatgattgagccatattaagtcaataataacaacaacaatagtcttattaaaatgtttttttttttattttattaatttatttatttttcaatgggccttattattaaagttatgcatggacttagaaatattttgaataggtgaaattaggggtggatagtattcaatctgaactaattaaatccaactactaatttcatccaatctaattataaataattagatatccaattacaattagattgaatgttaagagttgaattttaattagatttgatcgattattagatgtcaatctcaaattttaattaaaaatcgatcaaatccaattacatctaatatacattaaaaaattatttatatttatgtataataacaatgttttgattataattttactagcttttgttgttgttgaaattttaatacttgattgttttgtgtatttgatatttttgttttattttattaaggcaaccctgatgccctatcccgatatcgatatacctttatcattgtctaataagacaatcgacaagtataaaacttaacaacagtttcaattgacgtcgtgactttctcttacttaatggtaatctgagtatctttaccttgaatataatcgaattataatgataataatcttatcaaacatgatatatgatacggatgtactttcttacctcaagttctaatttaagaatgtaagtcgatcgaaaatggagaaagatcaacgatcccagaccttatgtcacaataacaaaaagaaccgatacatcaacttgatctaacccgttctatgtctttaatttatcatcgtaagtttccttattgatcactagggtaccaataccttaaatattaagacaacataaaaaaatcgggggttcctaatatcaccaaaaaatggtaaggtgtttttgggttccctgtcaagatgaaaaatagtagactttttttccaaaaatgatctgccattttctacagagaacgaaaaccatgagtttacacatctccaaagtcccaccaaatgaacttagttcacactatatattattttttgtacatgtaaagagaagacaaaaacatatgcagtggaatatatattattagccgattacaaagtgcagggaataataattattggtttttcagttcatgtgacttaatagggaaaacccatcatagtgagagtgagagagacgaggacaagtacttaaggaccacctcaataattaacatatatggccaaaacatgcaatccaagctagctatggcttcatattacttaattctatgttattcatatttaccaaaataaaatgttttatgtaagtatatatatactaaacaaaaatatatttagttatagaagttatataaaataaaatatgtttttttttaaacttcatgttttttatggggtctaactattttttctttatttatgcgtttttatttaatgacattgaattattttttgtaaaagaacgcaattatgctatatttttaataatagttataattttaagagttactttgtaatttcattaaccattttaaattagtttattaatatgatttttttttggtttaaaattacatattttcacatatattttataaattttattaattatataattattttattatttgttatcatttattattattttttattattgcaattctttttttatatgtatatacattattttacataaattaccttcatgttcatataactagttttacataataaagtacataaacaatcaccatcttatattcagatgtgtcgttaattaattttatgttctttaaacaactaaagtataatatttcttctcacactaaaatataaaagtaaagtacaccatatttatatatatacaagaataacatatatttttttaataattagttaaaaaatttcataactttttttaatatatgtaaaaaaatctatttttttatttaattttactaaatgagttgatttttctttaaatcactttatttatacttacattaagtaattagctatttttttttgataaaaagtaattagctattttgagttttcataaataatttatttagatcttgatatccacctactacgatttgtccgtaatcaattacatataacttttaattataattaattttagtagaagtatttaaagctatgttacaaagttcattatatcgatttttgtgagattctttaaagtatatattaaacattttttgtgatatcctcagcacataaaatgatatattagcatcgctaataaattatgattatgaattgtcttatcactactaaaaacaggaggatttcttgactgtttaaaacaatcggggaaagttttgttatcgtgtcctaaaattgatgcctataccacccatgcaaaacctaatggaatatgcgtcagttctaaacggtcgctaaggaggaataggcgatcattttaaagggtcgctaaggaaattttacccgtcaatttttaatcaacacatcgaaaaaaaaaattgaatctgagaaccatccaaatttaaccactacagctttgaacaagagagagagagagagag

SEQ ID NO: 14326 - DNA, 12882 bp, Cannabis sativa
  modified_base (71)..(77): a, c, t, g, unknown or other
  modified_base (10474)..(10474): a, c, t, g, unknown or other
tttttgtttttaaaaacaaaattttaaaaacaaaaaaactacttttatttttctgtttttaaaattaaaannnnnnngtgttaccaaacgccaccaaaataaataaatattagtaaagtaataggaaactaaacagtataataaaaaaaaatatacaatgataattttttttttttttttttaaatcctatacaatgataatttattagggtaatttagacatctatttataaattataatattttataacagaaaaacagtttatttttactgtttatttcttttcttttttattaaatttactgtttagttaagtatgtaatggagtagtgttttggtgtttataccacgcatcaaattggaagcgaagaccaagtgtccaagtccaacttcttccacttgtactgagctgagacccatagcgtattatagggccgggtgtggtggtggtggtggtcggggttgccatggcctctgcggagcagcctttgaagaagcggaagctctacgaaacacaatccgaccaaaattctgacccttcaacaaccctagctcacactctaaaagacgtcgttccaccgctgtcccaggacgaaattctgaaaaggcggaggaacaaggaggagattcgaaatgtctacgagtgctacaaaaggattaggttttgtctttcgcagaaggaatctcatagtatcaggcctgacattgaacaagcgtatctctctctcatatctgcttctagaggtcagttttgcaattaccctatgctatttgccctaatttatcttagttttgaacttatcccttgacccataaatctactctctctctccctctatatatatatatatacatatatatattctgaaactattagtttaaatttcagtcatttatcttcttaagttacattgttatatgataaaccccgatgggggctaacgctttgaggtttatgatttcagttggttgtttgtgtacatgtacttagcttagcaacaatgcgaaattctattgcaagagaactttagactctgaaaccttcaaataggagaaacgaagaacaaggagtctttgctatactgttgtggtctagactgtaaagtaaggcaattaaaaaataatgcgtttggatacaggacaacccaatatttgatcataagcgtgttttcccctagagtggattaggttgttagttagagtgtttcataaagcttatagttaccatcttcacttgcaaattgtgttttttcactactgtttcaaactttttgctctaactgtgccaatgatttgctaggaatgatatcttcctttagaatttgataaggaatctcatacatgctagctgtacgtgtaggctatgaaatattttttcttaaatctggtggcctgtctgctcacttttcaggttgtccaagtgtgcaacgtattgtagctgatcttattccacgatatgcatcatactgtccaactgctcttgaagctgctgctaaagttattgtcaatatgtatagttggagcttggcagggataagtagaggagatgacattgatggtgttgcatttcagattgctagatcgtgtattcttggactctctgatatttgttgcatagcttgttcagaagcaccgacatcgtctgtcatccagggcgttttctcttctgttttgcaaaatgtgctgatcttcttcatatcatcctttgagggaaaggatatatttcagatttttgggaaagaaataatagaagtaaaatattctactgagaattttaatgagcttaagcacgaaaattcagatgagaatgaatcttcattggtagcactatttaagttacgcgttcttagtctatttaggatcttcttccgttatccaaaagatttgcttgctgcttgttttgatttgcttagttctactggatcagagggagttcaaaatggactctatttcttgaatcagttgacaagcaagcttgatcttagtggggtccatcaactggagaaaaacaataatgaacttatgccaagtaaagattcgattgaaacaagttccagacatgatgatgttatttctaaggatcttgtgtcagatggcaaaagtgtttctccaaatgcatctctactttcaaacagctgcttcttggcactggtattattttatggttgtcttctgtctttaataattaaccctcggtatttttttcttatgtttgtctaaattgtaagatatgttctttacttcttctatcattctcttttattgattttgggggcggggcagtaaggggtgagggttacagatttggtccaactgttctgttctgtgttttgttttttgtggagtacctggtcttgaattacttaaaatttatttttctgaccatgcagcacctaatgtgctttacattgttagtgtacagttgtatacactacaaatttaaactagtcacatatacacatttttgttcggcctagccatgatgttgatgtgctttatattgttagtgtacagctcaaatgtatgctactgcaccgctatttgtcgtggtgattgtatctgaaaacagtatagcttttctgtcattaagtttgttaccttcgctctcatataggctctatgaattaaatctcaggtacttgttgaagattcatccctccgacgatgcctgctctcaaagtataagaagctatgtaaaatgtcatcttccaaaaccttttcagatattaagtatgtcatggaaggtatcattgaatcatttgttaaaagagcagttacagaggacagtcaagcagatagtgatgttgatgattctgattcatctaaatccatcaacctatcatacatggtgccttgtatcactaatcagcatgaaaattttggtgaactatcaggactaaataggaattcaagaatttgtggtggatcctgtgatgaacatgttactgaaaaagtccaatttttgaatcatcgaggtgaattagctgtccatttgaaatctattaatcaagatagtggtggcataagaccaatggactttgggaatggagaacatggagacatcatgcaaactcgatcttctatacccagggacttaataaatcaccatatgcattcacctatcacaagaaccccacatgactttaggactaattcatttgatgctagaaaccaagttataaacaatgataggagtcaaacaacaaaactggatttttggtcacctaccttggggacttctagtggaggtgcaagtaattcgttttcatctcctaatcataacatgccaggactttacacttcctctgctattccagttgtttggttatctgatggagatattgcagccatggatgttttctctgcttctaaacagctatgggtgggtctcttaggatctgattcttctgaagctcatgtaagatttgagttggagaggtttggccccattgaacaatatttttcattcccaatgagaggcttttgtgtggttgagtatcggaacattttcgactccataaaggctcgagattatttgcgtaggcatttccactggcatataaaatttatggatactggtttgggtactaggggtgttataaatggcgtcgctgttggttctagttgtcatgtttacgttggaaatgtttctagccagtggtcgaaggatgagatcctgcatgaatcaaggaaagtactttacaaaggtcctatgatcactgatcttaagagtgaaggtgcattgctgatggaacttgagacacctgaggaagctactactgtaatggcgcatctcaggcagcatcgaaaggaaagaagtaaccaaaagcatccttcaaatagaggacaatgtaatgttacatcgtctcatttggattgtgcaatatctgtgtctgcgtctacacatgctgatgtcagaaacagcaattctggaaacatgtataacaataatacaaattcatcacttgcaaaggctgtgctggagagccctgctgataattgtaggggaaggacatctaatctaacttccttgatgttgtcattacggtcgaaatataatgtcaatcaaaattcaagctactctgacaattatacatctggaagttctcatgctaacatgcgagaagaagacagagtacaatcaagcaccctttggatcaatgttccgaatataacttctccattccttaccgatgatgagatcatggctctttgtaatagtgcaattgccaatactggatctataataaggctaatgcacacaaatttgcctagtggatgtggttggtatgtagaatgcagcagtgtagatgctgcagtcactgttctgaagaatctgcgtggttgtcctggaatattttttcagatagaattcaggtttgttttagtcatcttttcgttatgtagtaaatatgatcccgtttgttttgtgatgcaagttaatttattcatgtcaattgctacataaatttctctttttcaatttctttgtttttttttgctccaagtctatgagaaactgtagaagtctatataaacaataaatggtgatgttatgtttttatttttgtttgaactatgaaatcctgactgctagtatgcttatttttaatcatgaaatggtccttatgatagctaaagtttgttgccttacaatgtatatgccatgttgtttgggcagcgaacagagaatgcaccttccaacttctttttcagtaagacccgaggcccaccctatggagcttatttcccccagagtaaaatctgagaatcatgggtcagtatcacaaggtggacatgcatttatttctaatagaggtatttctggctgtaatgagatgcctgaagttggtgctagaataggtgatggcagtgacataaacatggtattggattcatcacaaggaggtgagacttttgtcgaggttcataatattatcccacagcccccaaaccagtttttgttttcctttagagcagcttttcttttttcttataagttcttataaagttattggatggtaactgtattttccccctctaggtagtcatgctgtttctggtgccttggagcaaaggtggatgtacccaaaacctgacatggagcttcttcctgcagcagggagtggtccatgtgtacatgtagcaacacaaggaccacccgtcccacctcctccacaaattcattcatctccatatatgcggcctgcttaccatcattcaaatacttcttgggacccacggggtttgcatcataattttcccatgaatccaacaccagttgtagtaccaaatgtgagtcatggtaatgcagttacggctccttttcgaccggcttctgtgactccactggctcaaatacagggaactctagtgcagcactttgatcaaatgtactcatcattgcccctaggaccaccaccacccataacatccttgccaccacctccaccagaagtcccacctcctttgcctccatctccaccacctccaccacccacttctcctccacctccgcctccacctgttgcagaatcatcacaggcagaaagtcctggacatggtcctcagtaccagtggcagggaacattatgtaagagtggggttcattattgcacgatttatgcactgagagtcaattcagaagtttgtaaatattccaatgccttgtctgaacctgcagagtaagaacatttatgttttattcattttttcagtcatacacctacccaatttatgtttatcaatctctagtttttcctattattttaattggaaaatacggtgtcctgggtaatttggtgcaggtggccagtgaaattagatatgactaaacgcacagactttcgacatgtgaagtctacgtttactagtagcccaccacataaagtgaggatctgtattttcaaccccgttcccttccctgttataatatgattttaatgtttaattttttaacataatgcagagggaagtttgtatccttgtcccatcttcttccagtgaccataaaggcgtaagttattctactcattttgttcattagtgtttggtagtaattactttaccactcttcttttcttggattttagctaatattgttacttgtagtgacgaaatcttaccacagttgctgtgtagtcattaaatgattactaatatgaagcgttgcaaactgttcaaactttaaaaaagttgttaattattttgtctacaccttgtttcgacatattagtctttgttagacagagtagcttgaataatgcaatgtcctaactcccaataaagtcaaaattcccgaccctctatcaatttttagccttttcatttaccttcttcggataatactattgtgtagacctttttatcaaggttgtttgtgagctttatgtattgttagtagaaaacttgattgaaatgtagatgttgaggttgcatctctaagagtttagattttttttttctttttctgaaactagggtccctgtctaatcccacaatatttggaggccaggaactattgtaattgctatgtaagtactgaggaaaaactcaaacctcagaccttgtgagagcaaaaacatgcctaaccatttgagctacccctcttgggtctattcagtacataggacttacaacattgtttctgcagtttcaggattttgtaacgtacttaaagcagagagaatgctctggggtgatcaaaattccgggttcaaaaacgatttgggcaagacttcttttcattcttccgtactcacatgaagtgtgctccttgctctctgttgcacctgatacaccggattgtcttgttgctttgctgctgccgaaagaaacaaattttgagtgggtttaacactttgataagcctttacagtcgctggagtgtttaggtcatgaaactgcttggtatgcttcagcgaatgtcaattttgactttgtttcataaaaagttttcacgaaggtataatgtgttagcttatagaatggtttcactaggctataatgtgatagtttatataatggtttcactaaggtaatatgtgttagcttatagaatggtttcactaggctataatgtgatagtttatataatggtttcactaaggtataatgtattgttagcagagttttcctgtatacgaaaaatgggtgaatgtcaatggcagaatactgatatgtttgtagatttatttataagtacgaacttgtgttgtgtaatgtgtatctctagctcactagtcactgtggcttactagttctatatttcctccagtgtcatctctcccagttaattagaatttttaccttctaaaaattttggtatgtgctaaattatgttccggttattaattttttttttttcgagattgttagatttaaagatttctgttaaagtttaaagataatttttaacgacttgaaaagtttaaaaaatattgtttggtacatgttaaaatttagggaataaaagttttaattagtttaaatttatcgcccaattttttattggcatttggaaagtgaaaaacaaacagatttactcgtagacaaccactttttatttgttagaaattgttcaaatttcacgaaatggcaatattccatcccacaaaacaaatgtaaaagtggatatcttttttagatcaaacttttatattattctatacatttttatttgcatttcgagaatatattttacgtggtttctctatattttattttattttatttaagtattatattttaaaatgtttttattaagtgaaataatagaacataattgatagaaaggaagaaaataattaagaaatatatatttaatttggagagagaatgaaacaaaaataattaaaaaaaaaaatatttagagatgttatatgtagtgttaagcaaaaaatttacatttaaaatattaataataaatgcaaaatacaaatttacttttgtcaaatttatagtataagatttaattaatttaagttcaatttatctaagattataagaataatctcttaattataatcattttgtttagaaaaaacatttgattccaattatgatgatatcatttactttatttagaaaaattggttaggtactttaataagtgtggtaagagaaaaatattggacatcagttcattggaataacacaggtgataaaagaacatgatggaacaaaaagttctaaggaacttataaaaccatagagtgaattcgagtcatttactcgcttcattgagtacacaaaaaagctacgctcatttaaagcgtaagattatcgagttccaaataagagattttatttttctttgagtattgcctataaaagggatatgtagagagggaagttaaaccctaaattcattaatacctttctaatactggagtaagtaagccaggtagcctatcagctagccttgactcctgcattgttcgaagtgtataatgtgtttcatatatcaatgctgagagaatatgtatcaaactcgactcatattctgagctgtgacgattttgaacttcagacatatttatatgggaaaaataacttgtccaagttttggactggaaaaaggaagtactacacggaataagacaattccactatttaagaaagtgctatggagaaacagtaaggtggaagaagtaacttaagagttagaatcgtgaatacgagagtaatatcccgaattgttcaagtagatttcgagaacaaaatttttataaggatagaacagttgtaatatcccagaaacctaattatgaataattaagatttattacaaattacgaattaattaggtggtaataagtagaattatgatcctactaacttaatttagcacaaattataatttttgctataagtggataaataagcataatttattaattacggagataaatttaaaatatgtggatataatataagttatttgtaaaatattttcagattcgacgaccctggagacccgattggaggccaaaaatgtcacaacagttttagtcagtaatattgatggaattattgagataagttgattttaaaaatgtaggggtattttggggtactcagggttgaacaaatatcttaagattaaagatttcttagttgttaagaagtagtaaattaactattattaataataaaattttattattgttaataataatattattcatattagtttaatatatatatatatatatattatatacattatgttttcaaaaacataagttgtacgaaatcttctcttttggtgcgacgaaactctctttccttttaatctattttcttcaattttcaacttgaaacctaataattcaagcttcggtagtagcaggataataaatcattgaagatggagagcttaaggaaatgactgattttgttttaaggttaatacgattgattttatatggtggttttgtgatttagagtggttatggagattctgactttatagaatttttcttgggtagctatgggactagtttcgatgtttgcttgttgaatttgaggtaattttgagttagaaattgagtttggaacttttcaaagcttaaatctgaacgttaattgcgttttacattcaagggcttgattttaatttctgttatgtaagggtttttgtatttatggtatatatgtgctttgtgaagttggaaatgatttggataggtttcggtagtacttcggtgagtgtaaaaattgaaattttcgacctatgttattgccaaaccgatccaccaattggtgcaatcagttaactagttcgtggtgaaacagttaaccgtttcccactcagtttatcatttcaaggaattttggggaaattgagaatcatatttttgtcataacttttcactcgagtgtccattttagacgttctatataccattttgaagggtgtgacgagctctaaaatatggtttgtattttagatccaaaatataagatttagtttagtgtatttgtactacaagattcagtagaaaatcctagattgtcttacgcgagtgttaagtagtgttttgggataaacacttattggtttaccattcttgtgacatagggtcgagatcattggggaggtttattcacactaatgtgtgcaaacctattaatatttaagctcaaagtggtgatgaatatgttgactcaaaaatatggactagacttctaagccacacccgctcgctagattggcaaaaatgattaagttgttaaatatttataagaaagacacaacaaatttatagtagctcaccccctatatcacgatagtaatggggctacatttatttcgagtttttatttctcacgagatggtaattatcgcaatagactaagtttcagaagctccatattctagagatagaaagtctagagagagaagctctgaccttgttggtagttttctcaatgtgaaaaatgacctaagggagctctccttttataggngaaggaggcccacaaaaataggggaaagtaaaaaataagatatttttgaccgttgatgatgatctaaaggtgaaaattagctcttagtggtgatgactattttttagagcccgacgggtcctgctgcaggtaacccagaacttattttcataactcccttgggggtgaattttgacggtgataccttcagaattacatctagattgtgagacatgacttgatagagaactagcttcagaattcaagttgaattatgtcaatcgaatcaaaattaagtgtgtgttatggatgttttacccaaaaaggttcatgactcaacacccaagttgacatatgatgtcaacctggacgttgggtaagtataaaaatgttcaatggatgtcctttaatatgcgtaagtgatattttgacatcacttagtctatttatgtgttctggcgaagctagtcaccagtactcatagatgttgttgttttgtagaaatgagagcctcgaaactcttcatttctgggtgtgctagaaatgagaaatgcaaatttgtaaatttgacttctctaacttcatagatctttgtcattgttaaaaactacacggacggtcgaaatggcatcaaatttagataagcagaacccagcgcaccaggccatttgtcaacctgggcaatgggtacttactcccgagctcctatgatttttcatacttccaaggcttttgaacttaaggatgaggcctcatacccttctttgaccattccgaattcaatggtcgtatcaaatttggaatttgagcaattgaacgcagcgctctatgttgattgtcaacctaggtgctaagcccagccctaggtcaacctggtgctgggccctgtttccaaggacttgggattgttgtttttctctccaagtttccttgaatatttgttattttttatgatggaaaaaattcttggaacactttttgatgaacttgatcggaaatagcccaggttgacaatatgtcaacctgggcactaagtcccccttttgcccctctagaaattccatttggtccccaaaaatagatgagtctctatattttctgaaaatggagaagataaccgaaagaattcctaaaaaactccattttaaatggcccaagttgacaaaatatcaacctgggcgttgggccctgttatttgtacccaagaattgttatgtttcctctaaaaggacctattaccctgtttttgatgaagacaaagaagattcaaaagttggatctctaatcggaaacttggaaggcacttagattgacaggttgtcaacttgagctgggtgctcgaggccccagggctttgggtgctcaaaaatcaacttgcttggattttgattctgatgcctcaaatacatatgtggcatgtctagttcatgtcccaatgaaatttttgaccattttgcactaagaaggtcccaagaattaaaaccatagttgaggatgtcaacttgtcgccaagtgcaaccctaactgcccagggtggcttctgagttgcaagttcgtgtaattttagctcctgggtttgattcaagttattgaagttcaaacttatatcctagagatcccaaagtcaacctgggcgtagggctaaaatcccctcccaagttgactgctataattcaggtctactcaactccgtgacatcatcctttatgccacgtgtcaaacatttatgtccatgtcactagggaaatttttcgggttaacatctgcccccagtcaactttacacttgtgtggagttgacttgatgacatgaaccaagcccatttcgcttgaaactaccatatggacatcaattttgacattcttaggcacttgtatctgttcttcaagcattcccaatttaattaggaccttgaacacttttgattagtccttggaaattttgaaaattaattaacaaagaaaaagagggaaaatgttgtctttttttcaattatcttttatctctttctttgaaaatttgaaattttcttattttttgttatggcattaggattaattggattggaatcctaatcttatttggtggtgccattcaaaattagagagaaaggaagaagagaaaagacttttggccttttgcttatcatttatcctattcctaattgtataggaattttgaattttgctttagaaaggagaagagaaaagatataattatatattttacttaccttttaccttttccttagaaagctttaaatttaaaagactctcattagctttagaattagtaaattgatctcaactataaataagtgagttgagaaccaaggttttcacactctccttctcattccacacacctatggtacttagagagcactttcaggatttcatcttcattaatagggatggcaattatacccg

SEQ ID NO: 14327 - DNA, 4778 bp, Cannabis sativa
cttttgccgttagcataaaaattcctttaaactataccatcagaaaggttccaaaactgaaaaattccccatgagccgactgacaaggctttaacaattaagtatttgcacttgcttaaagatgaaggccagttttcttgttttggctcctctatatatacacacacttcttttggaaaaaatcaaacacagctttaacacattctaaatgtggtgtagtttattcaaatggctccaacttctttcttctaccttatttttgtgctcagcttctttcttgtcatcgcatctgcctctcaaactaccaagtctagcaatttacagaactacatcatccaagtacgccaaccaaagggcagagtcctttcccaatcagatgacttggagagttggtacaaatcttttctgccagttagaactgctgcaagctcagacaacaagcctcatattatatattcataccgaaatgtaatgagtggtttcgcagcaaggctgacacatgatcaagtgagagcaatcgaaaacaaagatggttttgtatcagcacgccctcaaaagatattcaagaaactaacaacacacacacccgacttcttgggactgcaccagcagacaggattttggagagagtcaaattttgggaagggagtgatcattggagtactagatggtggaatttttccaggccatccttcgtttagtgatgcgggaatacctcccccacccgctaaatggaaggggaggtgtgatttcaacgtgtctgagtgcagcaacaaaataataggtgcgaggtcattcaacttggcagccaaggcaacaaagggaggggcaactgagccaccacttgatgaggacggacatgggacacacactgcaagtacagcagcaggaaggtttgtgaactatgcaaatgttctaggaaatgccaaaggcacatcagttggcatggctccttatgctcatttggcaatatacaaagtgtgctttggagaagattgtcccgacatcgatatactggctggtcttgacgcagcagttgaggatggtgtagatgtgctctcgatctcccttggtatagaaccaactacacttttcaacgacagcattgctataggctcatttgcggcaatccaaaaaggaatatttgtaagttgctcggctgggaattctggcccttttaacagcactttatctaatgaagccccttggattctcacagtaggagcaagcaccatagatagaaaaatagtagccacaacaaaactaggaaatggagaagcgtttgatggtgaaaccatccacagaggagactttcctccaacatattcacctcttgtttattctggcatgaatggcaaatcagagtctgcattttgtgctgaagggtcattgaaagatatcaatgtcaaaggtaaggtggtagcctgtgagagaggagggggaattggaagaattgccaagggggaagaagtcaaaagcgctggaggagctgcgatgattctcttaaatcaagaaaccgatggtgttagtacagaagcagatgttcatgctcttccagcagcacatgtcagctttagcaatggactaaagattaaagcctacataaactcaacggcaacaccaacagcaacactattatttaaaggaactgtcattggggactcatacgctcctgttgttgcttctttctcatcaagaggccctagcctggctagtcctggaattttgaaaccagacatcattggaccaggtgtcagcattcttgcagcttggccattccgtcttgacaatgacacaaatccaaattctgctttcaacataatgtccggcacatcaatgtcatgcccacatctcagtggaatagcagctctgctcaagagctctcacccttactggtcaccagctgccattaaatctgctataatgactactgctgatgttgtaaatctagaaggcaaagccattcttgatgaaacacttgcccctgcagacatcttcgccattggttcaggccatgtcaatccaacaagggcaaatgacccaggactagtctacgatcttcaacctgatgattacattccttatctctgtggcctaggttacaaagatgaagaagtaggaattattgcacacagacaaataaattgctcagaagaatctcctatacctgaaggagagctaaactacccttcattttctgtcacactaggaccatctcaagtgttcacaaggacggtgaccaatgttggtgatgcatattcaacttacacagtcaaggttgttgcaccagatggagtctatgtgagtgttaaacccaaaaagctttacttcacaaaagtgaaccaaaaagcacaatatgaagtgtctttcagcaacattgcttcaagtgggaaaagcaatgcctatggtcaaggatttctggcatgggtttctgtcaaacacaatgttaggagtccaatctctgttaaatttcagtaaaaacggatgcactgcatggtaggcaaacatagatttgcactgcctctattaaaatctctaagaattatattcatcaagacgtgtaccatctaggttcataatattcatttctataaagagtgtgagcagtacgagtaatttaacagaatgaagaagaaaaaaggtttattttatttccactagcatcaccgagatggaagttcgaatagacagaaagtaaataaataaaatctacagaaacgaaacatcttactagttactacttctttcctactcaaatgaaagatatagacgtctcgatatcacaagaaatttctagagtactacagaacgtagctacttagtcaggcacaaaactagcaattacaaacaagcatctctaaacccaatttatgcaccaaaaattggtaaaacctaagaaaaacaggtttctcgcttttctccctcataagagaaaaaaaatcttaagtcttccaaggatctagtacttctggcaaatgacagtaggggcagcatgaattttgtccccaactcatattgaactattgattcagtttttcctgccttcaatcataattccatatagcagtgagaaactaacttcatagaggatgacaaactgagcaacatgctagtccatcatccaaaaccaggaggcacatcggggtcctcatcagtacagcaatctggtttctggtattccttaccaacagataaagtgggtgactcaccatgatcaacatgaccacgctcaagcttctcctgtaatataacaggccctccctgctgatcagccacctgtcttttttcatggcgtaaagacggtttcagatccttaatttttctcttcaaatgtttatgggagactgagaatccaggtggttcgtgtgaatcattttcagacaacattgctttactggatggaacaagtatcaaatccttatcattatctttcttttgaactgacagtatctgagatgttgaggattcaacctccactttcacttctgggttcgttagtctgttgtagacagattgaacagtctctttaatttcacttttaaccacatcatttgatctaataattccccacagcccctcagaaatctggttcattagttcgtccctaataataaaagaacatgaaatcattcacattcatttccatttacttccaagagaaactctctcagaacttaaaactctaaagggcattatgtaaatgcttcaaaaatgttaaattgaacaatgaaaaaacacaaaccccaaagataatctcaagaattagacagcatacccaacatcttgataaatagcatccgaaagttgccttggtttcatgatctcagcacctaaacgattaagagcgggcgattgcctcacaatagaactcattttttcccgcaattcgacctgtaatagtaacagatcctactaagcctttccgcatttcattcattcataaaatcatttttaaatataaaaagtaaagtttcgggattcaataaaattgagaatggtagacagtaatttagaaccctaaaagagagaattgtttacatggtccttaagcttgcgaatgatattgagacggagcttatcaaaatcgccgtcgtctttgagcttggttatcacatcgtccttggtaacacttcgatttctgtgatcgcaatccattattctcttctccaaaatctcccttttaccaaactcactctgtttcgacaatttatagtgttaatcactccaatggcggcaacttatttattgggtgaattcagcataatacaaattaacatttgctaccaaaaaaccaaaatatatatttatataaatcattgcaaaatatattatttgtttattgctttcttatgctaggtaagagaaggtggttaagttttttttcttaaatattaaagttaaaattgtgtttaataatattttaattagttttttatttttaaattaaaaaaaataaaaatattttttaaaatcatgttctataaaattatttttatttttaatttttttaattgagagtcaaaattttaaaaaagataactatatgtgttttgtaaaaattaccaacaaaacttaataataatttaatctagacatgttgtgacaaacctgattacattttctgaatctgtttgtgttaaaaattgtcttaaagttggttatattaaaaaataaaataattaaaaattgagctcaaggttctgtgtttactattttgaaaaatataaggtctattttgttatttaacaaaacaaaatgtccaattggtaacttttgca

SEQ ID NO: 14328 - DNA, 5574 bp, Cannabis sativa
gggtagtgccagccataaattacagatggtctattgagaagcacctggcaaactaccaacctgctgaccagagatggtaaaggtcataccttgcaagggtgattgtacaagctaattctctaaaagaagacaagtcttatagaaggcctgggcgggtagtgaatatgccaatcagaagagatgccaaaaataccgaacaaggctacatgagccttgatttcttcttcaaaaggcatccacaaatatctccaactgaaccctacaaactcggatctagaaaatctatccgagaataaatgagcttcaacagatcgtaactacaccctagaatataaggatatttattctttgtttacttcttttacggaactaaatgtaacaacctccccctataaatagtgatggcattcacaatgggtggggacttagaactgaaatctcatactcacatatctaagagcattatgctgaaagacattctcctgtaaacactttgagagtcgaagtttagaatcactttgtcttccttagtgatctggccgatattatcttacaagtaatacaactaaaggggactaggtcattacccatatacaagggggcgaacctctataattctttgtattatttacttattatttttaattcttcactagtgattaattagcgtttattagacaccgaatcagttggcaatttttccagtcaacaaagatggacaagttcacaggggagaataatttttgggctagaggcacttgatacaaaaacacttgatgccactggagacaaaaagaaaaaaggagaaattcatatcaaagctgattttattgagcctaagagatgaagtacctcgtgaagtctcaaaagaagagacattggtctttgggataaattgattaagatttactttaaaaaaatctttagttaacaaattatatttgaagaaaaagttctacacattgcaaatggatgagactaaagaactaaggaaatacctagataagtttaacaagattattctggaacagaataatattagtgtcaagatcgatgaagggagctaaggtataattcttctctcttccttacctaattgtttcaacattttgttgatacaatattgtacgacaaacaagtactaacaatggcagaagtgaagtgtgtacaactcaaatgagactctaaagaaatcaattgagagtggtgaaggtatgctcactagaggcaaaccaaaaaagaaagatctaagaaattataacagttactacatacagaaaaatcattcaatgatccaagtctaagttcaagtcagaaaagaaatgttactattgtcaaaaaggacattacaagaatgagtgcaaggctctcaaggcaaagttgatcaaagaagaaaggaagaacagagggatgcgaatgttgtttctaaaggctaacagacgtgatggtagtctctagtaaagcctgtgaaaaggagtagaacatcccaaagagattcagtgttcatggtattggctctggtctgttgtcatcaaaatgtttgatggcatatcaagagcaattagaaactttagaacttcagaactttaaatattttacttgagaagaatctactatcaataagatatttagctcaaaagtagttgcaccattaatatggaggtggaagtctgaaaatatcaaaaggttccattgttatgatgaagggcaaacttaagaacggtctacatttctctcattggaaaaactgttattggttatatcagaacaagagataaccaagttggtaaaagaggactgcaacaacttgagaagcagtcttttgaagggcaagcttgatggtaagctaggattttgtgaggaatgctagctatttcccaaaagttatttataacaaaatataaacttttgagctagagtcatgtcccaatccccgttaaaaaaacaggtgggttaaattgtcatccccgcactagcgaatgcatatgcaatgaatttggcccaagctaatatttttactaccacacactaacatacgtgaacttgatttatatgagaagagcactataaatgaatatcagcaaaatttaatattttctccttctaccccagcaaaacacaccaccctgcacttttctttcttttctttctatgcattacatccctctcaatgagctttcttgaccctatcacgtcacaaattggaaaaatgccaaaacttttatttgaaactatattgaaatttattcactccaaggatcactctccgtcctcacttcagatggctcaactacttctgtctccatggcctgactagcacttgcatccgattctgtagtctcttcaccagccccgtctgccttttcttcgtcttctaatctaccccatcttcctccgagggccattgccatcatctcgtatattttgtttcccagctcagctggactgtcaggctgcaagatgaataggaaaagtaagtgatgaactccctaaaacttgtgcaatatgacatgaaagttgaagaaaaaaaacaatatcgatcttcttacagtgaatccactggagatcagggctgtatcatacaggagatcgacagctctcttggcatcagcactgtctggggcattcttgcaagcagcctgcagaaagaatattccatgtaaattaaacagttaaaagtgtttcagtttgtccacgagatatatatcctgttctaacaaccgatttaaagaaattatattttaattcttggcagtgttgcaagtggaaatcattattcttacattctcatttttccaaaaccctattcagaagaatttagtaggtaaaaaacgtcacaaaataatcagtgcagaatctaattgctcacattcaagtcttttacgatgggatggtcagcattgatttccagtattctccttcccctcatgaactccaaacttgaagtatctccaagtgcttgagctttcatcaatctacacagcaaaataaataatttatagttgtaataataattgataaacgagtgaaaaatctgaaagttcataactaacctttccatattagcagaccatccaaactttccggaaacaagcacacagggagatgaactcagacgatttgagacttggacttttgctaccttgtcaccaagttgttgctttatccaatcacaaagaagagtgtattcttgtttagtttccctttctttgacctcatcctcatcacctaataaaaatagtattaatcaaattgtgtatggaagaagcacaataatagaatttaacacaaacagaaacactaattaaatatgtatataaaccaaccaagctctagatcctccttgctaatgtcaacaaacttcttttctttgtaagtctgcaggttctggatggcaacttcatcaataggctcaattaaatacaacacctaagagaaaagaatttcagttaactggttgaaaaatttcactacaatatcaacaacttctttccatcaatggccattgattacaactccaacaaaataatcatctcaaatagattgtcaaggattatctttcagaggttgtatcaactaatatgttcagaagattggatcagtcttgaatacacatacctcaatatctttctggatcaacttctccaagaagggagcagacttagcacttttcaggctgtccgtagccaagtaataaattgccttctgattttcattcatgttttcaatgtagtcatctaaacttgtcagttcttcctcgttcttcgaggagtaaaaccgcaagagtggggtaatgcgcttgtgatttccagtatcctcaatgcaacctaactttataaacctgccaaagttctcccaaaattttttgtagtcctgtaatcaagttcaattactgacacgtcaaaaggagactcaaatgcaacggaagaagaaaaacaagatgcaattactgccccgacctctttattttcactttcagaaatatcttggatcatgtcaaatgtcttcctcacaagtctctttctcattattctaacctgaaaataataataagaaaatgatgggaaaatatgtgaaaattaattgaactcaaagctctttgaacataggaagttgtttatggataaaaaattctttcatatcatatctttccatttgaaaaaacacaaaattgtttagttaaatagattagagccttacaattcgactttcttgaaggatttctctagatacatttagaggaagatcatcagagtccacaacacccttgacgaagctcagataccttggaaactgcataaagaatctcagattaattatcatttcccaggattcatacaataaaacaagcaagcatcaaagtacatatctgcatatcctactgtacaattgacaacatgaattgttttttccacgcaataaattgctaattaaaaactttgcacttagtaaaattttgtcaatagaagggtttttggaaagcaacactcatgctactttagggaagagagaacaatcaagcaaacaaactaccaaaattctagcacagaaaaaaggctatataagttacaccagaaagaagaacgggtgatttcataatatggcagtaaccatgtagtttccgataaaaatttgtgggggaataaataaataaatagagaggggaaagagaatacagatctcagtttatagacaaaaccacttggtagcaattcaagctaacatagattaaaaacaaaggaaaacatggaacttactagctcgccatcaaaatcatctgagataaagacacgcttcacatataaacgtatgttctttgttttggggttgactacatcctcgttgttaagaggccccattccaggaacataaagcacactcctaaactccacctcaccctgcacagtttgcaagatagatttacaaatccaagccaacatgtatacttcaagccatacccaaaccattcagtacctcagttgtgaaatgagtgtatccaataggatctaagaaatcattgaaagttttcttgtagaattcacagtactcttctttctgaacttcttttggacttcgcatctgcaacagaacgagaaaagtgttcattgcatgatatttgtatgctattgacaaacaagcatggcaatggcacagcaagcaacatttttttaaaaaaacaggcaaaaaatttggaccttgagatatgttgaaagcacagacaactaaactagcttacccatattggttttgtttcattggctaattcccagtcccaatacttctcagtttttgttgttttcttcattttcttctcaccctgggaaccaaagttagtaaaatcaccaaaacattattttaaactaagaaaaagctgaattataagcccccaaaacaaaactcctttacaaggtacctctgccttctcctctccttctttctgctcttcctcctcttctacctgtgtcataaaaacattcagtaagcatgaagaaaaacatgtacgagaatggccttttaattatttcgttttataaatcatttgagagtcacctctaaatactaatctataaatca

SEQ ID NO: 14329 - DNA, 5690 bp, Cannabis sativa
tgtaagtaaatgcaatgacttatctcatgctgtgaagacttttgggagtcttttgcatgttaaagatattgaagattggcttgaaacgttaacaagtgaattatgggagttaaaaaatgtggaggtggagatttttaacccattgatacttagttatatgacttggctccggtagaaagaagatttctttgtacaacttaattaatatctgatgatgatgcaggaaaggaatgaaacaggggttgtgggttggaaaatgaaggaccctttgaaaataatgcctttgtcttgaatccttagaattatcatggtctcaatatctggaatcgttgcctgacttcttggagtcaacagtcaacaccattgaagaatttgaagatttggtgttgtgatatcctacataaatcttgccaaaaggagaaggaaaagattggcacaagattcttcatgtcccaaacattgttatctcaaacaggtaaatatatatatatatatttatatatatgactactgataatagtttgattaccatgataacctctgccatttgtagatggaaggtcaaacttccgcggcggactaatgataatgaagaaaagtaagtacatattcgacctttttaaattccaacttctttgatgcgaataaattttctactgagttattttaggctctcatcatatttcatgaattagatggatagaatgtctcttatattattggatataaatttggttgggaaccaattttgtatataatatagttatttatttatgattttatacatctatgactcatattataaatctgcaatgagaacaagattgtttcttgttactagtcactagatctgatctgcatctgtgtgctgccatggtgacaatttcttgtcttttctaatactattataaaattttagtacacaagtcaaattttgagaagaaaagaaatgaatatgatcctttattttgaagataattatatagttagagtctcattctctcatagtatcacatttactactttcttctgaactcatcagacatgcatgatgctatattcaatttttttttttatcaagaagaaaatagccttcattaatcaaacaccaaagtcaattactcttgtattgttctttataaaaccataacagcgattaacataatagtgcttcctatggtgccttgaaaatcggtgatcttcatgtcctatccaaaaaaattggtggtgccggtgagcagctacgttgtctattctttcgtcatgacaagattccacactcctttcctcaagtgatgcttaatcattcatgtatgtgtagatatggctagcatagcgatttttttacatgaataattgttgtgttgtggatgtaaatatatgggaactattcattttgtgttataatgtgtatcaaatattgtaacgaataatgattttttttttttgtttaaaaaaaaataaatacaaatgttttgtagggatacaaatattgtaactcaatatggatggtagcctcgaaaagagctcaccaaccaccgtagacttgtctgttagtttgtttttctacaatattaattacaatattattttttgtctggaatatttattataatattagcgctcttaaaaacacaggagctgtagtcattgttttatattttattggaacttaaaacaaataattaggaaaacttgcctattgttttatatattttatattttattgtttgttgctcattattataattatattctccaatcagaataattacacttttataattattcaattgtaaaagtcaagtccacactacattcatcaaatattactcatttcatacttttttagattgattactactcgtcattctggtttatagtattcaaaatcagtcatcttgatctgcaacaatggctgatgctgtgatttctgctatcctcaatcagttggctttggtcattcgtcaatatggtgaaaaaaaaagtgaagctggtaatgggagtcgatggaggagttgaaaaccttgaagcaaatctgatagccatcaaagcagttcttacagatgctgaaatgagacgatggaatgaagaagctgtgaaactctggcttgaagatctcaaagatgtttcctacgacatggattctgtcctagatgagtggaacactaccattctcatgtcagaattagaccaaggaggtaacagagctgaaagtagtaccagtcagattactaaaaccaaggtttggtgttctattctattctcctgttttaattgtaccaaactaagtcctccagtgatcatttatcgtcatcacatcgctgaagaaatccagagcttaaaccagaaactagggaggatcaacgatagaaagaacatgtttggttttagatcaaagttcaaacacgattggcgatactattgaacttaggcggccagacttcaccacctcctttcttgatgtgcctgtgatttatggtccaatggacaataagaaaattctgattaatcaattaacactgggtgggagtagccaagaggaacagggactcaaattcattcccattgttggaatgggagggattggaaagaccactctagccagaaatgcttataatgatcctgcggtgaagactctttttgggggtaacatgatttgggtttgtgtttcagatccatttgatattggtaggattgccaaagaaagtatcgaacaactcaccggtgtaatccccacggtcatagggtcagagtcactaatgagaaagtttcgtgaagctgttaatgacaagaagtttctactagtactagatgatgtgtggactaccgactatagtaagtggcttttactagtgcaaattttaaagcttggcgcaattggaagtagagttgtggtgactacacggaacgaggaagtggctaaaatgattggagatacaaataatatgatttgtgtgaacaaattgggtgaagaagattgttggttgttgttaaaagaaatagcactttccaacaagacagaacaagagaagcaaaattttgatgccattggtcgaaaaattgcacgtaaatgcaatggcttacctcttgctgccaaggccttagggagtcttttgcgtgttaaagatattgaatattggcatgaaatgttgagaagtgaaatctgggagttgaagaatatggaggtagagcttttcaacccattgttattcagttattatgatttgactcctgtagaaagacgatgttttatgtattgttccatcttccctaaagataatgtgtttcgaagagatgatttaatacaacaatgggtggctcaagattatttcaagtcaatgaacgatggtaagcatgaagatgaacaaagaggcctggtgtgtttccaaaatttagctacacggtcattttttcaagaatttgagtttgataattataacttcactatggaatgcaagatgcatgatatagtacatgattttgcgtgttatctcacaaaaaatgaatactccattgaactaatttctgatgttgaaaagagagttgacttggatattcgtcatctcaacttaatttatgtttcttcatcggtgactccaactttctcaaatctcaagaagaagaatttgcacactcttatggttacgtgtgattcaatgttgacaggttcgaataattcactgagttcctgcatgttcccttatgatctcttggatttgaaacgtctgaagacattaattttgaagggagaatcaatgaagattccagtaagtatcggtgatttaatacatttgagatattttagtattagatcttatgatatcatagatgtgccacccacgattggaaacttgtttaatctccaaacgttgaagttttattgttgtattactgaacttcctgaagaagttggagaattgatgaacttaagacaccttcacttaattaaagggtgtactaaaagtttgccgaaaagtatttgggccttgacaagacttcagacattggatattggtggtagtataaaggtaggggtcctaggggatattcgaatcttgaacaatctttgtattattcgtttggaaggcttaggcaaagaggaacacaaggaagaggctaaggaagctcaacttcttaacaaaaaagctcttgtccatttgcatttgaaatttgataaggattcttcagtgatggatacccatgagattgtactggattctctgcaaccacatcatgaaaacttaaaatctttaagaattgaggagtattgtggcctgctcatttctcctagttggatgttatcattgactaatttgagaaacttagacttgtatggatgttttaactgcatcacattgcctcctttggggaaactcccatgcctcgaatcgctttgtattgatagttttcctggtttgaagaagattgggtctgaattcttgggagaagaaaaggatagcaagtcactgtttccgaaattggaaaaatttgaaatcaattttgcagattcgttggaggaatgggtaggggtggcagggtggacagtgaatggccctttgaaaataatgccttgtcttgaatctttggaaatgtcattttgcggtttgttgagaacattgcctgactttctgagatcaacaccactgaagaatttggtggttgctcaatgtgatattctagagaaatcttgcgagatggaaaagattcgccatgtcccaaatattactatctgttaaagataaattaaaacataggtagaaaaactagcaataatgacatctatttttttttactaataatagtttgtttgtttgtttgtttgtttcaatgagacaaacctaaatacctctgccatttgtatgtagctaaggatccgaagaattaaggaaagggttggcccgaagttgaagcagttctgtcttctttcatgtgagtaaattttctaccatatgcttttataggatcccttcatactttataaattacagtgtctaagattttattggatattaaatttgagtgttgctatggataggataaatgatattttgggctgtatcaaatattcttgtttctttagtacaagtacaaaatttgacaaaataaattctattaggagtctcatactagtggttgaactaatcatatagagtactgagaaatttggagaaaaataactctgttattttatttatgtgtatatacatcctagaaacaatgtatatatgtagtgaaaatacaatcaatcccataaatacaataacaaaagaaattaacacatttaatcaaaaaaaaaaaaaaaaaagaaattaacacaaggaaaatgatggtaaagcaacttaaacgattcgactttcttatttgccaacaagttcttaaggaaaaattgattattttatgaatctgaaaatagatccgtaaacgattcgacttcatatatagtttatcagaaaattattaactaattatttagttattgctatttactaattagttttgatgaatccgaagttatatttaaacagaggttgttttgcttaagaattatagtatgaaatcaattatagtatgaaatcgacttgaatagatctttaattaaatgaaagagtgctaattacaacctcctattacaatcttttagtcaacttctacgtctgaaatcacatgccgaaatattttttttcata

SEQ ID NO: 14330 - DNA, 8540 bp, Cannabis sativa
atatgtattagtttagaaataaaatattaggtatatgtaagtatagaaaatcaaatttcccttgcattatgtccttttttttttataatttgttgatgactagatctgaagttaatgtagttaggttaaaaattaaaaaaattaaggataaatagcagaagtatctgaagttttaagtttgtaagcggcataaattcaatttttatttttagcagtataagtacttaatgtttataaaattgtaatttttttcctgttttgtctgtacaaactccgttttaaaattattaaaggaacatttgaaagtaattgatactatatatttctgtctatacccaataatttaaaatatggaccttatatgtagcttatttaagaaaataacagagtttgtactgacgaaattagaaaaagaaaattacaattttacaaatattgtgtacttatgccgctaaaagtaaatattgagattataccgctaaaaatgtagtcccgactacaagacaatgatagaataattttgagatcatatatatgatcatatttttttttttatagatttattgattatctctttttaaacctcaatttttatgtaaggattcttcaaattttctttttaatataatatttgaagatatatctatatttcttttatttattaaataaaaaattgtatgatgatatttatttatttttacatttctgaatacgaaaaattagtaaaacagctactcatattattaaaaaaatatcaaaatttaaaatttaatatgtatcattaaataaaatataaccgcacgcgaagcacgaattgtttcctagtatatatataaaacctataaagtaatatttatatatttatggattgaaggcagacgctctgttgacacaattaaagaaaggttggactggtactttgtgaacgattgtcggacatctacttttgagccagttgtaactcaacacttagactactataactccgaccatagagctatagcagtcagtgtgcgtctcaaagacttggaacaacagcagcaacataggcgtagcagatttcgttttgagcaaatatggcttcagcaagatgaagcgacgactatcattgaacaacaatgggtatctccatcttcgggttctacaatgaaaacatttctgcataatattgcagcatgtgctacttctcttcagcatggcatgtctcaatctttggaaacttgaagaaaaaaatttccaatgcacagcaacatgtttcaagactgaataatcaacatgtacgaacacctacacttatggatgatttaaagaaatcggagagtgttttggatgaactgttggaacaagaagaataatattggcaacggtcgcgtgttgattggctgcagagtggggaccaaaacacgaaattctttcatgcacatgcctcctctcgaaaagctgctaatgaattacttctctcttggataacaatggtaccaaaattacttccaaggatggaatgactagcatcatcacaagtttctttgcttatttatttactgctactacagtagatcaaagtgcaattaaacaggtcacatcaaccattcccagcaccataacgcctgaaataaatgctaccctcactacccccttcacggtagctgaagtaattacagcgttaaagactatgagtctggatgaaagtcttggcagcgatggcatgtctgcaatgttctatcaaaactactgggacattgttagaccttcaattaccgaagtagttttgggagtactaaacaatggtcaggatatggaattaattaataaggcaatcatcactcttgtaccaaagattaattcacctactgtcatggcaaattttcgtcctattagcctatgcaatgccatctacaagctcatttccaagatgattgtgttgcgctttaaagaagctctaccccttgtcatctctgagacacaaagctcatttctctccaataggttgataaccgacaacatgtagcttttgagcttatacacaacatgcaacacagaactcgtggaaccaaaagtttcttggcactcaaattagatatgagcaaggctttcgatcaagtagagtggactttcttatgggctgttatggaaaaaatgggattagcaaaagaatggattgacttaattcataaatgcttatcctcctcaagtctaactttctctatcaatggtgatgtcacggggtatataaagcctactagaggccttcgtcaaggggatccactatcgccctatttgttcttaatatgttcggaaggtctctcatgattgctgcaagacgaagaggctattggcaatcttcaaggactgacaattactggaagagcaccctcaatttcacaccttctttttgctgatgatagtttgctactttgtgaagctattaactcatctgctttggctatttggagagccctgagtatttatcataacactttaggccaaatacttaatcaccaaaagtcggttatgtcattctctcctaacactccaatagcagcacaacaattttttcatcaaactctaaacgtgccgataaatgaatgccacgaacattaccttgggcttccctcctactctggccatgacaaaaaggttcttttcagccatatcaaaaaatgagtttggaagttaatgaatgcttggaatgaaaagttatttttagttggtgggaaagaggttttgctgaaggcagtagttcagtcaataccaacctatgccatgagttgcttttgcttaacgaagacattttgtcaacaattggaaagcatgatggcaaatttctggtggggaacaactaaagatggcttaaaaattcattgaaaacgatggaaattgctttgcaaatcaaaatttgaaggaggcatggggttccgttcttttgtccattacaaccaaactctactagcaaaacaagcttggcgaatttttgacatgcccacatctttactaagtagacttctaaagagcagatatttctctaacaactgattcttagaagtaactctccctctcttacatggcaaagcatccactggggacgagaactacttctcaaaggccttcagtataaagtcggaaatggattccatattcaatgtggcctagacaaatggatacctggacatacggagttctatccaatcgcttacacaggtcctccatcaatgacggttgctaatttgattacggacaatagggagtggaacactaatcttctaaatgattattttggctaatttgatgttgaaagaattctctcaatctcgttgagtttctttccctcgactgatagattagtttggcatcatactacatcggggatttatactgtcaagctgcaaatttggatgagcaacatcaatcttcatcatcggacctgcatagttcttggtggaaaatattttggcatttgtctctcgcatccaagattaaaatttttgcgtggaaagttatgcataatgctcttccaactgctgttgctttgcataaacgaaaagtacttgactctgctgcctgttcaatgtgcaccagcgcatgggaatctattgggcatgccctctttactttcccgcacgcgaaatcagtatggaaaaacactggtttcatcttggactctagaaaagcacaacaaatgtacaataatgattacctttttcatctatctacttttcattcccaacttgactttgagcttattatatgcacaatgtgggctgtatggacgagtagaatcaaatccttacatggtagcaaaatctcatacgggaaacacactgctacttttgcaaaagaatacttggaaaagtttagacttcactctaggaggaagcaaaacagccctgctcaaagtgttaccacgcctactgctcctttttccagcagtaacattaatgatgatgaggtccattggcaacctcctactggaatgggtttaaaaattaatgttgatgttgctgttaattctgcagcaaaaaaattaggtgtgggtgctattgttcgggatcatggtggacaggttattgccactctttccaagctggtacagggttgctttcgttcagatgagatggaagcaaaggcactatttcatagcttaaattgggcattacagcatcaaataaacatcaccaacattgagactgatgctcttagagtctttcatgctttaacttctacctctacggatttatctagtttctcaaatttaattttagatgttcgttgtcttttatccttttttcctgaagcatatatctctcatgtaaagagaaatgttaaccatgctgcacatggtttagctaaacatactttagagttggattaagacgtttgttggctaggggaaattccctatcctatttgactactcttgtaaatgattgttgacttataataatagtgaaactttctcaaaaaaaaagtttttttactataattatacctgtaatttatagttacataaataaattattttaaaaaataagaaaatataactaaaggagaatacttataacaatttgtacaattcaagaggagaaataaaataaaataaataaaatcagtgatcaaaactatacaagtgtcgtaattttagggaggaagaatcctatataatatttaataaatgatgatagggtgatcgatggtgcacctccctttaaattgataatggggtgcaccaatgtacccacttcatatttttaatatctaaatagttataattttaatttttttatatgatgatatatattgtaattatttaagatgatttatttgttatgcaaaactttgaattatatagattttaacaagttgatccttaaactatatttttagcatattgatttttcaatagataagtcttggcgagttgacctccaactttatttcttaacaaattgttccttgatctttttgtttttttgacaattttaaatcctcactcttaaataaaagtagttttgttgaattatatttatattatttgattttgtatgttaattttaaatattttaataccttttcaattacttatatacatttttttaatcaaacattcaaatatgataaataaaaaataagcataagttaaaaaaacaaatttcaaaatataatttacttaggtatattaaaaaaaaactctgtatttttgtttatttatgttgttttcttgaagattattatatttagcatattctaaaaaaatacatacaaattaaatatatttttactttttgacaatatacaaatatttacctaaaaatttgttaaagtgaaaaaataaataaaaaaaattatacattatagtttttaaataatattatacattatttgtttaaaaagaatatcaaaagaaaatattttagattaatataaaaaaaaatcaataaaatcactattatgtaacagtgatgatttaatgttgccaagaaataaaagttcacactactacaaaatagggaatttcggtcagaaaatcaatttcttttcgaggatcgacgggaaaataattatgtgatggtttaaaactgatggctatggtttagaattgtcattagtttttaacactcacaatgtaacgccctatttgcttaggcacgctatagtaatattttatttaccgtgcatacattttctaatcaaagggtttctcaaaaattttgtcaaatttaaacttttataagtatataacctaacataaaagttgggatcccatatttaaaatttacaatcgtatacaaaatatatttataaatatgtcgtactgtgactacaagataaaggcccaagtcgtcccgatactgaactctccaagtccaaccatctagatatatacaatcatccccaagccctgtactcattggtgctcagtcttcacctttcttttacctacacatataaacagtatatgtgagtcaatagactcagtaagaaaaacatatagcatgtatcatattactgactcgtatttaggcgcccatacacctatctacaagacttaacaaatgattaagaacattcttaacatttggcactatcgattatgatatcagccactaccagtactatgatcacattgcgagcccagtgttatgttcataccgctatgatagcatcaataacacccaaaagtataattaacgatgatatcactcttactagtactatgcttgtactgctggcccagtactatccttgtattgctatgataaaataattaatactttatggactttaatatcagtcttaaccaataatatgctcatactactgacctgaaactatggttgtgccattgtaatatcaattcataatattatactgtattaatgtaccccatattgttaccgtattagtgttcatagtatacaatcatataatttagcatgcatattacatgcacacacatatacatatacatatatcttcggctagtcttacctcgtttctaaattcaaatgtgcatgttgacttgaatggaaattcatgcgctaaacggaggtcctatgtcataatataaaattgataagtgtttactctaaaacacttgtttaatactcatatagaacctaaggttttgatacaaaattatatggtgaaaacacccttaaataaatacatattttggccctaaattacattccatacggtagagctcctcacaagctttaaaacaatatatagaacatctaaaatggacatttacatgaaaagttatggccaaaatataaaaattggtctccttggtaaagtcctgaatggaagcctcccaatccagaagccccattccggaaactccattctgaaagctttctcattctggaagctctccctatccagaagctctcccactccagaagctcacccattctggaagctcttacagggcaacaagggctcaaaaatttccaatttttaggcccccaaaactagctccctgcctaaccaaaagctaccaaacttttcagaacagtagtttgggctattctaaagataatcacaactcaaaagcatcgaaaacaacattcaatgaaattcaccatggatgagcaaagcttgagttcataaaactcaaacttcctcaaatcttgctacagctgctactacttctaaaaacaagccataaacaactaaaagcaagctttaaagtagtttctaacacgattctaccttaattaaaactactcttgaattcccacaatcataatatagaaccaagcttaaaccttaaaattcaaagagggaagagaactaggattaccttgatgaatctctcaattcctactcaaactatagctaaaatctttgttggatgatgaagtaattgatgaacaaaatggttgaatatccctggtttgcttcagccaaaagaaatagagaaaaggaagaggttaatttggttttttctttttttttttttttggattattctatgtaaaaaagagttatctgctaggacagggtccaatctcatgctaccaaacagttctgtttgattcccaaaaatacttgtatcttaatctttgatgaaaacgaagaatatgccaagaagacttcttgaaaaaactccttggaatcagccaaagttgacaaaatattaacttgggcgctgggcctcctttttggcctccaacttggtatgtttcttccttaaaagtactttattccttgtttttgatgaagacaaagaaaaaacacgatatagttctttggtttgatgcttaaaagggccccaggttgacaaaatgtcaatctgggcgctgggtgcctggggcacctggtgtttcaagtgctttaaaatgaaagtactccaaatctgattttgatgcgtcaaatatattcgtgacacttctaattcatgttccagtataaaattttgacatatttttactaagatggtctcggaaactgaaatcctaattgggttgttaacttgggcactagtgaaaccctaggcgcccgggttgatttttgaggtgttatttcatgtatctttcagttctcgagccttggacttggatgctttatgtctttatggtacagaatactgaaagatagtgagttagaaacaacttggcgtgatctaaacacccattccagagttcttgaagtcaacctgggtgcagggctagggacccctcccaggtcgactactatgacctaggactatttaactctgagatgatttctttctggccacatatcaaatattgatgtccacatcactagagtaagtttctaggttaatagagtccattgataagtacataatgaatgaatctttgttaaaagacccaacgtgaagaccatatgagcacaaccatgtagttgagctaacacgttaagtaaagcaaacttacaggagtttttctctttattttgcattggtgttattttattgagccttgaggaaagtatttatattaggtgtgagggaggaaaattattgtgtctgtaaagtcttttttttggcaagttagttgacaaaatatttt

SEQ ID NO: 14331 - DNA, 15360 bp, Cannabis sativa
tatgtttgtagttgtaaatgtagaataatgtatttataaaataaattggatcatttttttttttaaagttcagtttggacagtttaaatcgaccaaatcgaagttcaaaatggtcggttttcgaattgcaccaatccagaccgaaaaccgaattttgaatttttatatagaaaaaaattgatcaaaccgacaatgctcaaccctatttaagaatagagaagaaagaaattaaaaaaagtaatataattaaaaatatatatttacttttacatattggtgggtgggtagtgaaatattaatttgtttctcctcatgagttttttttttttttttttgaagaaaagagctgcaagataaaacaatagaaacaacagccacgaagggaaacaccaagtgttcctcttaaccatcctcttgctgcctgatcgcttccttggctagggagtgagcttggacattgaaatggtgaggtaaatgctgcaaggaggcatcagggaaattggagatggattgcctgatctttgaaacaaggctcgagagagcagattgatccttccatgtcccattaactttggagacaaggttgaggcagtcggtgaagataaggttcgatttcagctgagaaaagaagcactaggagagaccttccaacaaagcttgaccttctgcaaaaattggagtggaggctcctgatttatgagtcattgtcgatgctaagacttgattaggacctttcttgaacacaaaacctaaaccagtggtgcaattggcttgattcagtgctgcatctacaaacaaagctgtactattatcagggatgctggaaattgatgcagatgtaaaagaagattgctgctgtcgaggatttgttgaagaagagtctgagcagttaatttgttgggcctccttatattcctgcagataatttaaaacaaattcttccacgttgttagagttataagacttctgaaacagcaaagagtttctggtgttccagatatgccagactaagtttaacaaaaagaggaagatcctcttttgctagtaagtcaaggccttgaagatagaaatcttgaatatcatttcctctatgagctgagtgaaaagtcttaaactttgaatgcttccaaacagtacaagctctgttaaaatttataagtgcatgggtggcggatttcattctgcctccacagaaatgacaaaagggatctttaaggacattcttgtaaaacaggttaagagcacaaggcaggatatgattgaaagctttccaagtaaaatgtttgatttttagtgggatgggaagagtccaaagagttttccaccaatgcttaagggcattaggatcagaaggggatggagagttgacatttgcagaagaggaagcaagatggtatgcagagttaacagtaagaatgctagattggtgatgtccctagatgagagagtcagaagaattgggatcaaggggaatttgaagattagatttggcctggtaaaggggaaggtagagctgcaactttgcaatattccaggtgttgtttgggttgatgaagaaagagacagtggaaagagaaggatcaatgggatgaagaaatgttgggtgagagatgcctggtatccagtttgaagcataaatagggatgtcatttccactaccaattttccaaacaaggctctttttaagagctgacgaccccaaaggaggcttttccaagtaaaagaggtattgtatccgttaggagcagtcaaaaaaatcagagtttttaaagtatctagctttgagaattgaatgaagaagggaatctggattagaccgaattcgccaagcctgcttggcaagaagggcttgattgtgatgggtaagagatctaaaacctaagccaccaaagaattttgaaaccgagagagcagactatttcttccagtgaattttcttagcatttgaagttgaaccccaccaaaatttagagattaggcgttggatagtctgacaaatagattttgggagctcaaaacaggacatgagaaaaaagaggatagcctgaatgactgctttgattagcgtttccttgccggcccttgaaaagaatttatcatgtcagacattcatcttagaagacacgttttggataaggtagtggaagggcgagttggtaactctgccaacacagtgggggactcccaggtatttgttgatgaaaccctcattcgcaagctgcagcgcagtcctgaatgtattttaggaatcctgggaaatgttaggagagaaaagaatgaaagatttgtcccgattaaccaattggccagttgcctgatgatagacatgtagaatatcattaatggcctcacttgactaaggtgtgacaggggtgaataacataatgtcgtcagcaaacaaaagatgggacaaagaaggagctctcttggtgagttggagaagtaaactatagtaaactcataatcgctgttgtttacttccgaatactaatctagtttggcaaagagaataacaaaggctcaaatatatttcattcccagcaaagtaaagcaaatcatatctctcttttatctcccaactcagttactttccttctttcccataacactcataataacccttcaaataccgtttctttctttctgcctcaatattttctccacaaccaaacagaccaaccgatcatcaatccaagtcaaaggtgctgttagattaccaaccagcaagcagaaccagtttctccatgtttccaaatccataaccctacgcatatcatcgtcttccttccactgcttcatggacaaagaaactgaaattctctcttgccttgccgccaaccacatctatcttgcccaattcgagcctctcagggcggtaatcctcgccctcagagaccgaaatccagagcttgctcttgccgtgctccagactattgttgctcactctggtcgttttgaaaacattctgtggtcttcctcttgtccgtctccctctctacttacgttcttggccactctcgagctcttacagttcgataatgcgtcatctgtttggagctttgattccgaggccctgcgtttgcgagccgagtttttgttgttggttcagcacttgatcgaccgggtctcggaatttatgaggaggaattttgatttggagagcattggtactaaggagggagagaatgatggtttaggtgagagttttgaagagcgagctgaattactaaacaagagtgaggataaaactgacgatttgagagcttccagcggtgaatgggagagttccgtaggtgttttggatagaatttttgagttgggagtgaagaggttgaaggtggatgaagttgtggatgctgctgctgatgctgatcatgataatcggaatcaaaatgcggccactactattattgaggaaggagatttggtgtgtttgaggaaggtgatttgggagtatgcggatgtttttgatgccctgtgcttgaatatacagaggcaaataagaggaggctgggaaggttatgacccttctgatttagcgattacaacaaggagtgaagagaatgcgactaaggacgaggacgaggacatggtggttcttggttcgatacaaaggattgttcaactggttcacttagatgctatcaaagagtgtgccaaggagggaaatgtgaatgaggctgttttgcacattcgttttcttcattttgattgtggagtggaggagtctgagtatcggtatgcctatttttcttttcttttagtacttaggttaaatcttccggaactaaaacgattgatggcctcattagctgttgcttaagtagtcttgttgtttatttcgaaacacaacctctagcttgtattacttagagaatgaatagtaatacaaacacaaagtagggaacttcaattagcaattactttaaagccctatctttggctggtaacatggaagcagcagtagccagttgagtattgagcacagatgagttatgatgtgatagaaacttagtacctctataatgtgaaatggatgggctatacttagtctatgagtttttatttaattttatctgcatctttcttcaagtagttttatgaatttccactgaaaccttcaacttcttgggaattcgattatctttttttctttcttttttttttttttaacttctgcattaaaacatactgttataaagtttatatttttgtttaggatagagttttgttctgggaagggaatttactgttttctttgattattatgtattgcaaaagcattttgtattttgtattttgttttagttgatctgggggatggacatgtggtcctgtaacctttttttgccttctgctttatctgtttttttttttggtcttagcattgtttgtttaatgagaaattaagctctgattctggggtactggattgctcatcttatagtcccctttgactgtcaaagttttccatggttgatgattgacactgtttattttttgctagtattgtttgttttgctgaattatatacttctgcttaagtgtttggttgtagtttaatggctgtccctgcatctgatttctggaattcctagatttggttgaggcaggcatgatctattgatggcagctagagtgaagggtaaactggttaaacaatagaatgtagataataggggtatgtgggtgattgtagtatgagtgatggttgagatgaattagagtagtaaatataggaatgtagaaagaaaagaggcatgatgagaacccatctgaaattaacttttggggaaatcctagatcaaagtcgttttggaaactagtcttaggctagatcttttgcaactataatgcatatcctatttgtggaatcactaaatttggtcggtaaagccgaatcgactatggtggagacgcttgcagaaatgggtatggaattacgcttcaatgaagaggaagttactcagtagaaagcaaaagttataaggggttggaggaataaccaagaactcaaaaatttgacgttcaacatcaattatgatagcagaaagacaaaaggagggtgtggtatgatacctgaatgaagatcctaacttggaatataagaggtaacggggataaagagaagagaagagccataaaagcgacaatttgcaaggtgaatccatatatggtgattttacaggaagtaaagaaggaggcgactcacaggaaattcattggaagtatttggagatctcgtttcaagggatggattttgattccttctatagggagattagggggtacactactcatatgggatactagaaatatcactgtgttagaatcattggtaggatatttttctatatcagtcttggttaaagcggaagggaaaaaccctttgtggttttcagggctctatggcccatgttcatacaagctaagatcagacttttgggatgagatggcgggtttgagtataatatgtggagattcatggtgcttaggaggagacttcaacgtagtaaggaggatccaagagaaattgaatagtaaatcgaacacaaagagcctgaagatatttgatgagttgatccgtgaacttaagttaattgatcccccgttaaataacgaaagattcacatggtcgaaattcagatcaaagcctatttgtagcaaacgggacagattctttttcaccaacgcatggaacaatgcgtttccttatgtcagacaaaagatgttggtaaggattgtctcagatcataatccagtggtgattgactctaaacccccaaaatggggtatgagtcctttctgctttgataacttatggctggaacacaatcttttcttcaagaattttggcctgtggtggaaaaatgtagcagctctgggttggccaggtaccaaaatcatgagtaaataagagtgtggagcaaagcaaattttggtagcaatcatttgttgaggattgctatggaaagaagactgggtgagcttgatagattggagacaacaaacttgtggaacccaatactagccgaggagagaagaaatacgaagaaagaatggcagaatttagcctttgaagaaggaagaagtgtttggttaaaggctaaatgcaaattggctaaggagggcaatgcaaactccaaatactttcataatctgttgaatgcaagaaaagccaaaaatacaatttcaagaatccaaagagaaaatcgctagattattgaaaatgaggaagactttgtccaagagattgtgcatttttttgctagcttgtatacttcagagagaagaactgacacaagcattgaagggattgaatggcaagtgatctcagaattttcgtcaagtcacttagagagaccttttgatgaagacgaaattcgcaatgccgtttttggttgtgagggaaataaagcacctgttcccgatggtttcagtttggctgtgttttaatcacagtgggagataattaaagaagatctattggaagttttcaaggcttttgaaagagatggtaagatcccaggtagcatcaacgagacatttatctgtctaattccaaaaaaaaactcaacagttgtaggattagagactacagaccgattagtcttattaccagcgtatataagattattgcaaaggtcctagctaacaaacttaaaggagttttatgggagatcatacaggaaaatcaatcagcctttgttgaaggaaggcaaattttggattcggtgttggttgcaaatgaaacagtagaagactgcagaagtagaggcaaaagtggcttagtctttaaaatcgattttgagaaagcatacaacaggattgagtggtgctttttagatttggttatgcacaagaaaggcttcggagagatttagaggaaatggattcgaggatgcatctcctcaacatctttctcgattctcgtcaatggaaaaccaaggggaaagtttcaaggttcacgaggacttagacgaggagacccactctgtcctgtcctttcctgtttactctggtagctgatgttcttggaaggatggtagacagggcggtgtacttgggaaagtacttcgggtttttggttggaaaaaaagaaagttcaagttagtcacctgtagtttgctgatgatgcaatatttttttttttttttttgtgaatgatgagcattccctaaaaaagttggtgagtttagtggagggcttttgtgtcatttttggtctgaaagttaacttgaacaaaagccaactgctagggttgtgtatgaaggatgaagcggtgtcaaaatgtgcttccttagttggatgtgaagtgggtggttggccaatgacataccttggtatgcctctagggggatcacctaggaagtggagtttttgggaaccaattttggagaagtgtgcgtaaaggttagatgggtggaaatgctcctttttgtctaaaggaggcagattgactcttgttcaatcagttttatcttccctccccacttattatttgtccattttcaaagccccaaaatcagttacaatggctttggaaaaattgatgagagacttttttgggaaagtggggagttggggagtgggaaccacttggttgcttgggaggaggtgtgtcgaccccgagaagagggtggattgggtattgggggattggagctgaaaaacaaagggttgctaatgaaatggttgtggagacttccactagaggaaaactcattatggcacaaagtgatagtaagtagatatgggaaagcggacaatttttaggagtcaaaggagggtgctcggatgtctccaaaagggtcgaggagagatatttcagatctttatggtgtttatttggagctggtaagcttcaaagtgggaaagggagatcgtattcgattttgggaagatgtgtggataggtgatacatctctgaagagagacttcccggacttagcagtgatctccaaagctaagaatgcaagtatccaggatttagtggtggacgaaggactaccaggtggttttgtgaggagctgggtctttaaatttaggagaaacctcttggacagagaagttcctagtcttattagtttggtccaacggttggaacacgtcaaattgctaaatgtagacgttgacattaggctatggaagcctgatccgggtggtatcgtcacttgcaagtccgcttttggttggcttaactcactcaaatcacagtagacttttttggaccaaaacactatggaaaagctcagtcccgtcaaaaattaaggtcttttgggtggcttttggccctaggcaaagtgaatgttcatgagaaaatgcagaagagatgccacctatatttacatctcccccagttggtgtgtgtgctgtaagaataatggggaagatctggaacacttgtttctccactgtcatttcgttcgaagaatttggatgaacctggtgacagagttcgaacttgtgtgggtacttccaggtgatgttccgtcaatgttggttagcaagttaagtagcagtaagcgtaatactaaactatggagaacaacgattttgacacttctttgggctgtttggatggaaaggaattccagattttttgacggatgtgaaagcttagcagaagatcatctgtgggagaaaataaaattttggttagctatgtgggtgcataagtccaaatattttgaggatttctcgtttggatttaagtagagagtggaaatatcttgcgtaagaaactttacactgatgttgtagaactagaagagagtttttttatgtcctatattgtaaagagtgtttctttgtgttgcctttttgtatactacggttttcctccgccacaagtgagggtattaatttctataacgggggaaggtcagtctaagacaaacggcctctttctttttttcaaaaaaatcgatgaccatgttagatattttgcaactattggtaagaaggcataatccatgaccatgttagatattttgcaactattgcgaagaagctgcaatagaacctcattaaacctacaaatattgctggggttggtgcattgattaaatgtgttaacatggtccataagttcatttttaggctagtttgttactttgtttgttgttacttatatataggtaaattaagtcaatttatgtgaatattgttaccacacggtttcctccgccagtgacgctccctaataaatttgggggaaggtcaagttttgacctttgtctctttttcaaaaaatacaagtcaatttatgtatttctcttttcaaatttgataatctgaattggttatctgtaaaggaacaatttttgtaatgtttctgttttctggtttgtgtgttttgtttttggttgtcgtttgtattgtatttcttgctaaaacgtatgtaaccacggttttcctccgcaagtgagggctctcaatatatattgggggaggggccagtctaagacatgtggtctgtttctctttttcaaaaaaaaaaaaaaaaaatgaaaaaaaaaatgaaaataaaaaaaaataaaaaataaaaaaataatctgaataagtctcatagttattgtgtcgaaaattttggttttacattcgaactaaagtttgttatttcattctgcctctgatttggtaatatattactgtcagaatatatttatataaagcacacattgcttttattgttctccttgacattcattttgaatgttgttctacagcattgtattacaggatttattgaaggtggtttctctaggatgggaggaatatggagactcttggcatgccaagagagaaaaattgttgatgatttatggtgcagctcttgcatctaattgtagatttctcattcaaatgctacaggtatatttgttttcatttactcattataaatcagagtggtagaattcttggcctgggttggtaaatgcattgccaatacctacctaataattccaggataaaaggagtggtattttatgaaacaaatgcattgccaaagattacatggaagtttatttattacaatttaagggctatattgaactgataattgatttccgcaggatctccatgatggcttgcttttaaaagagattgagttgtatcaatctcttgataataaccaaattccacctcctttggaatgtttccaaagatttgttaagaaattagactttaattctgatttacataataaaactctgcccctaaatgccgcggtcagttcttgcatgagagacgtgtgtcaatatgctcgagtctctggacagcatgttcttgagtgtgtcatggatactgcgttgtctgctgtgaagagaaatcaacttgaagaaactagcaatgtatgtctccagttttatgtttaattgaatatgtgagtataatttcattattttcgtcagtcagttatttaattgtacatgcctgaattactgattttttattggaaaaccttgcttgttttcctgtggtagatcttttcactgtttccacgtctcctacccctggtagcttgtatgggttgggatatattatctggcaagacaacagaacggagagaattaatgcaacttttttggactagtaaatctcaagtactccgtctggaagagtcttctctttatggaaaccaatcagacgaggtacttctatttttcaattattagtctgatattttctggtgttaaatcgttactagctaagaactatgagattatgatttatgtgtttttattttttgacagatatcttgtgtggaacatctctgtgattctttgtgttatcaacttgatatttcctcattcgttgcatgtgtcaattctggtcgagcttggaattcaaaattttcgttaatgttgtccgggaaggaacaaatatcctttggaagtgatgatgctcaattagacccatttgttcaaaattttgtgttggaaagactttcagttcaaagtcctcttcgggtaaggttgtagggtatatattattgatttggagaacgatgggcatcaagatcaaccatgagttctgcctttcgatgaccatcattgcaactctagatctttttggcttttgaaaaattattgtaatggttctgttatcatgttaatatgggcaataacacaccaaatataagcaacattgaatttaaaatgtcttcacctgaaacactttgttcttcagcaatactttttttaaatgcccactttgatatattttagtaggggcaacatgctatgtcaaatttgtttaacaaaaagtctgttccccttatttgtcgcttgtttgaatgtttgagcattgagcacatatataaccttccatcttaacagttaccagaacagtgcctctgcgaaacctgagtgaaagttgcgaatgccaaatccaactttctcaagatccgaatttctaatatatataatcacatgttaggcgaacttctttgatctcttttcttcctattattcctcatattaatacaaaggtgttcttttttttttcctaaagaaacatgttaggccaacttccttctgtccatttgatttttgttaagttaaaatggtacaattattctttcaaaaagaatatccaatagaagtggcacattgcaaatgaatagatgtgtaactgggaaaattgttttaatttgaaataacaaggtggtcaatcagcaaaaaaacattgaactaatggggatggttatgtagtttggaatttctaaattgttgtagcgatgataaatgaagaatgctaatatgtgatcatatgattgtgtacaggtattgtttgatgttgtgccacaaatagaatttcaagatgccattaagttgatcagtatgcagccgattgcctctagcttggctgcctggcagaggtgagtattctaacacgtagcatagagattttggtgagggtgcttgtttaattttgttccattaggcttgtgccacaagtctgcacatgatagtacaaaatagttgggtatattggtaggcattttggcatagtgctgcttactggttgtcttttttgcttgctctcgactctatattagatgaaaatgcaaatttcatcaatcatttttctgatactgatgctgatgctgttatgtaaggtttgcgtaatagtattgtaatgactaggactttgatgtatggttctcatttcctacaacatggtttagttttaataaatacatacatgtcctttgattgcgtgttctaacttataaggctgcttatgtgtgttgcatccgtggtttgtttggagatgagttaatgctggtagtaaacttgagactaattcctagatttgttcttgatataagaacttgagcattatagcttagatataatcattttcatcattattcttccatatatgctgatggtgctttctttttatttttccttcataggctgcaggatattgaacttatgcacatgcgctatgcactagagtcagctgttcttgcacttcgagcaatgcagaagagcatgtctggtgaaagagaaaatcatcatcaagagcccttttgtcatttgaaagatcttcaaagccacctggatgctattactaatattccacgcaaggtcttttgaatgtgatttgcaatttttcagctttaagcttcctagtttttttttttttttatcttttagtagtttatattgctccatcatgctcctccccatcttttcatccacaagaagttcaacccataagtacacattattgaatgttctctatttttattcttgcccaatatgcaaactgtggaaagtatggagaatagctgtttccattactcctcaatccttaaaattttattattgttgagtaggacttcaatgtggcattcctttaatgatctgtattgtaggagggaggggagaaggtatggtgtgaaggatgtgaagggtagtaggatttactcgttctttttaccaaacaaccttagttttaactttccataccctcttttttgcttgtttttcccccttccaaaccccttgttcatgactgagtgttgaacaccttgagcaaaattatatattaacaatggtgatctaagcttgtcttttaaaactttaatcattttcatttttgaaagcttgtcatgcaagttgtaactaagcttgtcaaattaaaactttattcttttgattttgctttccaaatattgatgattacgtgacatgtagtttgtctgatgatgcagataatgatggtgaatgttataatttcactattacacatggattatctctctcttaatttggcgcattgcatgtcatctcaaagctatactgagtcacccgatacttgtgcgtgggatcataatgatcttagtacatctgaaggggcaaacaaaatggttctatcatttacaggattgctacttgatatactacgtcgcaatgttccttcagctgtaactgaactgcaaaatgctcaaactgatggtttgactacaagtggaaggcatgcattagagtggagggtgtcaatagctaatcgtttcattgaagaatgggaatggcggttatcaattttgcagcgtcttcttcctttagctgaacgccagtggagatgggaggaggcattgactgtgctacgtgcagccccatctaagcttcttaacctgtgagttttatgagttgttatagagaaattttgtgagataattaatttttccttttacttcaaatacataatgtgggtttgattatattttgtgaacattcaatgtggagaaaatcttatgtagatgtatcttatcatcatcttgtaaactcaaggtgctgctgatatattatctattgtgaggagagctttttcaatttataataacgatatattatctattctttctcgggattccaaataggaaaagacggtatccgattcagtcacctacaatttgcggatgacacactttttttcgtgaaagatgaggcatctctccaaaagctgattcagattgttgaagcattctgtggtatatctgggctaaaggtgaacctcaataaaagccaactcctaggaatttgtatgaatgaggaagtggtgacccaaagtgcagacctaatcggatgtgaggtaggcaagtggcctttaacttacttgggaatgccacttggtggatccccaaggaagaggactttttgggagcctgtattggacaaatgtgctacaagattggacggatggaaatgctctttcctctctagagggggcaggctcactctcattcagtctgtcctctcttcacttccaatttactatctgtctcttttcaaagctccaaaggtggtcctaaaagaactagaaaaattgatgagagatttcctatgggagggaggtgacttagctggtggggatcatttggtggcttgggatgaggtttgcaaatcaagaatcgagggtggcttagcaattggaagattagaaatgaggaacattgggctgcttatgaaatggctgtggagatatcccctagaaccgaactctttgtggcacaaggtcattaaaagtcgatatggcaaagcagataacttctgggatacaaatcacggggttagaatgtcccctagaggaccatggaaggatatatcagaactttatgacgaatatggcaagttggtgaagtttaaattaggaaatggggaaagtattcgtttttgggaagacgtgtggatgggggactcttctttgagaaatcaatttccagacttagctgtgatctcctcagccaataatgttagcatccgggacatgattgttgatgagggtgaggtaggaaattgtgtggcgagttgggattttaaattcagaagaaacattatggatagagaaattcctagcttgacacaattgttacaaaagatggagcatgtcagagttcttaacattcttgaagatagtcgcctttggattccagactctcgggggattttttcctctaaatcagcgttctgctggcttacttcatccgataaccccggggagttgttttggaccaagatcctatggaaaagtagaggaccttccaaagtcaaagtttttggatggttgttggccctagataaactaaatctacatgctagattgcaaaaaaagcgtcccttcttatgtatatcacctggatggtgtgtgtgctgtaagaggagtggagaagacgcggcacatttgttcttaaggtgtcgccttgcggggtccttgtggataagattgctccacgaatttgagattcaatggtccatgccgtgctcggttccccatatgatagtaagtaaggtggggggcagtaaaagaagtaggtgtctatggagaacagcggtgttg

SEQ ID NO: 14332 - DNA, 3673 bp, Cannabis sativa
tgcaacttaaattgcaataaaaaatcgtatagcaacccacataaaaatcattcgagaaactactttagaaattcaaaccgtaaatttaaaaagaaaaaaaaagttaaaaaaacaatgtataggataattcccctataatttattgaacttaataaatatttaatatgaaaatattcttattatattaataaaataatagagcaataaaaaatataaaatttagtataatatttactcttgtaattagaattgaaaaaaaaaaaataatgttgaaatagtaattttttggtgttgatttgacaccaaatttaaattttatcgttagagatgtcctaagagaatgagctatagagttaacaaagataactaaaggccaaacataagtagggagcacttgccaagaaaatgagctatagaattagaaaattttgttaatctctatctagaccatttcagaaacaattgaaaaggagatacccacaaatgtagtcattgactcttttttgtattttttttttaaatttacaagtaatcttaaataactataacatacacgatcatgaaaaaaaaataaactaaaataatctatgtataccgaaacagatataaaatctaccaaaacatccatttaaaggatctcctgtagagttaccctaacatatatgtgcaactactatacaccaaaacacacaaacaacatttgaacaatgatgtgttattttccatttttcttgccaaaagagaaaaacattgtaaaaaagaaagttacacacggatgattgttcaccttttattcttaaacaaacataaaaataaaatagaaagcttcagaaatacaaaagtacaatgccaagtagaataaactttgaactttaatcagaggtaaaatactcattaatgggcagaaacagagtcaattctcagagttttgggctgaattatggggcaagttatcaagaatgtcagatataaacttgatgagagagcaaagtccacccaagaagttatgatcaataacaccctcaccttctatcacatgtgcaaagtcaataagtttaactgtaacacctgggctatgcccttttagagctggttctttctcataaaccatcagaacagaacaagaatagaaatggaatatggtttgattttcaaaccatgtcttgagcttcaacaattgtgccaacaccccattaggaccaccataaacactttctgcaaaagcaaaatctggttctgcaactaaatcattagacgaatttgatgaaacaaacttcttaagagctactctaacatcatctgtactaaatcctagaacatacttcctttcgggtttccaatatccagagtctttgtctccataaatttgaaatccagatatcctaaatcccaaaggcaaagttgttgtttctctatctttctttagacatttcatgatatagtcttcagaagctgttgggaaccatgttctagatcccattttaatgtccattagagaaggattagttcgaatcgaaacaacatcttccatgacaagatggggacaaggaccggatccatcagacgcctcaatttgtttagttccataataaatggggaagaatttgcgaatgtgatttggaatttcagtgatggaagagaactttgtatagaactccacctcttgggagccacggtgatcactttgaagaggcttgtaaaatcggcccgaatcatcaattaaaggaccaatgattcctgtactggcttggtggccagcaacctgatgatctggtatcttaaacatggtctaaatgataacaagtaacataacaacaatgtcaaaatcaactcttaatcctataagattcaaaaagttcaagaagtccccttttccctttttcattaacaacaataaacaaagttattaggtactaacaatgtaaccccaaaacaaattaaataattttaaacagaattgattctgttgaaagtacttgacccagaaacaacaagataaagatactgtacccctaaaaaccattaatattaaaaaaataagatcaagtcaaataactagtataaacaaacacccaaatattattaagggaagaattacccaaaacccttgaaaagtcagattgaaaaagaaccaaaacatcactatcaagtctgaatctcaacccagaaatagatgtttatgttggtttataagaatcaaaacccatgcaataatttaagggtattttagtattcacaattacattaaatattttttcttctttaaagtacaaagatttaaaaatctaaaaggttccattggatcttgtataaattgttttaatatgtaaagatttgtttacattactttatacatctatctacacataaataatttatgaaagcaaacacacactttctcagagaaatttcataacaaaatagaaaagcatacatactgtctcttatatagaaatcaaaaccaatatggagattaaaataaaagagtaaataagataagatacctgaaataaggggcggtgataacgatgaagagtgtagccggagaacccaaatggagccgagagaaagagaattttggtgtgaatttgagatggaacaagtgacagtggaatttaagcttttgataaaaatggaaagtggcaaaacattttgctttttctaatattctaaactttttgtcttaatttggtggaaaatcaaatcaatcacaattcaacatttaacaggggaagaatataaaataataaaaaaattgaagaagaaaaataaaatatcacaactaaatatctaacccattttgagtaatgtataaatattgaaactatatccaaatttaaaatatttttaaaaatagaaacttttgccaaaagtagcacttattttttttattttttattattattttaagagaattatttattcaacaaaaacactacaaaagtctcaatgctagtacagtgctaattgagatatttttttttttttttaatttaaacgatcatctattaattgaaaaattagaccaaatggtcattacaaagtaaatctttcaggaggtaagaaacaggaaaacacctatagtatcgatagtgggcgaaggcccaccaagccacattatgaccgacaaaattacatgatctgggaatacaaaaaaaatacaaccgataaaactactagagagctcaaaacaaaaattagagcagtgctcaatctgccaatacaacgagacgcggttgatagagttgatgacgaccctcgagtcactctccacgatgacaaaattatgaccattgagctttgcggtttccagggctaagcaacatgctgccacctcaccataaagagcatctgcaaagtccagtctagccaaacgaacctagaccacctcccctaaatgaatattatttgacattattttatagttttgatatgatttattttctctcactttccatgtattctatttcattcgtacttaattacttttaattgtctggccatcaattaattaatttatgattttgatgcgagatctgagaaatgagtgtcaattataaaatagaatcgaattttaatataggacgagagtacctgtatggtttagatagcttataaggtttctgtgtttaatgcatgttgcatgtttaacttatcacgagagtagaaaatt

SEQ ID NO: 14333 - DNA, 13777 bp, Cannabis sativa
  modified_base (10655)..(10674): a, c, t, g, unknown or other
  modified_base (11586)..(11591): a, c, t, g, unknown or other
ttgaaaacaatagcattaaattgtataaattaattatgagtctaaattttattagaaggtatttttttaagcattaaaaatgaaatttccctttaaatattctattataagctccccaaaaaaaaacaactagtataagctaaagtaactttaaattttcttttttccatagggaacctagaatgtcaaacttcgctgaaaagaggcaaaatagtaatttgataaatttcgagggaggtaaatgcaaataagaagagtaatatttggatcgaaccgaaatgtaaggacccaccacatttcggatcttttttttttttttttttaatttcattttcaacaacgttcgacgattcaatttttcccctccttcctttttttttattattatccaaaaattaattaatttaattaatgtaaattctaccttaatacagtacacctctccgcactagattacacataacacgatctctcctcttccttttctctgctataatctcaagttttcctcttcgattgattgattgattgaacagtaaaacgaaggttggattggagctcattcacaaccagttatggtaacccttttcaactctctttttttgtttggttcttcagaaaattaccagtagaatgcgttttaacgaaaccaatgcttttgttttgtttttaatttttaactgaatgatcgcgtttgtgaatttaattgatcctgtttgcaccaatcattgcttgtttggttttgttcttgttaatgttattaatggtaattgaaatttcttagtagttttttagctgtttttggtgatatgctagtagagtttgatgaagatataggaaaccgttggattgattttgtgggggtttgtgtgattattagaatattggaagatttgattatgaaaatagggtattcattggagctttaaagcatacatttttgcaagattatttggttttctaatcattaaatttatccattttgtgattttgaacaagattcttccccctttttgtgataatacattgcaaaatttcttgtataattagttacatatacaatgcatataattcattcagttcctaaacgaccctcaagagatcttaggttgattttcatcttttaatcgaattaagtactcttttggcaatgacatgttattgatttttaccttcatattcatgtatcttttgttcaaacaggttgaaacaagagatagacgtaaagataaagttcttgtcttggtatatcagagtttgggtttggttttcggcgacttgagcatttcgccactttatgtttataaaagtacatttgctggaaagttgcggcactaccaatctgaagatgtagtgtttggtgcattttctatgatattttggactctttctcttctttcattgttcaagtatgttgtttttgtgctgagtgcaaatgataatggtgaaggtaagatttgatactttttggttatgatgctttagaccttttttttttctctctattcttattgatgatttttttgtgatcaatttgctttgttgcaggagggataatcgcattgtactcacttctttgtcaaaaaacaaaattctgtttgctacctaatcttcaagcatctgatgaagagctttctaacccgggctgctcaaacagaaatgtgcctccttcttttttaagaagaattattgaaaagcataaagtagcaaaaaactgtttacttcttctagtgttgttgggagcttgtatggtgatcagtattggtatctttgcacctgcaatttcaagtaactacactttctttagctctctctctattaattaaaaaataaataaagagattagcattgagtgattttgagcatttgatttgttgcagttctttcctctattgaagggctgaaatttcaaacaaaggatgtacataatagtgagtttcccttcataattgtatctgtatgttaagtttgcgttttcgtcacttcattattggtaatgattaataagaatctattgttggtatatatgtctttcattgttggtactatgagggtatcatctaaatttattgataaacacaatccccgtgtgcttaatttgcgactgtattgcatttcgtgaggttagtactaagactaagtggacaatggccattggccagcagtggcacgggtacatctgagttaagatcaatatagtctttcacagaaccaaggtagaaagtgaaaagatgggtgaaatctgaagaatcgtccatccaccgccgtaattgtacaagcattattctgtttactgaatgatttcaagttactgaatttctcaatattgcagatactgtggtccttattgcctgcgttctgttagtactcctttttttcttacaacaccgaggctttcacaaggtggcattcttgtttactcctattataatcctgtggttggtgtccatcactgctgttggaatctacaatatttttagatggaatccaagagtataccaggctctatctccatattatgtttacaatttttttaaagttacaggaaaagatggttggatctctcttggaggaataatgttatgtatttctggtaaatatgaaatctggaataatttttctgtttccatgctgctcttttttcaatccagttcgttcgcgtcacttttattggtcctctgcaggaagtgaagctatgtttacagaccttggtcatttctccgcgacatcaatcagggtatgcataaccaatggctgcaaaagtgaaattccattattttctaatcatatggacaaaatttgatgaacctgtgaagaaagactttaaccagtaatgccttctatttttttttttaatattatcactttttgaattagttggcagataagtttgaattttgacctctagatgatgttttctgttaatttaaaaaaatgtatgttcatctagatcagggcaatctatcaaggttgacattaaaacatatagaagctagcattaattgtccctcacgtcttgttcagttccacttttgtgtcagatttgtgaggttatttgtataggtttgctgtcaagaattgaatcaatcatgcatttttgctatggcatccgagacttcaccatcatacccaagagtcttataattttcttctcttggttatttacatcttattctatgactgtggcttaagccttcaacataaaagcaaactggttaatgagctatgttttcatattcccttatttatatttttttttcggataagagaaaagttgggtatcttacttggaaattatactgctggagatttgaagtgtgatcatcgactagatctgcaattggccaattctcttttaatcccaagcttgagtatcatatctagcggcttcacgatagataaatactttttaggagtctggaccgttcttttgagttagaagttgtgacgggtttttcattgccatttttttttttctcaggtctgttttgtaagtcatatattgctgtgaataattccctaaagcatgctgatattgtgcaggttgcattttcatgtattatttatccatgtttggtacttcaatacatggggcaagctgcatttctttccaaaaacttatcggcagcacctctgagcttttacgcttctattcctggtatgcatacaacccgcctaaactttctgagtaacagctctatttgaagaccatagatgttatcagatagttttttacatgattatcttttgatagtgttttcttattgcttgctctcttttcttttatgccaacgtacatacaagattgagagagaaaatcactgtcatggaaaaaaaacatatcagacatttgtctttgtttcattatgataattcccctaaaagcataattattttgtttacagaatgttcttgccatgtttgtagatcccttcttttggccaatttttggtgtggcaactctggctgggattgttgctagccaggcagttatctccaccacattaatgattatcaaagagtgtgacgcgtttggatgtttccctcgtatcaagattgttcataccaggagatggcttcctggtcaagtatacattccagagataaactggatcctcatggttctcagtctattagtcacactgggttttcgaaatacaaatcatataggaaatgcttatggtaagtttttctttccttgttaatctattttgtacatatttttgtttgttcctggactgagtgttgctgttgtaatttcaggcattgcatacatgacgatgacaatcgtgacaacgtgtttggcatcacttgtcattaaccttgcttggcaaaagtctgtggtgctttcacttttattcagtgtgctatttggatcagttgagatcatttacttctcgtcttcttgtatgagaatccctaaaggtggatgggtacctcttctgttctctgcaatattcttgttcattatgtacgtgtggtattatgggtcatggaagaaatattcacaagaccttcataacaagctctccatgaggtggatcctcacgctaggtcctagtctcgggatcattaaagttcctggaatcggtctcatctacacagaactagccacaggagtcccagcaacatttactcacttcttaaccaccttaccagctttttaccaagtcgttgtattcgtctgtattaaaactgttcctgtatctcatgtattccacaaagaaaggtttctcattggtcggattggtcccaaatcctacaggctgtaccgctgcatcattcgaaatggttataaagacatatgtaaaaatgaagaagagttcgaaagcgaactagtgatgagcatagcagagttcatccaaatggaggcagagggcactggggcagtggatggctcagtggatggtcgtatggcagttgtgcggacatctgaaaagttcggtacaagattagtggtatcaacaccgtcaagtcctggagtaagcaacagtatcaatcaaacatcggtgattttaagtggctacaagtcacctacactacagaaattgcaggctagttacgagcaagaatattcacctcagctcacctttaggagggggttacgattcgagttactaaatactaagtacaaggatcctcgtgtgaaagaagagctgttggaactcgttgaagccaagcgtgctggggtaacatacgttataggccactcgcatataaaagcacggtcaaattcatcgtttctacaccagtttgcgattaatatagcctactctttcctcagaaagaactgcagatcccctgctgtggccttaaatattcctcatatttgtctaattgaggtgggtatgaactactgtgtctagaactctattgcaaatggttactagtttctccacaatttcatggcagaccgaccgatttcacatagagattctctgtgctcaagctcaccaatcacaaacaatcacctccaggcttcaaggacacttctttattttgtgacatgaatctttgttttgtcatataactctcaaatttaggtgtgattccctcgcttggaaatgaagttttgacccttttttcttttctttctttgggtttgtttgtagaataataataaattaaaagttaattaaagtaccaattaagttgcaataccttaatttctgcatatgtgagtgtgaaaatgttgaatttattcccaatctcatacatacttgagttaaacaagagatctaatttaaaaacattaaaaaagggcatacaaaacaaaatatttgatcaacatatcaatttttagacataataattttacatgagaagggatatttacaacttggcaaactgaaatgacaattatgaaaggaatacacccaagtggtaatattctattccattctattctattctatatctataccaaccaaaaaaaaaaatctttttatttcatttgagtagaaatgcatccacttaatctgccctaaatcaagagctaaaatttaattaagaaaaagaaaatcaaatgagaaaagaggctcttaaaataagattggtgaaagaaagaacaaaaaagattcaatttttaagtttcaatcattacataattcaataatgaaacatataataaagctaaagttcatacatttatgtatgtgtaattatatattggaaaaaaatcaaaacccaattgcccaattacagaacaagtggaaaaacgatatatcctagaaaatccaaaaacctcatttttatttttcagaccacaccaacaacaactctcccagaaaatatcccattattttctttcttcccaaacagcttttacttgactcggccgtcaacccaagtgggaacgctttttctgagctgcttagttgatgtaaaagccaactcggaagctttaagaatcggttactgagtcactgactcggtcctaatcgagctccagtatgttgagttcttcttgctctcaggcccttctccgccgcccttttcttcctccctcaaccccaattactagggttcctaatcgacccagagatagatttccaattacccggagctttcggatctctgaaccccatttcagtcctctgaagaaggtaataatttaaggtttcattgttgctaaagctcaattttggtttaaacaaaattcttgtgaaaaataaaaataaaaatcaatactttatgctgttttattcataaccaaaagattaatatgattagagtgttgattatacaacttgtaggacttgattctcattttccaaagaaaggtagaaagaaatcgttagttcttatgtaaatttcactaaaaaaaaattgaatctttacttatcaggaatggaaaagaatttcatgttttagacaagaggattcttcatcagaaacccagaaatctgcatacattgaacacactactacgcctgaggaagtcattaaatctgagaccacccagaaatctgaatatattgaacactcttgtccaccttcaaatgcagtcagaagagattttccattaagtcttggagaggtaataaggcggttttatgttacaagtaatttctgttagtgtctttagccttttatttatatgtaatgagattttctgccatatgaatgctgatgaaattcaagttattagttcagactctcaaagcatttgctgttgtctcttcaattcttatcacttattttgatatctgataggaattttgatagaccccaacattagtatggtgaggttgagtatagcaaataagagagatgtgattaagtgtattgaggagagaagggtatgctatgtgttgagtaaaactctttgcatcaaaggggcctaagggctcccatagcttgtaattggttttctcgtatattcaatatcaacttccacattctactccattattcgactactgtttcactgatatttctgctatggcttaaagaatttggcagcagcgtcttatcaaagtttgaatgctactagcatcaacctaaattagagtctcgaatttaaacatattgattgagcttcttagcttaatatcttattgttgtaaactaagttaacactgtgcatttagtattagcttgtgttttgttatgctgtaatgtaaagacttgtaatgaatattgatcttattaatcatatgtaagtatgcattttcaataggtttccagaccattataaattgttcaattctttctgtataggagtaatgtgtattaaccagctcatggtgtgagtgatacattaattcattgattatgaagtgctagatataatagtactcttcttctatttttggaaatgtcagcaaaaacactagttcggagaagaaaattaatttgattatgcaacaaagttgtcgtcgatatggttattattaataattaaagaattttcattatgctaaattgctttcgctgactcgcttcattgcattttagcttgcaaatgtagttttcaaatcaatagagaagcgatggactgtaccgtggacagcagagaccataatgcaggcaagtactttccaccttaactatattttagaaatcattttgaaattccataaacaagttcttgctgctttcaaatcgaaaacttgagcttttagaataaattagaacaatttgtttcagtggtcataccacacagctaaaaaatcctagatttatgaaaacgatttgaatgttggtgcaggttatgcttctttgggttgctgcattctgttttataggatcttcggttgctccaatagcgacccatatggcaggtctcagtagggaatccctaacacttcgagggcaagcatttttcagtctcttaactgatgtaactgaagggcttgctggaatcatgattcttcatcgctgcttgtctcggtttcgtcccctcccaccagattggtttagatttagcttcaaaggaaactggtacatcgatgttgctttgggatgcctcatgtttccccttgtcaacgggctctcacatttcaatctcaaactcttgccactttttccatccacacccgtcactctatcaagcgttgaacagtcagtagtggcatgcgatcgagtagcaatggcactgtatgcaatagtagtctcagtttgcgctcctgtatgggaagagatcgtctttaggggctttcttctcccatctttgaccaagtacatgccagtgtggtgtgcaattctggtgagctcagtagtctttgccatggcacatttcaacgtacaaaagatgctcccgcttatctttctcggggttgtgatgggtgctgtcttcgctcgctcaagaaatctacttccatcaatgctcttgcatagcctttggaatagctttgtgtttctagacctaatgaagtaaagctgctgctactgctgaacatattacttgccttattttttcggtgatcgtcgagcccattttcgggtcagattcgtggcacaacctgcacagtatcccgagccttacgatctcctcataaacccggctgcaatctgatcggtaaacatcctaaggatgaagtatataacttactgaatgcattaaaattgatgaagaaactcagtatttcatcagaagaatcagttggcagtgttgatgttcatgtctttgataaattatataacatagcaagtgaaagggacagagatagagaaggatagaatagtttttgtaaatgattattttcatgttgatcttatcttttcaagccaccattattacaaagctcttgtagttgttgttccataagtccctcccccttgtttaattatttatttttcttttcaattaagattctcttatgaaaatagtacacaaaaacatagagattaacttaaaatgatcaataaaacaagagatgcatgacttgtgttgtgtttgccactgaaaaactgaataaataaaaataatattttgatgtttttgtaaaaaaaatttgtctaatggtatgttaaagtttgtgccaaatttgataggtgttaaaagttaggccgaattaggtacaagatataaatttaacatataattagatatagtgttaaatttaacatataattaatgcacttttttatttacatttattatttagtattaatgatttgttttaatacacttttataattataatattgctattatttttttaaaaaacatatttaatttattaattattattagtgactataatgtattagagtataattgtaaaaagtaaaatgctaaaaggtatcagaggtgcttactgtctagtactcttctcgttgttatattgttattggtacaattaaatatcggatctcacataatgtaatatgataacatttaaagaatatagttaattaatcgtaagacaccacctctaaaaatagtgtccaataactatgcttttgcaaaaaatttcaaatatagaatttatcaattttttataccaaatttaacacattttttttaccaagtgcattgaagatggtgaaagaaattgcattttgaccatgttgctaacaaaatttaaaggtatatacactttacatatggggtgtgactccatatgatagtacaataatgtgtaaaagagaaattatatatgttaagttgataaaataacaaaggagaagattgtgcaaagaaaagaaaaaataaagaaaaaaaatgtcagaagtgggatttgaacccacgccctctttcgaagaccagaacttgagtctggcgccttagaccactcggccatcctgacttgttgattatgagttcaataactttatatttacccaattttaaatcttagcttttttatatgatactatttacttctttttattagatatgttaattagattcattcattattatatttgcaatcattgtggcctaacagttatgtttttcaataatatatctaacatgcggaaattttatgaggttagagttaggtgagtgagttgggcagtgaattgatgaaatctttaatattgtaaagtgcggttaagtaagggtgttcataaaatagttgatcaaatttaatttgcaagattcaatctaattcaatctaataaaatttgcattgggtgttgattgacatgtaaaagtaaccgatctaatctaattcatacatatttataaaaaaattaaaaannnnnnnnnnnnnnnnnnnntttaatgtaaagaaaatagtaattaaaaattttaatacatataatacaattatattttcaaattttataaatcaaatgtatattctattttaatatatatatatattttttttctacatacaatttaaaataaaataacatttctttttacatgcatttttttttcctttgaatttgttatttgttattttaatatgttgttagagacataaaataactataatttattttattttgttgctagttataaaaaaaatcataaatattaaataatttaatattaaaaagtaacaaatttaaaataattgatccaatctgtacttttgcgaattggattggattggatttgaattattgtgcggattcgattggatccaaaaaaataaaatccgcacttagtgcagatcagatgtactatgagcaaaataatacaaattagattggacgaacacctctacggttaaatcacaaagaaagtattgaacatagcaactcataaaaatcatacaatcaacctagttactttcgttctaaattaaattgcatccaaaacaaccaaagcataatcaaatctcactttttcagaattttgatttgaattcataaatagtaattatagatggccaataaataatcacaaaattaaatcaaatagcatggaattgaaataagagaagaacaaaaaaattgaataactacattaatccataaaaaaaaaaaaattagtgattcacataacaattctaagaagaaaattagttcataattatcattctaaacataaaaaaaatttaagataaacattgagattgataaagagaagaaaataattcttcaaaactagtagaaaagtccaatggtggttcaatgatttcccaaaatcgttctcccattttctctctctctctctcnnnnnnaaaaaaaaaaaaaagttttttaaacctatttttctaaactaaagaaggtaggtcgcgacttgcctttcccatgtcacgatttgtgacttttttacttttcagaatcatcgtttaacatgatttcctaccgcgatgatagattatattttggtcataactatcttgatacatctcagaattacacgattcaagatattttgaaaagatgataaagaaagatctataacttttattcaaaaagtttttcttgaaagtgaacgaatcataatcaaaaattggtttgaattttcagacttgatttttgatcacaaacgagagtgttgagcatccaaaactttaaatttttcaccaattgtatcttacaactctaaaatccatgctagatctatcaaattcatcttatttagaatcactctcgacaaaggaacaaagtgaagtcaagctacaagcaccatttcagagcaatagatagggccaagacattagcttctttaggatataaactagcaagcataggtcttacaaaacaatcccaaaggcaaaattgttagaatcacaaagaataccaataatctcattatcactattcatagcaccatccccatttagctttaacaaactattagaatgagttattcaatgaacaactatgggctgaagagggatctttgtagcttgagggtgtgattttgggctttaaactaactatcataatactaacttgtccatctttgaacaaggtgtcatgttttgttttatttctttctccctagatacaccaaatgagagtgataaacaagtaaaattggtgtgtagacaaagacaatattccagggcaaacttattagtttaactagttttcaaaattctcaaagcttccaaacttagattgaaagagggcaaaggaataagaggcatgtatcaaatcatcatagtgtgagccacaacaaaagcaacatttcagaaaattgaaacatgttgagataatagcacaataccaatgagaaagatattttgatcatatatactcgccaagcgaaaatctttactttccttagaattttcagagaccacaaagcatatatactactatttagtagaggaattgaaaaagacgagtttagattaaaaagattagacactacttaagtatatcctcttttaactgaatagactccactttttaattgattataatttacttatttatttattttttagctagttttaaatactatggataaaaatataatatcaaaaatatatagtgtcgaaaagtagttttgccttttttaccaaatttaatattatgtttggcaaatacattgaacatggtctaataagtaactaataatgtaacaaattttcaactgcagatctttacaaaccctataaacattagatatatcattatataatgcagtacccttgtaatcataatctcttatcttacaatatttaaataaattaaaaagcatatcaaactcctttccccttacaattcttattatatatatatatgtacttttttaagaaaccaacaaaaccactacatttatattgtacggacaaattattttttgtaatttaatggattcatatacttggattgaaagagaaataatcttaataaatgattaatgtccattattaatatataatgagttaataatggctagggtttgcttgtttgttaaaggacagctagcccaagttgcattttgtgcagagaatccctatatatggatttttggtggtttaatgtagattatgacgagtgataaattaataagtgaatgtaaatttatttaaatataatccccatgctattataagtcctagttgctcaaaatgttgccaacttgggtattccctcctatccatgtatgtcacatgcaactcatatttaatcaaaagttaataattaatatttgatcttttgtgttaattaaaataatcagggctcatttgatagttgatacatcctggtgcattatattgtgtaggattgtgttgtatagtattagtttatttaatataattctatatttgtttggtattgatttgcattaagagattgcgtaaaattatactatctttaccataaacttgaccccaatcccgaccccagccttgggacccagatcccatctccagccctaggccacaaaccccgaccgtggacc

SEQ ID NO: 14334 - DNA, 7247 bp, Cannabis sativa
tatatatgagctaggatattgatataattaatatttttaaggtgtgtgtgtggattaaatgaattaagatgatgatgatatgaagttgacattttcaaaaattaaatattgttttgagtagctagctcgctctaggagacacatgtgggtaagttaagagatcatatgggtgatccctgtgtctgcgctattaattgtatatatatatatatatatatatatgatacaataccatattagcattaccagctgcttatatataccggtatatatataatgcctgcatgttacgcttatcctacctttatttatttttccatgtattattaattaatttatatataaaattgaataatatacacggatgtatataccgttattacagttgaagtagaaatgaatatatatagattaacataataacatggcgatcattatttggtacgttcgtacgtagccttggaattcggcaaccatggcggctgcaactcctccgccttttctccacgttgtattatcacgtgacgtacgttctaattattcaatatatccttaattaatttcatcctaattaacatataataataacaataataatcatcacacaaataacaacttatcatgatcacatggggctgccctgcttcactacttttagtacttatcatcatcatcacatgcatttcaagtaccgtacatatcataatacccacatttcacaataataatgcatacatacaatacaatacatcacgctatataggcctagctatagctaatattatatattctacctaatgatacttttcatattatatatatcatccatgtcatgacatgatcatctattcatctcgatcgctccacatatctttaattaataattaagttaattattaacaacaaagcaaaaccaaaccaaattaaccaaccacatgtatattattcccaactcaattaataatctcactgattatttacgatacatacatatatacatacatactccaatatataattcatatattattatatatactcaaattcaactgtataaataccacatctacatactacgtacctagctagaagagtgtctggtacatatatatatacatactcacaatctacatatatatagcaaaataaatattattatattaatttgtaatcgttctaggttgatcatctgaacatataatgatgaatatggagaataagcttaataataataataagaagaaagtaagtgttggtgtttgggtatggacggttgtgatgttaatgatgatgagagtgggaatagttaatgcagtaggaggcagtaatattaataagaataaggtggtagtgaacgtggttggttacggtgcaaaaggtgatggaaagacagattcaagcaagggatttgtcaaggcatggagcgcagtgtgtggatcaaagaaggcagccaccatgtacatccccaagggaaggtacttgctaaatcctatagtcttcaggggcccatgcagaaaccgagtcactctccacatagatggcacccttctggctccctccaactactgggctatgggaaattcaggctactggatactcttcatcaaaatcaacagactttccgtccttgggggcaccatagacgccaagggcgctgccttttgggcttgcaggaaatctggcaacaaatgccctgtcggagccagggtacgtacctttaacttttttaatatttttccatataaaataatatggttatcacatatatatatagcaatgagaaatgctaacttcacttaattgtggaatgtcgtgtgtttgccaaagaaaaccatctccaatgcatggtacagattttatatagcaaatttagctcaaaaaagggctctaaactttactattgtgtttcaatgcacaaggcaaattaacctctaagagaattgtgaaggattcctaagtaactaaccaatatattattattgtgtactgcatgtctttgtaagtatgaacagagtatgagaacgaatatataattgaaggtcaatgaatatgtttttcagttttgtggttgagttgaaaataactgttttattaagtaagacaattttgatatataatgcagtcaatgactttcaactgggtgaacaatggtgtgatcagcggcttaacatcaatcaacagtcaacaaactcatttggtaataaacagttgcaccaacgtgttagtcaagaatgttaggctgagagcgcctgaccagagtcccaacacagatggcatccacgtccagggctccaccggtgtcaccatcaccggagccacattacgcacgggagacgactgcatctccatcgggcctgccaccaagaatttgcacatgaccaacatcaactgtggaccggggcatggggtcagcattggcagcctaggcaaggaccagaacgaaggaggggttcaaaatgtcaccctcacaaacgccgtcttcaccggttcagacaacggtgtcagaatcaagtcttgggcaagacccaccaatggttttgtcaccaacattgttttccagaatctgatcatgaatggagttaagaacccaatcatcatagaccagaactactgccccagcaacaagggttgtccacggcagagctctggagtgaagatcacccaagtcacctacaaaaacataagaggaacttctgccaccaaagaggctgtgaaattcgattgcagcggtagcaacccctgcagaggaatcagattgcacaacatcaatctcacttatcgagtcaacaaaaatgtgattgcctctgccatttcctcctgcaagaacatcgctggaactaccacgggagtcctcattccccgcccatgcatcccaagatgatcatcatcatcatcataatggtcatgatcgtgatgatatagcagctcatattcctcatatatattaattggtgggggtactgtagtttggttgtgtactatgtaattcacacacttattagagtacttacttaatagtacaatttaatttactagccttttgtatttatataaaatagaatgcaatcgatcgagctagtttacaactatttacctgccttaatttgcttctatatataacatttggaagctagtttagtggatttgggaaaagccatatattgctcctcctcctaaatcctgatgatgatgtacacctactcatgattaatcagtttctgattgtatatgtaaataaatgtaatgtagtatgtgaatgtaatgcttgttgggtttaaaagttcttgtattaattaatgaactgatgaccataaggattcctttaatgcatctaagtacgtacgtaattgaaaacaaaaaaaaaatgttaaaatcacttaagtcttcttaagtgtccaatttctctcttacaactcgcattagtgatgttgtgtgaagaaaaggtaacactctgtacatcaaagtgaaaaataaatgaagaaaatgcctaagaaataaatatgtagtagtaagtaaagtgggtatgggcatatatgtatatgcatctacaactgcttcaaattgtcagtcctgggtggatctgccttgtatgatgatgatgatgatgatttgtcatgatgagtagtagtagtatcagaagtttggcgagaatctgtgatttggaaggaagtctttttggaggtggtggatagttttgagtcaaggcgtagtgtcttattggaagagaaacaatggcgcacacatattcggtgagtgtttattccagtggaacaactgccttggacattcactgccaaaataacttgcttgtctcgtgtgtcctctgaccaccaattctgtggaatgccctctacaaactcttccacgctgtgaacctcttcatgcctgattgatacttcaaccacttgctcgcctttgatcatccctgctgccggtgacacctttcatcataacaacagaaacacattcatcatcaaactcatgaattcattatattgattggattcattaataaaatacctccagccatcttggaaagccgaaggaccctcttggttgataccccgcaactgcaccctcctcagcttcttcttgttctacttcttgaccctccttgatagtgctctgtccttcacaaacaattctaaatatggctatgtcgttggaactattgttggagatctgtagattgaaagtgtcctgattctggaggactatactgttagtgctcacacttgtatctggaacataacataactcttggagcatcgactggatcttctcgttggatttgtaaattgttccaaactcctttctcctctctgatctgtcaacatgggagatttgaacgttgaatttacaccgtacaggcttgtgatcgctatcagtcacatccatgcatgcctcgtacctgttaatcaacaacacacttattaactcttgatttaaggccctcatattgatttaaggcccttataataaaatgacatactgcaaaactgatgccacaacaggacactctagaccacactcaaacactggagccggtctgctgtcgcgatatattattctgtcacaccatgcaggaattcgttttttctcgccagaatcatatcctggaattaagtagaaagaagaacaagggaattatcaaattgaaagccaattgtgttcataactaagtcaattaattactctttttatcttctttacctgacaaaccagcttggtgcctttcaaacttgtaagtgggagggaattttatgagtgcctcacgcatcccttgaaaaactttaccagctttcatctctgccctcagctgatccttttctctgagccaatcaaagcatctctgagaaacgaagtccctcgcttcatcgtaagatatgccaaaaagcctgtaattgaaatcacccaagaacacaaccatatctgcctctgctagttcaggccttgcttcttcagagtttccacccatagcctatatacacatcaccaattaataacacaataatacatatatgcttgtacaaattcaaaagagtaaatccaaagtccttacatttgttccacgcatcatatgagaaccagttgagactccagctgcaagacagagtagccatgggaagccagaagaataaaggagccatgataaatatgtggacaaggcaacacagaaacacaaaattaggagcttcaccataccagctgaattattaaggaaatatgatgatctgttgaacaccatgttgcgataaatgtgatcgaaatcagcattccggcgattcacagcttccaaatgtgcagccaggtgacagttcacaaaacacattatcctgtcgtaaactctgatcttcaaaccaacacctccctacttggacattaatttttaagtcagctcaactcaatctataaatgcatatgaatttggaaacagaacacaatgattttttttttattattatcctaattctaatggataaggacgattgtacaaacagaccttattaccaatagcacgaccaaacccacatggaactgctccagcgtcaatatccccaacatgcgttctaagattctttcttaccctgtaaacaacaactgtcatctctttatccctctttttctttttttacatagaatgaaaatttcaacatacaaatataaaaaaatgataatccaaattattaaatcagtgtcactgacgactaaccatagagatatgagcaagcctgccagttgcctagatcccatgcgctcaaacgtttttccttcatccaatgccttgcctatgttgtccagccaccattgtccaacagaacttccttcaagccctacctacacagccacaggtgaaggaaaggaaagttgagttgagttgagtcaactcggtaattctatagaaaaagaaggaatgggatattataattaatttacagtttctttcgcggcagacattgcaagaaagccagcccccatctcaacttcttgcaatccaattacaacaataccaacatctgggacagcagagcccaaccatgacataagtgcatcatgagaggctcttccttgaccaacattccatgtcccaaccaaaagtctaacattgtctcttctggtatatatcttttcttttgcagccaattctgaacgcaagatattgtcgataggccctggagatgtaatgttccaaccgcgaatgccaccatgagtagccaggctaaaaacatggccatttccaacagccaatttgattacaggactgctgtgagcaacccaccctgcaatcagatttccttctaaatccaacacctgaatgatgccactgacataccctacatatagtctcgttccgaaagtgcaaaagcattgcacagcacacgggtgatggctgaaatcttgcacacggtttccattgccgtcccactgcaccaacaatccatttgtacatccactccatatcatgccatccgcggttatcactagagcttctgttctcttggtatcttctacaaatgcccctgcacctctcgttgccactctccgaaccacatctgcagctcccataatagcattacgcgaccgttgtagaaagcccccagatttttcctttttcgatggattcacaaattttactttcatctcatcttctacagctgtctgttcttgctggactgatgaaatgtcaactctattctcgatctgcccttctatgttaaaaactttcacaagctcccttgaacgcgcatccctgttgaaaaagacaccatcttttggaacattagatgatgcactttattaaaactagattctctcatatacaaaattagtaaaaaagttagtataataaaatagagaggagctttgtcatctgattctcgtaccacaatgagaatgagagagatccagcacaccagattttggctctagtcttatcatataacaaacacttgacgtcttgagaagataagctacaaacaccattgactgtgacctgacttctaaggtccacgaatgacctctccaccaacaaagcagccatgtatctttcttctggtttcaatgaaagagatttttctatagattcccatggccacatcctaatgacaccaccttcagaacccgaccacagatcacctggatgtattatataaatcatccatcaataatcaaacgcatacaatatatatatatatgtgaaaagaaaagagatgaattatagacatatatatatataataccatgaa

SEQ ID NO: 14335 - DNA, 4901 bp, Cannabis sativa
gctcctaagtgttggactgcaatgtaagaaaaagaaaaagtgaagttgttagcaagggagtgaatgtacataactgagaaaacttctggtaaggtccacaaaatttacctgctcactactaaggttgcagaatctctcattgttacgaatcgtttcttgacaaccataagtgtcttggtcagacaagctgaatccttgtcactcttaggagctggtttcaccgtctcagtcaaaaacagttgcatataaaccggacaaaagatcaacagagttattgaaacctgaatcaagaaagcttaagttaagaggtctaagattaaagaggagagaaataagatagaattggctgaaaccaaagcaagtaataggttcttaccaaaaaaatgtatccctctggaaggaaacgtgccagaaaatttcccaaaacatgcgatgcagaaaagagacctgtgatccaactaaagactgcagctctcttaccatcactaacaacgtctgcctaatgggcgaaaaaaggcaatgtcaaatttcaacatttgctgttattaaagtttttgccaatcgataaggaagttacttactgtataagcaacagcaatgcagaaaatactcccttgactgatgatgtatgaaatcgttcgaagcacatagtaagcatacacaaattccttagattgattccaagcaagcaatgctgcaagagatatttaacaaaaccatatttaaaatataattaatcatagaaagaagaaaaaagcataatgtaattcgaataaacagccttttgaaataagatgatgcctatggctcgtgaacaaacaatcacaaattacactcatagaaatttcttaatatcttcatagtgttatgttataatccagaataaacataccaaatggaattatggttgttgacactgttagaatgagcaatggtttacgtccatgctcatcagcaagctgaccaagaagtggaagcaccaccatcttgaaaattccaacaatctacaaacaacataatttttccatgagcatcaattttgctctctgaggtaataaatatgaattcaaacatttttttatctaaaaatgagatatgcaaaacctcagcttatcattacaattaaatttccttttatttctggtagaagttacatactgatccccatgtgactatctagagcaaccatagttcaaaattgtttaaacccagagttcttagtatttagtatttacctggctaatttactggtcttcctttactagattattgcagtaccataattaataaattattatatttacatcagcccaaactaaatctcactgggtcaattcaatcctttcataattattataacaggaacaaatgttgaacaaaatattaattattcagaaactaacaaactcaattatttgttaattttgatatttccagaaggctcctaaaatacaaatattatcaacaaacaacgggcatctcctaaaatacaaatacatcaacaattacacaattaaagctttaaaaattcaacctttgaatgatgaaattaaattcagattttgcaaaaaggacaaatgaaataatatcactccaaaacaaaagttgtttttattttatcaacaactaatgactgtgatagttaattattaaaaagaagaaaaatatatatctctttatcttctagttggattgaaagttatcaatacatatattcaaattcaacggagtaaagaaacaccaataatgtttccatagataaacaattaaagaaatgcatgattgtcagtgattcacacgcaacatacagcgtgtttcgtgagaaaattcaagaaaaaaacaaaagcccatgtgaaaattttcaaacatattaatttggtattgaaactttcatgactttctttcccaaattttcccaccatccaaacagaaaagaatacagagagagagagagaaggaccaacatagagaaagaaaaaaagaacgaacaaatgaagtgatcaatttcataccgtttgttgaataccgttgatgtaaatggcttgagaacaagtagaatggtcaggacaaagagccccagtagtaacatccacaagtactgacacagtcatttcctcagcaatccaatgaacacaaagtggcaacaacagatgaatcagaggccgaagctctctgaaatcactcttccaagtcatatctcttgactaactggatttttggatcaaacgacaatacaaaattacaaatcctatctaccttattgtcgtttctcaaatcaaaagccaagattttgtgatccactacaaagatgatatgtaagaaagaaaaaaaaaactagaaggggtaaaatagagaagggagggaagaaaggaaagataggagtattgtaagttacatatatgtatgtatgtatatatatggacaaatctgtgtaattgagtaatatatatttatggggaaagtaaaaaagcgggagtctcctgtggtgttcgagttgtggaaatgggaatacacgtggtggcgcttggtaatcgtgtgggattgagttaaaggcttgtgtctttgtccaacctgtcaaaaccaaactcactgtgtttccccattttgtttcgagtttgagacttcgtttgtttatacataaatggttttttataagcccagaataaaatcaggatagcacaaatactcacagaggacaaagtccttaataataatggttaaagttatggttctacagttttatttctggtttgttttcttctttataaaaatcatgttgtctacatttggtgtaactaacaacgactgagctaggggacatggtcccctaattatatatttttgtaaagaaaaaaattacatttgttttttttatgcttggttatattttttgtttttaaattttttaattacaaaaataaaaaaaatatatatatatatttttaaaattttgttttttatgttctataaccaatgtgtaatttttatttttatttttatttattgattttatttaaggcaggttcggggtgcaagtctggctttaggtccgagtttgggttagggtcaggatttgtggtccgaatcaaggatagggtcgggatccagggtttgggtatgggacttaggtctagtgtttggggtccaggtctagagcagagcggggtccgaggtccttgcaagtgtctgggttggggattagagtttgggtccagattctaatatctagcttagggttggagtccaaaatattaatataaaaaaatgtttaaaaaaaatttaaaagttttttttgtttctaaaatttctaaaattttaatttaaaaaataaaaacagttttataaaatgtgattttggaaaatattttttatttttgtaattttaaaaacaaaaaaaaataattaaaaaaaatgttaccaaatgcattatatattagtataatttttattatatgaaaaaatatattaagacaaattgtaacaattatttgatgtccaactctaacatcataattaattaattattggtttatttcctaactttttcatgcttatttatatatttggctaattataattttatttagcaaatttgtattaaaaaatgaataattaaaattgttaaagtcaaaaaatttcatctaattttattcaattttattaacgaacgcttaatatgacaattgtctagttatgtaccaaattgagccacgatcttccatttttattagacgtctgttattaaattgaacagaattagaataaaatttttaaatccaacaattttaataattttgaaaaaaaatttatgatctgaaagtttgagaatacagtttagtacatgtcaaagttaaaaaaaaaatcttaactaacctatatttttttaaaatatatattatttggataatacaaagaatgaataacacatattttatgatggttacttttagcattatattaaaaaaattatcaaaataaggtagattttgaccatattttataatgataatttttaatatgagaaattgtctatatcgaaaaaaatatagacatgctattcattgatagtaaatgttgtctttaaaatcattcgggtgaatagttaggtgagtgaggcataaaattactaagatcatagataaaggtacgaggctagatattttatagcacatttattaagccattgacaatggggaaggtaagccattaatggtgtcaataaaagataaagccataaggtttaatgtgaatggtgacttgccacgtttccataacttggtgttgttgttaattgcctttaaatgctgtcatgatctgtttttatggttgattttagctcttatgacttttatttttaggttttctatcactatcttctgttataccttaaacttaaacatacatttacatttaatccaatttgcaaatcagagtaaaataatccaaagccacatgtcattcgatttcaaaattcatcatttcattttcatttataacttccttatgaatggaggaaaaaaaaactgatgtgtcaacgttaggcgatgactcaccaaaagttcaaatttatccttaaaaaggaaaaaaaatatatatatatatatatatatatgatttactgaggtgtcagctgagtagttgttgtacactaatatattatggttggattttcaaccaattattatacctgttctaaaggaattttagtaatgtgtacgatctgaaaattttgcttttttgttataatgcatcccttctaacctatttagacagatttttcacatgcctccataacaccataaaatatgtctgtgactctcgtaattgtttattgtagtactagttagtggagaccagataagagtcatcagaccacatgaaatgtgaaaaacattctaatt

SEQ ID NO: 14336 - DNA, 4663 bp, Cannabis sativa
gataaaaattgaaactaatagaagacaagtatgaagaaccacacaatttgaaaaaaaatcctttaatacctgagcccttaattttctaatttgaccctcttgagcagcctgctttttggaaagctcttcacctgtacaatattaacatatacaaaataaagttggctggttttattgaattaagctgacataccagacatgatataacaaaaccatatcaaaactagttcacctaccttcagccataacctgtgtaataatttcatccttttccttgagaagagcagctgcatcactttttctattttgttctcttcgaagagtatccctttccttagtaagagcatatacctgaaatcatgcataataaacagaaaaatcaaacatttaacccataacagagaaaattacttaagatgtgcttctccatgagtttaaattaaaataacataaaaacagagtacccatctaatggatggagcattagcacccaactggagctcgtgttcaatcagcatttttcatataaatccttctaaatggcaaccaggaacttatcaatcactggccattaatacttgcaattaagataagggtaaacatagcatgatacaccacagtagagtcaatgacacaaatgagggaatctgagagtgatttttagctaaatttccaggaaattcaagagacctgtttgtcccctagaggtattgctcaatacatattagaatttgcataccctaatcttacactcacattaaatttatttacataaactttcaaaagaaaacagaatctaggaattcctaagacaatgtgcttgatcccaaaataattaaatgtccacaattatccaatgtcaaaatctgctcatcaattatgatgtcctacgcataggcctgatgaattggcggtctaacatagcaattgtgaacatattgatgtaactcattacttatttggaacaaagttcatcttgaactgtaactgttttcatcacataaatttcaatgggaaagatcattaactacatgtttacttgcaatctagatggcatggcctgtggagaaaattctccattctagagtattaactgtttactgtgtcgtcttacatgttaaacactcagaagtgaaactaacatacaaacaagagtaacaaaacacatataccttcctttcaagagctgcaaccctctgatggtattcttctctcaaagtctcaacttctgcatcacttggtttcctctgatggatgcatcagtttcagaagttagaaattgaacatctaaaaaatgtctctggcactaatgtgaaatgaagtaaacgaacacagataaatatattctacacaccttcaactcctcaatcacaacttttaattgttcattttcgttcattaacttggcaatctcgtcagcctttgactggaaagttcagatagatatgaagttcagaactgtagaatgcaattcaagaaaagcatagaacatatcaaaagaacacaagaaagattgtacaatatcatctgaagacacacctgagcctgtcttgccgcaccttgcaatgcagtttccatcattttcatatcctttttcactctctcaagttcaaaagcaagatctgttcctgacattaaatgttgttctctgatgtccttctgtttctcatcaacatgctgatctgaaccagctgttttaacaaatgtgctattctcatttgaaatcacctccaaaactgtctgagaagcctcatgtgaatgaggtggtgtacttggaagatcatcattagaagatttttcagcactgtcactttcctcagcagcagagggctctgcctctcttgtaactcttgtacttgtatctcccaactccccagtttggactcgagataaaatctctacgctctcctcaccttgtgacatatgttcatcagagatccctaattgcatgttactttcatcagtgctctggctctctacttctgctttctgttcatgcattttcacattctcagtagttaaatcatgtgattcatctggcacgaaagcagtgccctcaccttgatcaacttccacttcagttactcctgaattctcttgcgctaaatcaaaactacccgagtttccatctcctgaaatctccctcttttccagactttcaacagaatctgacagctccagattctcaacagcaggttcagacaccactggtgatatagtttcaggtttttcaggacttgacagaacaacatttgtttcgtcttgcatttctgaatgttcatcatgtttttctgttgttaaattctcactgtcttcctcggcagtggcagttcgttcgctagcagaatgtgatgaaatgcccacccgttccccttcatgttcctctgatgtagatggatgttctggatattcatgctctcctaatggtttatcaccttcaggtgattcaggagtttcaggtttttctgatgattcagaactaccttcctcacttttttgccccataaaggccataacagtggatgaattccatagcccagatgctgacagacatataagaagaaatcaatcaatccaaaaaagttcattttcttcacatataatataacacaacaacaactgaaaacataacttctaagggaaaatggggtaatgaaacagtagtacaagggtttttcctaatgaggatagaataatatagtcaattcgtaggaaaataatccctggtttaaaaaatgtactctagccactattgaaactcataacacagaagtagtaccttcattgctggaatcagccttctctttatctttctcatcgaaaccaagagcgctatcaaaattcttctcgatattcttaacgctctcttggatcttattcaccgcgccagcgatatcagcgaaattacccaaagaaaccttcccactaaaccacgccatcttctggctatataatcaaatcagattaacaattcgaaaacaccatcaataactctctacacattcacatccgcaaagatttctcacaaaaagaaagaatgggatcaaggctatcaaattaagattgctgcgacgtagatccgaatcgtaatcggtagaatccaaaaaccctttcttattataattttccggtaaattgagatttatacaagaaattaacaaaaaaagagtaagaaccaacctggtgtggggtggtcagaattgagttgagttgccgtgaatgtgaatgtgaatgtgaatcaaatcaacgagttttgtgcttcattgagcttactactgggattatcttgtccttcggaattcctccttttcgaagagaaaatatatgaaaagcggaaaagggacaccgcgtgtggtgtggttctttgatgaaatagacggaggatcgatctgatattactgtatagctactaagattatttaattaattaattaattaattttgtgttaaaacaataaaataatggttatttaagatatttgcctccatgacatatgtattattatgctttgattttttttaggttgttatcttgagctatttacagtattataaattgattattcggttaaattttgtgcaaacaaaataatgacatattgttacatcagcaccacgtgtttaatttaacaaacaaataaaaattatacattttaaaaaatttattaaactaaaaatcaattaataattataaaattacgtaaaattaaatttaaaataattaaattatttttttaaaattaattacacacatgtcggcgttgacatggcaacttattaagcaaccatgttatcgttttgtttgccatgcgtgataaaacttgaccgaatgattgatttataataccatgaataatttagggaccattttcaggtagcacaataatacatatatcataattcaaggataaaaatcctaaatagcctaaaataataaattaattattattttttatgtaaattaattaattattgttttcatgccgatggatggttgtgttgtgtccaattttttttacatttattgattatttagccgatcagagttgcatagaattgtatcgttttttctttttaagggattatcatgaagtcgatctagtacatatccataattagaacaattttaacttacaatcctattggagtaggtcgaatattagtgtggtgatagtgtctgccttgaattttcagagttagtttgttgatgtgttatggcaagagactataagtgtgcgtaaggagctagctatggtggctcgcgcgatttgaaaggttggaaatgatataacttagaaagacaatttagttagattgatgcttaatcaatgacaaagtactcacttaaaaaaaatgggatcattatttatgcctgatagtctgaatagtgtcttagaacattgagttaaatgatatttgaattcaattaagataaatgttgatgaacaatctttgactcataaggtcttttcggggtaggtagggggtacctcgggatggtaatggtcgcgagaaaactttttctattagtcaggactcgggttggtcgtgttcaacctgcaatggcgtaagtggttggaattaatgaggttttgagtttgattaagtgtaagaattggcaattttattattgaaactgattgtttaatcattgttcaaacaa

SEQ ID NO: 14337 - DNA, 8059 bp, Cannabis sativa
  modified_base (7108)..(7108): a, c, t, g, unknown or other
  modified_base (7222)..(7233): a, c, t, g, unknown or other
aaatcgaccgccaaattcggtgatgacgtggaaccgaaaattcggttacggtctggtcggtttgatggtcggtttcggtttttcggtttttatgaacacccctaacgtaagggacaaagtccatgatttggtgggctcatgcgtcagagagatgccacgtaggatgctttctggatgtctcttggcacctcttcatctatcctttctaaattacctcatgagggtatccgtatatacgccctgatggatctttcatcttttgggaaaaaactgttttttccagactaaagtggtccgactttatagtgtctataagttgggcttgcatttggattcagaaaagtagttcaattttgctgttggtttgtttattaacttgattggacctgagaatggactcgtcttagctaattttaggtattgaaaatacacgtgttacaaagtgttttaatttagagttcacacattggaaaaaatgaatgtatattatatacatgtttaaaaaatttatttgaattaaattatttatttttattaatgtggattaaataggtgaaaaataagatgatataatcttatgagttgaatgttgagagtaatgattggtcatttgttcaaagaacattttttaaggaaagtatcttaattagtcaaagccatctataataaaataacaattaacaactcacaatggaaaatgacttttttacttctttcttattaggcagctatagctagtagaatcatggtgaccaatcttgtatcaaaacacttaaacatgttgtcgtctaattaagctaaattttctaatccattaatgctataattaagataatattttaattaatcattttaaaaataaactataatttattggtaatatatttacttatgacaatatataccttttatgttttttcaaagcattatgcaaaatctctaatttgtgtttgccgaggctatttttgacattaatccattgtattttaatttaattaaaaacacttcctagaagttctatatttaacacttgcaaagaaaaaatgaattaatgtgtcaaaatcgtagttattattctagttgaaaagcaaacctccaacttatgaatatatttatgcctgatgttttcatgaaaaaacatgccaaaggtaattaaacaacaacttttgatataaataaataaatatataatatatttaaatttgtttgataatttaaaaggaaagtactagaaatttccctacaatttctttattattattattattttaaaggaaaatcaatcttgatttaacttccaaattcagccaccaactaatgaagtaaattaattggggcatcccccaaattaaacttatgatcatgatataaaatggaactttaacgaattcatgagcaaccaaccacgactgtttacaaaacaaaatgacatatatctcaaatcaacaagcatcgacttacattcttgaattacaataccaaacaaagataccattgcaccactgttaaataatcgatctataccaaggtcttgtctgttgacttttcagcgaactcaacacttcttcaactcacatggctttagctaagcccacttccactatgcgtaaaaagtttggtacacccttctactaataagtcatgtgaatctcgggcaataattcccaaaccatatctcatatcttcttaaaacaaaatcgcatctacattaactttaatattatttgcttgttgtaaaattcaatgctcttctccattactcatatgtaaatcaaaccatgaagactctatttgagagttttgagcgttccttcgtatattaatcaagataactttagttatgagcgtcccacaattcccacaatttagttttttttttttttttttttttttttttgtgatgatatcgaagagctactaaaacattgtctatagtgtttatgttttcactaaatctttgttttttatttttaatttatctaatattttttctagtagcaaaaatacctaaaatttcaaaatattgcattcacatgcaaccaaataatttttaaaattttaatgaacatttataaaaaataattaaaaaaaatatagaaaaatataataaaatcacctaaactaattcaaaaaaaaaaaaaatcacttaaaaatattcaaaaaggctaagttattaaagggttggatactttgggagaggtttcatgtttttatgaattgcttgtggattgtcgggatgttctttcaaagctggatatggaagaatttcttgtgttatgttggagaatttagtattatcgcaacacttttgttcatgacaataagttattatccgatgagtttgttagtcaatgggttttgagtttctttggcgttatcaagatgttcaatctaatttggctctggctagtcatgtgaagccaagggagactgtggttaggctctctagtgattccactgagactttgaggttatgtgattttaatctatttgtggatgttggtatcaatgaggatcacgattgtatgggtcttggggcggtggtgatagaccgtgacagggtggttttgtgttcttcgagtgattcaatggcagcctcctttcatcctcatgtggcggaggcaacactctctaaaatatgggtattgctattgtgtcgtcgtttgggggtacaactccattattgttttattagtctttgtcttgtccaaactattaataacaagaataaatatcaaattgaatttcgtattattgttcatgatattttacatgtttggtcttctttctcttttatttcttttattcattgtaaaaggactcaaaatgttacgattcattctcttacacgtttggctttatgcattgactcttctcgagtttggtggcttggtttgcctcattgcctctaatcctaggctattttgtagtaagtttttatttttggattttttgcttttaaatagaactctccttccgttaaaaaaaaaatcatagaaatattttattaaattaaaatatatatttttttactaaaaaacgttaaaagaaaattgaataggctaaaatactattcaaagaaaaagatatattaaaatatgttcatacaataaaaagatattcacttaatagttatatataatattaagactatggtttaattttatggttaatttagcactataatagctattgtatatattttcctacaattttagtgattttatacgttaaaatatatttttaagttttttaaaattatttaggtagtaatggaataaagtttacaacctaaaagttttaatatgcttataacgttttaaaattacaaaaatatattttttcagtaaaaagtaagaaaacaattaaaaataacgagaaaccaatctcacgatataattataaataaattataaaacaatcaaacgaattagaaatacaacttcgtgacaactataatacaactataaataaattaaaaacaactaaaaaaacagtttattatttttgctgaagaagttttttgtaaataaaaaaattcaatgcgtcaaaatgaaaaaacaaaaaaaaaaaatcatgttgacatatttttgtaattttttcaatttttttttttgtctattatgtaaatttttcttatttatttagtactattatcatttagaacaataaaaataaattaccaactttattttttctctaaaaataaataaataatttacaagaatattatattttataataaaataataagtctttatatatattgcctttcaaacaaaaatctttatatatacattgttttgagttacataggatatgcgggggttcaggtacccacccttaatgggacaagggtaggggttgactttcgggagcggggatgggtataggtttaaatattcatacccaaatcaataatagtgtgggggcgagggaatagatactcgccctgatatgatatatatatatatatatttaagttttgaaatattaactactacaattaaaataacttcatgatttaggttttttattgattataataatgagaaattttagttttcataaaaatgcctacggtgatgcatattaataatcacacttaactgctttaaaaaaatgacacttaactatttattttcgattaccaattttgtatttactaacttcatttactatacacactattccacttatgtttatttttatactaagttttcatgattgtttttttttttttaaattctctttgagacattattttttaaaaatatatatttgtaatgggtacttgatgggaatcatcccctgtcgggtaattcccgcctcgttcccgctttaatttgaatgggtattggagcaggtatggagtgaatttaggaagtgggtatggaggtagggaagtaatccccgtacccgtcccgccccgtttacattcctaattcgatcccataaatccccacctcccttccccatacgcactttcaatatcttttatgaccacttgagctagtataaatattaactaaattaggtcggttattttaattcagttattttttaatattaaattatctagtaatttaataaaatatatttttctacacatttcctaaatattggttaagggtagtttaccttggagttgggaggagagggaaataagggccttgtcttactcttattggagattgagtgtgtgtaggatttcattcaaatatgttggcctgcctttttcaatgtttctataagttatgatgttgaactttgaactctctctctccctctctccctctaaaaatgaatgttacacacaacaatctaccttttcttactcaaattgtttggtccatttctttttctttatcggcacaaataattaaaatataaatataaataaccaatttaatcctcacacctgtaactttataaatgtagctatatcatgatatatgtttagttatttgttttctttctatttatttatataattatgacgtacggcactccttttttcattcttcttgttcattatttagtatgttgattattatatgcacattgtttgagccaaaataaataatggaatgaacattacattagtgtgtgtttaagaagatttgcatcttatgattggacttgattttataattgtgatttatttagagaaatttgataatttgcttaaaaattgtgcataatcttttagtatgccacattaaaatacataaaaatttaatactttaaaattaattaaatctcaaaatactctcctcattccttttctctttctttcagccctctctccctttctctctaactctcaccaaacccaacagatacccacgaccacgtaaccagaccgaactagacccagaccaaacccacgaccaccgcaccacctccgacaaaacccactctaaaaacaaaacgtaggacaaaatcgaggaggatatcgcaaaaccacagagaaatcgtgaaacccaaacctttaaatctatgagctcaaccaccccgaaacccccaaaactcctgaaaccctacccatcgttagagttctcgattcacttgttttctatattttttttctagtttttaacaatgtcgcaaaacatcgcttaatgtcgatatatcgcaaaacatcactgaatgtctctaattcacaacattgcgaaacacatcgctaaatgtcgcgaaatcttactcaagttttcacgatgattagcgatgtgttgtgcattttttagtctcatatcataaatatatcactaatatcatcgctaaacattgctaaatatattttgctaaatatcacaaatcattgctaaacttcatccctaacctcaaatttgttctatcatcacaaatacatcgctaaatattgcaaaaaactagaaaactagaagaaataaatgtaaaaaacgagagagagcgtgagagaagacgacaacgacgaggccttgagactggggttttgggtctgtatgttcgacgataggggtgctgagttgggattaacgccgaaaaatgagagagttagagagaagtttttttttttttgaaatataaggatatttttgggaggaaaagatattaaaagtatatatatactatttctaattgggtggtatatcaaaacaacatgttttacatttaagcatagtaagctaaatttttctttatttattccttttttcctatatgggatatatataaagcgtcaacaatgtactacatcaatgagaattattaattaggctaattagaatttttactctgaattttgacatgtaacaaatcatgtcccttaaatttttttagccgttaaaaaactattgagattgttgaatttaaggacttttttccaattttagtaaaaaagtctaatatagatgaaagttcaaggggcttgatttggtacatgtaaaagttcgaggggcaaagtttggtagatatcaaagtctagggagtatgatttagtatatggataattacagaattagtaaaattaaataaaattggacaaaagtccttaaatttaacaatcttaataaaaaaattaacgactaaaaaaaattcaggaaatataatttgttacatgttaaagagcctattaattaatatttaaagaaaaaattacatttgaatacggttacttgaatggtaaatataattcattatatatttaatttttataaatttatttacaaatatctagcaggtttataaattagaattattacataaaaaatataaattgacattttatttataaaaatatatttataaggtataggcaacatttctaccttttatatgattttaattaccaaaataccacttacactatcacttacacaatcaaacaatggttacaggttggttgcgcggtggttgcatcagatgaaggtttcaatcagacgatggttgcagggtgattggccgaaggtttcaatcagacgaaaatttttgggtggttgaccgaaggttgcatcagacggaagtttcaatcagacgaaataactattagcaaaatatttatgcaactgttgtgaaacattaaaaatcaaaactgtgtttccacgtacgtaactctatctacatntctctttatgatttaatatgaacaaatttactattagaaatttagaaaacaacaaaaatacaccaggataaatattttactatatagtgttgatgtaattttttttggattatnnnnnnnnnnnnttgtttgggaactccatatcaactttttgagatatgcttttcatggatttgaaaattgaagtcacgacattagttctatgcaaattaaactggattttcggttgaagtttagtttcgtagtagtttttctacactttttttatgacttcgaaacagtccatgttttgattgattctggttgtcttttcaggtgaagttgccgaaattaatggtggttctttttctagttgaatttttatttcagttgtattgggttggttgcgcgatggttgcgtgatagttgcctagaaagcatgaattctgggttaaagtgtgtggaagtggtatttatgtaattttttttatttgaactgtatatttgtttatttggccaactagaaatatttttgtaatatttgttaatctgtatatataattatatattataggattttctgttttcatatgtttttcctaaaaatatttttaaaagttttttttaattaaattgagttataagttaattatgaatggtgatatatgcattccaaaaatgtattttaaataaacagataaatcaagatgaaaatatgaagacaatttcaataaacattaatattttatcaatcttttttcttcttacacaatgtcaatagtgatcctataaaaaaaataaaattataaatgcgcactcatgattaattattattcatatattctttttatttatctctatatactaagaatgaaatgttaaataagctatatataccattaaaaaaaattatatatatatatatatcatatttttattattttatatacaaaaaaaaataaaggaagaaaa

SEQ ID NO: 14338 - DNA, 7353 bp, Cannabis sativa
agtttcctatttcctagtctcctagctttgtatataaatatgtactattctatgaaatagacacacaattcgaatcactattttctacacttatcaaaagaagtgtctgtctgctcaagcaagttttgagtaccttggtcacatcatctctgctcaaggggtttcagctgaccctagtaagttggaagccatggtaaattggcctgacccgcgatcaattaaggagctgaggctttcttaggctcacagggtattaccgaaagtttgtcgaaggctatggaagtgtagctcggcccttgactgatcaattgcagaaggatgcttttgggtggacatcagaagctcaagaagcctttttacaacataaggaaacaatgtgcgtgcctgtccttgccctcctagatttttcaatgtcgtttgtgctggaagcagatgcatctagttcaggattgggcgctgtgctcatgcaaaaatagcggcccattgcttttttccgtcaaacctcatgctcgccccaagtccgtttatgagcaagagttaattgctattgtcttagcccttcagaaatggcgcccgtatttattgggttgcaagtgtctggtgcggactgatcaactcagtttgaaatatttgttggtcacttcggaacattaaaagtggctgactgaaattttgggctacgatttcgagatacaatataaacttggtcttgaaaataaggcagtggacgccttgtttaaagttcacaatgaggccctcctaactgtgatttcggttcttaatgtcatttctataccggagttgcaggctcacctttctacagattcgaccctctccaaggtgattcaacatttaaattccaggcgtgattgtggtggttattcgttggttcatgactgtctcaagttcaaaggcagctggttctccacagtcatctccttttatccctttgttgttgcgagaataccataacagtaatgttggtgggcactccagggtttttaaaacttttcagtgcgtggcggctgatctatattgaactggaatgagacgtgatattcagaagtatgtggctgagtgtgccgtttgacaacagtgcaagtatttagcccaatctccagcgggtttgcttcagcccctgcctattcccgagcaagtttgggaagatatttcacttgatttcattgaagggttgccattttcatatggttttgattcgatcttggttgtttgatcgtttgagcaagtatggtctttcattcctctccgccatccttactcgctatcaccgtagctgctgtgtttgttagagaaattatcaagtttcatggcattcctcgctctattgtctctgatcgggacaagatttttctcagcctattttggaaggaattgttaaagttgcaaggtactgccttgaagacaattacaacatatcactgccagtttgatgggcaaaccgatgtggtcagtccttggaaacgtacctccgctgctttgttagttccaagcccaaccagtggtctaattggcttccatgagctgaatattggtacaacacgtcctaccacttagcggttggcatgactccatttcgagccttgttccatcgtgtgatccacctcctctcctctgctttgattctacccacacgctagtttccgcagtagtacaaactcttcagaatatggactctattctggatttgctgaagcaaaacctccaccgagcacgacagaaaatgaaggcttaagctgacaagaagcgtcgcgatgttcaattcgcagcgggtgacatgtatgtgaaattgagaccttatcgacagcgctctgttgccaaacgtcgtaatgaggaattagcacctcgttactttggtcttcctgttctagcttgggtaggtgctgctgcctaccgtcttcaactcccttcaaatgcaaatattcattctatgttccatgtttcacttctccgagctgctttcggtccacacaagcaggctactacactccctccgggacttactgcagaattggaatggcttttggaacctgaaacggtgctggatatccatcctggcacgcataaaaccgctccccaagctcttatcaagtgggccaacttgcctgaattcgaagtcacctgggaggattttcgtaccattcaagagcagttcccccacttccaccttgaggacaagttgcgtcttttggcgggtggtattaatagaccaccattgacttatgtgtacgcctgtaaaaggagcagggggtaaaaagggaatagcaacagcatagtggccttggttgtgcgtgtgaaagggttgttatatgagtttattttgtgtgtgggtgagaagcactgtaatcggctagtctttagaataaaagggacttgagtgttctattgtgtgtgaagtattttgtaaaggttttgtaatctgtttgggagagaacagggctctccaactccctggtattcaatatcagaccagtccaattttcctaatccttctctttaattcttctttctgctatagttatcaatttgacaggaaatacatatcagttttcattcgccaaaagggagggttttctataaataacgggtggggggcaagtctaagacaagtagcctccattctcttcttcttcacaaaaagtatattgtactaatgtgttagttaatttttccactatgaattataaatgtgattttctggagtctggaattttctaggacacaccaaaataaaaaatcagaagtagtctagatgtaatcagtaagcactaagaaaggtttaacctacttgtcattctttttggtggggtgggagaagagatgagtagagaataccattctagtactgtgtttaaaactagcttgggattagaataaaacaatcttcccacagaaataaaaccccaattagaggattatttaacagactgtatgagaccacaaaaccgaatataccaacgaagaagaggcccacttttaagttttcctttaaaagaaaaactttaatttagtattagcaataaatttgattaaactttctatacgtgcaaagtttgatgtttcaaaattttgtatatataattgtaaactgcaattgacattgataataagaaacaacaatatccaaactccaattcaaaccacacagtgattctcttaccaaaaaaatgaaaataaaatcacactgattggtagttggagagagagtactagtgtagtattagtgtgtagttgcattaatgtgtagttatttaaaatattgacgttttcaatttcatatataataacttgcaaaagaaataacgaagttatatatgtacacaaattttatatatatttaatcaaaatttggggtcttttataattgaaaatacttttcctaatcttaggtcggcatcaaaaaataggattatgaggatagttttaatcttatctctaattctacccaccaaatttataaggtagtgagtttggtgggtgggagaaaggatgaggttaggatatattagtcagtacttaatttggctgtgtcttggagttgattgtttttttaataggtgaagttagatagcaaaattctacttggagtaagtgcaataagagagctccagcatcgaaagctgtaaacaacttccaatattctctagttaatcttatttgatattgtctttctttgaagtaaaatatttaagtttctattagagggggtgactcataggtgagaatctttccaaccacagaaagctaaaacgctggttatgtcattggagacttttgaaaccacagataaaagtgttaactcacaagtgctttcatatgagaaacttccaaaatcactgttatagttgaaaagtaaatatcatatgtatgtataactactgtactaatcagtattggaccccattcagtgtataagtagaatggttacaagtgatatattaatcagattttgtcgtgtagaaattgtttgctataactaatggcatatagatacataatattaccaattattatcaatgcttcagttgatgctttttttcttcttctctttttccctttttcaatcaagtgacaaccttgtcaatggcttgtagatttgattgtgaaggaactcgtgtgcatacaacaaatgacctataatttgggtgaattccacctaatgatagatatcgatttgacgcctatatcattggtggtacatttcaaagatttattgtgcttcaaattcttatttgatttgtgggggcagggaatcattttttttttattactattaaagttttagcaatctagcttctatctcacctgtatatatttttgtgcttatgtggttctaatttaagtttttctactttctagtgtgtatttattagcttatcaaacttacagtttacataaattattggaaaatttacctgacaatcaatttgcttgtgggtaccctaataataagtagggaattacctcctgaattagaatttcagatacagaaacatgcacccacgatgtaaatatagggtaggatatgagtatatgtatactcttccctaccctactgtatatacatatatatttttgctcattaaaattattttacatattaatctttattttcatatttaaacataattcattcattataaaattaaaaaaataatcttatttttaactttaatgagtatttcaatattatattggagttttttcatttttacactttaaatacactttaaactagttttgtttgtattttgtttgtatttttacaaaattctacatagaaactcctatcgcaactagcgctgcaatctaaattgcaacaaaaaatcgtatagaaacccctattgcaactagagctgcaactactttagaaacccaaactgtaaatttgaaaaaaaagttaaaaaaatagtatatgggttaattcccttattatatttaatatgaattttttcaaaaagttaattataatcttttcattataatttaatgaacattattttggctgattgatttgtgtcatttagtacatcaatcaaaggataaagaaagtgttattgtgttgtttggatgatagagattttaatagtgtcagaattgaattagatgtcgtttaatgaatatttttagtttgtttttattattgaaataagttgcaattagaaaataaagatcttttataggttatttctgaaacagtgaaaagttgagaaattcagagaatcatgattgatgaactaaggctgtttttcttttgataatattattatgtgttaaacttctgattttctatcatattttgattttgactattataattataaattttgatatggatttagactttgatttttaagtttagaaggctttcacattgcgtattgattttggttattatagttacattgaatttctaaatttagttctgaaaaaaaaaaaagaatttctaaatttaggattgggtacctagtcgcaaaaaataataccgtaaggcaggtaaggtaagagcattcttttacttgttaaagtcgtgaaataggcatattctacttaaaccctacctgttgagcattttaacattagtgaaattttaattctggtgaccatacttttattttttggctgaattggtaaccataccttttaaggatgcactcctacaattcatgtgagaagctgcaagtatgggagcttatgatgctagacagaaagacaactctctggacctcttgtctcttttgaatagaagatgcttattgcatgaacgtgtctttatttggcataactgcatacgtgtttcattaactttcattaaagatgtgttgcatgtatatggggttcctcagtgtgaaattttgacatcctaagttcattgttttatttacacttgcaacacaggtgggaaggatttttccatgtagcactgtggaattggaacctaaagaaaaggcaacattgttctggttctgtctatgatgtgggtgtggctttgttacatgcagcaattgggctgattggtgattctgatacttcgtttcgaaaggcttgtttggttgctggaatttcgtcatcggcatgttccagtgattggcataatttgaacctggaaatttttcactgtttggttgataaaatcgatactggatcaaagttttctgaagccttaagtaaagtggaacatgcccttcaaaaaaacgaagatccctttcaacggattagatggctccagattttgggtgacaaaacaaatgaaggccttgattgttacatgccgtttagggaaatcatgaactcgtttccattattggctcaagacatatacgagattgaatgtgtattcatgcagataaaatctaggttttgctctcagataatattcgaagatgtaaagcagagctataagaagctgcttgaaaagtacaagaaagtcagaaaacaatataagaatggaatgatttcactgcattatggatcatgattattactttttatctcaatgtccatgattagttacaaattactagcattttattagcacaagtctcatcatgggagagcatagaaatttgaattaagagaatcgcagggacaattaagacaatttatgcctttataagagatatattactaaattccatcaattgctacaaatatgatcttttaataataatatatagtatctctttattatattacttaaaaagggtaaagagaagtctctctttctcactctgatatccaacttatatactatggcatgggatgtttaggcgttggaattggatgagtggtggctccatgataatcagtatgatacactaattcatctaagttgtcactgctatcatatttaactgtcacagggtttccttcggctgtgggttttttcctgtcttctgtaacctgcattaagagagaaccgtttttggtttgttaggaagaaagttaagcttaacaaaactgaaaactggttatgagaagacattcatctttaagaagaaaactttaaactttctgaaaaagtaaatgtattcacaaattacattcaacgactcagaaaaacccacctcgatcttactttgcatgatggatgatggcacccccatttttctagtaataaaaggtgttgttattgggggagaaagagaaaccatagaagatggcgaataagagctgttgagggaggagagatatacaagtgctgtcaaaacgcagaagcaaatgatgcctaaacttctcatcgtctggtattgttggaaaaagaagagtacactttcttcatgaaggctaatatggtggaataccagccatttatatactaatgaggattgcaca

SEQ ID NO: 14339 - DNA, 5329 bp, Cannabis sativa
aatgaaaaaagcataggctgcctatagaaaatgctaatcatgtatcaaatggtataaatactgttgaataaatatcattgcgtggttcagtgtggtaagtgcatcataattcagaacacaaaattaaagctaaattacctttatttatttattatttaagtagtgacaaagtacagctcagtagaatgagaaaccagcaaaaactatatggggacaaagatgataaaatgagaaaaaacaaccaaaacaaggttgtaaaggcacacataagagaatgccaccatcaaagcccacatagatccgaggtacccttccctaaagaactgcctaaatcaactacccaacactgataaacacttcatgaaagggaaaaacaaactcactacaactatgcaaatccctgaaacagacacactttgactctagtcactctactacaaagaaatgacttcaaacaactgggttttcgcaaaggcaaaaacataaaaaagaaagcttgatcagacacaccattggaggaatgtgcaggaaagctaaaaacaccagatggaatagcaggagccgaaagcatgcagtaagaaaaagctccagcaagtggaaaaccttgggactaacagttggtaatattcgcagggaaccatggccatgaaagatgtagcctcctgctgatcaggggctaaacagtgaaaacaggtatgagagcctgctaaaaaatgataacgaagtatcggccaaagttacccgggaaacaaccaagccagccagaaagcccactcctgatgagcaaaaacagtatgctgaacgttgcgctatccatatcggttaaaccataagtgctaaaaaccacctatcaagtaacaacttaaaaatcaaagccagaattcagggactctgctatctccagcatctctatatctgcctctcttttagagataagagcatattgttctgttcaatctcttaattaggccaagatatcacatctccacaagctctccacaagcagctcaactgttctgctgctgattgaattgcaatgttggagattcaacccaactagagtctcacccaatttcttaaggaaaaatgcgctcttgttcgtcacatcagagcagccagaaagagagagcacttgcaaattgatctggtttgcattagaaagggctgaaatgccagaatctgtgattgcgcatttagaaaggtctaggtctctgagtaacaagcaatcctcggcaattgctgccaaacttgcatcggtgatcttcctgcatccgtcaagattcaacgactctactgttcctccgtgaaacttagccaaagcaatgactacctcatctgtcaaattgaagcaatcgcttagattcactttcacaagtccttcctcacagttctcaagaagtggaagaatcccagcatctgttattccataaagcccgctcagatctatatcctgaagttgagggcacaaactccccaccattgccaggctaacactaccaaaaccagggcagtttcggatggatagagatcgaagagatctgcaaggagagggcatggatacttcagaagtgatatccttgatccccatgcacttcactagggcaagggacttcaactttgttccacagtttgagagagcaccaacaatccctgcctgagtaactctattacactcctccaattgcaggctctccagtgatgtagccgctttggcaaaagctaccaggccattatcagagacaaagcaacacttacggaggcacatctgcttaagattcacacaacccttgcccatagcctcgaggctggtatcggttattccccggcaagaagtaattgctagtgacaccaacttctgaagaccttgagcattttttatgaccgaaaatcctttctcacttacattttggagaccaatgagactaagattggtaatagccttgccataatgtcctatcactgcaattgagaagtctgtgatattcaaagcctgaagctttacctttgatagtactaaagaagctgatgataacagacttgacactccatgatccccaacaagaggacagtctctgatagacacagactgcagcttggagcaaaaccttccaacagcttgcaatccatcgttaccaatcttagagcacgattcaatattcaaagctgtcaaattagggcaattctcagcaattgccatcaaacccctgctggaaattgaaggacactggcaaaggtcaagcttctctaacatagggcatcctttagctatctcgtatagacccgcatctccaacacagggaacattccacaaagaaagggacttcaatgatggacaaccacgagcaatagcagacaatccaacatctgtaacaccacgaacagtgttgcttcctcggattgaaagctttccaagacccccacggctactagttccaactgaaatggcagctagtcgagtatcagttgctttctttcccaccacacaccttgtaagatatccatcacttttaagctcttgatcttcatcagaactgatcatatcaatgtcactagaggaaaccacttcattctctaactttgatggcatctcaattctgcggatactggtcaacattgaaagccatttccttgaaacacaagcacaggaactcctctctttaccgccttgcaggcgccttaggatctcaaaaaggcactcatcggggagtacttcaatggagggctttgaaacctgctccaagaagctcccttcgaaggaaaatggggcactgatccgtgctctcttgctagggggacaatacacatcaacataggaaccaaacagcccctggtttgggtaacaagagctcccagagtaaaattcatcatcacctgaacccaatagcaatctaatatcagtcacagttcttttcatgattagttttttcctgatctaattctattctaaatattctgccataaaaaatttaaccagaattaacaactcatagacctaaaatcatagccttcccaccctcccacctcccaaagaaaataaatatacatatatacaggatcagatttcttatagctaatttcaaatgattagatatcagagaatttaatccgatctaaaaatattctaagcatatgcccctatcacatattcaaaactatgaacaatccaaaaatcattgaataaaactagcatgatcatcatcatatataccaaaagaaaaaacccaaatcaagaaaatcataaaaaaagaaaaaaaaaaaaaaaagaaaaaagaaaagaaacaaaacccagaaacgtaccactgtaattaacaagggtaggcatgaggacagtcgaataagaacaaagccgaagagttcctcaaggcacaaaaaccctccaaagagagcaaaaaggttgaaacttggagtgaaatcttttgcagcaaaacagattaagatccaaagaaagcacaagagcatttgaaatgacgagagaagaaaccccaacaagcagggcaaaaagagaacccaacaaaggaaaaaaaaaatgaaagctttaggatttgggtttgtgaggaatggttatggaaggaaggaatatatgtgtaagtggtgggaaaaaaaaggcttttattgggaaaagggacaataaaaggtgtcgttatcaaaaaacaatggtgtggttttttggtacatgcaatgtattcatcctcaaatccagttattcctctcccccacactacaattctcctagtccaactccaaccaccacctcagcaatacaggaaacacaataccagggactattattaaatttatttatttattaataaaaaaataaaataaaaaataaatagaaagttgccttgttggtaatctaatatgcatgaactagtactagtagtggttggtttggttactagtgtcaaatgtgattataggcaggtacattgatttgaccatgccattgagagtcgtaatagttgtactttttacaattaagtcctctatttttttcaaatcaaaattaagaggctaattaatgtatttttctagagcaatggagttcaactcatattggtagtattaaggtcaatgttgatgcggctttatttgaggaattcaattgctttggcttcgggtttgttgctagagatgacaaaggtttcttgttggaagaatacacaaagctccttcatggtaccgttgctcctgcattagctgaggccatggggatacgagaggcacttagttggatcaaagatcatcaatggcaacatgtttcacttgaatcggattgcttgacgactatacaagctttacggagttctattcagatggtctctatttttggtcaagtgattaaagattgtaaaagcttaattagtgatttgcataatattcctgtttattttgttaaacgatcagctaatatagtggctcatacttttgctaaagcctctatattttacccttattgtcagttcagattggagaatgttccttcagttttattaccttgtttggtagctgaaactttgatttaataaaactgaaattctcattaaaaaaaaatatatttttctggcattttcacacgtattaaattaagtctcttaaactcttcaagtcgtgaaaaattctttttaaattattgagattgttagatttaaagactttttatctaatttcattcaattttctaaatatggcgattatcaaaatactacatttaggggtgcacatggactgggttggctgagttagaggtattttaataagtcaacccaatgattgcagtctggataagctataaatcattcaatttttattattgtacaacccaactctacttagtacaataatataaggggtggggtggggtgggttcattgggttaagatgaatattttaaactttaatatttatgttacaaacaggataaaattattcaacctactatatacataaaaaaaaatgatacatatatatatgtgttgtaatatagtgctttaaaaaaaataaggtagtaggggtatcattttgtgagtagcaaagttaacaatagtgattgattctcacattagacttattggtagaagtagtagggcaactacagactacatgttagtgatgcgttttggttaattcacattttaaggttcaatataatttatttatgtataaaaaacgtaaatatatatttgtatatattttgtggatataaagtatattttatgtataaaagaaatctcaaatttggaacatctttcaagaaatgggttggtttgggttatatagagttaaaatgtgtccaacccataaccaacccataattatatggtctatc

SEQ ID NO: 14340 - DNA, 7281 bp, Cannabis sativa
gatttttacgagtatttgttgtctctctttaatgtgtcccccatttctagtcttgagaagttaattgtttgcttttggagaatttggtatagacgtaatatccttgttaatgagaagaaactaatccatgatatatttattgttgagtagagctttgaattccttgattgttactataagaccaatagcttgtctgaccacacaccaaatgctagcctcgttctgactgttatacacaggtgggagaagcccccgactgaggttactaaaatgaattgtgatgacaatgtggatagtatgaaggctagagcaagattcagagtgattttgcgggcatctcctgttttggttttggctacggccatttggccttttgtggttgtgttcgtcttggctattctcatgtgtttgtggagtttgattgtatcaatgtcgtcaatgcctttccgaatcaattgattgtatcaatgtcgtcaatgcctttccgaatcaatctattgatcatttacattttggttgtattattagaaatactttagcttattgtaatcatcttaatgtttttttcttctcttattgtcttaggattgtcaatagtgtggaaaactaactttttttataatgatcattatatttgatgacctggctacttaagttgtattagctcttacaagcctattcttattgattaatattattatcttggtactctttttttttttttcagatttctctcattagttttacttaagaagtttaaataagaccatatatttgttttttaaaaaaaatgtgaaccaatctaaataagacttacctgaaagataaattctcattttcctcgatgaatattcaagatatgatcaaatatatacacatatttaaatatgtgatatagacattgtcatagtctctttggatttaacatttgttgctaacattagggtggtgaatatgatatcgatggcaggctagcaaaaacaaagttatatgacaatcaagtgaaggacctcgattaggcatataaccttttaatatatgttaacattgacaggcacatacaaatgaaaaggctgagaagaaaagggaagagaatgaattttgaaggagcaatgttgtaccgaaaactaaggttcgattttgaaagtcatattttgtacctttttttttagtgcattttacaccatattttaaggatataattttccttttggtagtttcgacaagtttagttgattttgggtgttttactttacgaggcatacaaatagaatgatgcgtaattacaaattgattttcccagtttctaaattggaagacaccagcagcaagcactaaaatttagagagtggaacggaatctagtaattaaatttacaagacgagggaagggtttccttccaaatatattcccaagtcattatttcaaaccaataatcctagaaatatgcaagttatgtactaattactcccagtgattgaacttcaaacacttggaggtgttcatttgtccgacgaacaaggtaaactttcaagcatgaaagccaggcaacctccatggaacaggcctcctaataaaattccaattaccatttacaagaaggaaatcattagtttatactttcccatgtcacatgcgcaaatttcgggctgccttggatgattcccttgttggtttggcataatcttttatgtcgctaagtttgattttctgcagtcagaaaatcagacagtagaaagtttatcttggattaaaaggagcatgctcttaaccagaagacaaaacatgtttatcacaactagcaaatttcaacaggtgttatggtaggagaataaactaggatttaccatctccgaaaacctgttcgaaacgagcaacaatgtgttttccataagtgtacttcttcaatgcatgtgcatgagatcttatgccattcagcaatacaatccgttgactgtctgtacaaatttcaagagtcttctggaccacataatttgcatattgatccttcatcattgtctactaggaacaaacaagatggtggttaagtagatggaaaaaaatactccaatatatcataataattaatatacctaatcttttttcaaaatgtctcaaaaactggtattccatcgctactaccgacattttaaaaacaatgagcatatttactgccaacgaataagattgggtataaaaatataacattttaaagtattggagatggagattggatataaaagtacaacattttgaaaacatttgagtatttttagtcgccatttactctaaactaaaattgattttgattaaatcatgtcattacatcctaacttgtgtttctaacctatggcaatctcaagatgtcaaaccagtgacaagcaaaacagcagtgcatcattcaagtgtaaaatctattctccaacaaattatgttggaatatttaggtcaagttggcaatcacaatatccaatggataagtaacaataacataacatattattcttcaatggttaaagaaacaatttgacttaccaacaagttatcatttccttcattatggccaacaacctcattgattaagagttctcgatctgcaggaccaccatgctccaagcatttttcaataacatttgatgcaaatttatgctggctaagctgaacgacatgtcctgatagcttgctgataattagacttctttcgttagcttttcccctctccaaaacatgctgtgaagatatcacaagcatcacatcaatttccaatgaccacagcagggaaggtaatcatatcaatataaattcatttcttaacatgctagggccaataagagtattataatcctaaggaaatgatgacttggaaataagacaaaatttggttaaaaagggaaaaataatgagatggacgatcccatatcacaaattgaacggcataaataaatttattgtgaaaatcaatctaatacccctatgtttctactacgatgagattcaatctgataaattttgctgatattattttccatttataaaaatttaaaaccaaaacatctcactttcattttgaatttatttaactaaattttttgaagataatccgagtaacccttagttgttgtgtatatgagagagacagagtgacccaagaaactgcaaacctgagtcacataatttccgtattgatcctgagccagagtacatacagattccaaaatttcatccacaatgaactgacattgcaactcatctgtgcaatgctccagaactctctgcaagaaacacaaatcttagcaaccaggtcgcataacttgaagaacaaagtattaggaaagagaacgaaagagactgcatcacaccagtcaaggataggattacctgtatcacacggcagccataaggatgcatagaaagtgttgcaacttgtccacggaatgcagagattataaacgcaattttttctgttggaatgctctcaatgcatttttgtattacatgattcccgttttgatctcggacacatctcataacatgtccatcaagctcacgaacaagctgagctttctgttcaaggtcaatgacttccagtgcctgcaccagccaataaataaacaaagtcaaatgacagatgcatatagcacttaattaatcatggttacattttgtaattataactgtgtgtgactgggttggattacagctggctaattttagcaaactaattacattagcggttgtgtaattcacacacaaaaaaaaagatgttctaaaaaacaaacacacttggaacaatagaagtcaatgcagacaagaataaactattagaattttttacactattattaaattgaatatttaagattatgtttaaagttgatttattttacacaagactatctaatttgcaatatcaattttttatcatgtttagtttccaacttatactaaattctctagtgttagtttcctgtatatgtttagttattgtttagttttctaagccagatcagatagggtccatgcaaaaaatgcacacatcaaatcctctgtttgcacagtatagacataagtacaattacagaagcacctccaaaagagcatgtacctcatgaaaggtatcactgaacaaaaattaaaaacactaagagaagctcaactcattttcgagttcttaaatatgtcaacttataggattagaaatttcaagaaacattttttttactcctgtgctactatggtgatccatctttcagctcagacatgtaaaaacagaatgtaaaacagtaaaagaatatcatggacacctgaacttagggctcgcctatatatgggatgtgataacagataaattcccaatttcttccgacattctaaataagctgaaagacatacacatcaagcataaaatacaaaatgagcaagtgaaacatcagcatacttctatctacctaaaagtttcaagttgatttttttaaaaaaaaaaaattagaaccccgcctaaccctacaatatttgaggacgaagaaactatatcaattgctatgtaggtactcatgatggactcgaacctcagacctagtgggaggaaaccacatgcctgaccatttgagctacccttcttgggttaaaagttataagttgattggtattaaatatttgcattaatataaacaagtattaaacaagtactaatcagagggcttcttaagtacccttaagtgttgagaactaatgttttaactcacatatcatgttgtttaatacttaagaaaccatactaaaattctttgctatttatcttcatatcaaggagttccaagggcatctctttagcgtacctctaagctttctaagattttagaagaactggaatggtctgcattagagattatatggtataactctaaacaaacttaaatcgatatttggtgtcaaaatcatgtggtccttctagcgtatcatactgcaatgaataaatatagggccgtggatgcgtttatacacgtcttaagatatataaccatgtctttttttttttttgaaagcaagaaataatcacgtcttaggaaaacaaattatacataatatatttgattttaattaaaaaaatgaaaagaaaaaacgataacaactaggacagaaaagaatatacatacaaaaaacagaacatgaaacatcttttacttctaagttcaaaccccatttctgtgcagatgcatccataaaagaatcacttcgttggtgaacaaactaagatacatgttttcttgcttattacaaaaaaaaaaaatgatgccaaacttagtaaattaaggaatacacattacaagatgttagatatcccgtgctaaaaccaaactaacacaggacataagttgaaacatctttgtaaaactcaaaagatatattgtaaagtaccataaaaacatacttgagagcaatacaaatggaccaaaggtatcgaacataccttctgaattactcggcatccatacatttgcagacttaaaggcaatatctgacctctgagttgatttgcaagttctttcctctgatcatgacttccatactcaaaaaactgcagaatgaaaaatgaaagaaaaatataaataaaccaaccattggaccatagaaaattgacaaacatacacagaaactagagtaaggaaacaattgacagtataccttctgaataacataattaccaaaaacgtcagtcattaacttagatgcatgtggtagaacttctttaaacacagatgccttctcttcaacactacaattctccagcttctgctgaatgaatcggctaccatgttgatcagaactggaattggagatatatgattattcactcgcctctgcaaacagatattaatgtatagacattactcaaacaagtgcagaccgcaacctacctgaactcaacaatatgacctataatatcagacagctcaaatctgcggcctttgccagatttcaattcttcaaggaaattatacatcttggggtcatcaaaaatttcaaaacctctttgcccaggccatccagaatacatgcctgcatttctaccagtacctggcggaaatcttgtttctgctctcccccgagagagaccatttccacctcctggtgatccaggcaaaactggacttggaaggggtgaggtagggtaatgcatcaagacaccaacattggatgtattcccaaaataattcggactcattgttcctcctctccgtggattcaaattagcattagatgcacctctctgatgctggatcttgtgctcatccatataaacagcattatctgacccattcttcagatcaggcatattaacctggcctccaacaacgccagctcttgctgccaaaggatcaaatggaccaggaatactatatggttctccaaaaggttgttgatgatattgcatatacataggatcaacaaaagaaggttgaattgggaatccaatctgtccatagaacttatttaagtttggcacatctgcaccaggtggaatggcaccagcatttggaaccccagttgttctagtattaaagcttagaccggcagttccatcaacaaccaatggaacgggcccaggagggtatccaggaacatacggaggaaaagcattggggttcacagcatatccaccaagaaattgagcattaaaaaatccaggtgcctgcatatttgagtaaaacgggtttgttgaagtcatgtaggcagctgcagatgcatatagtggtggtgtgaacccagatgactgcagtacaggctgtacctctgctgagaacttacaaggactgtggagatgttgatccacaccattgtgtgtgcaattaaatccttgagtagttatatgagatttagcactttggggcagagataaattattttgcattttcatcttctgtggtcgtttaatattctggttgctttgctgccactgttcttggtttgcttgattgctggaagttggagaattgctaatggcaagagccttcatttcagagcccatgatgttaatacctgattcatcaccacctgagcttctaatagaatcaactgatgatgaacttgaaacaggagcaacagaggggtcagtattagttgcttcttctgttcccagattagatgcattgacattgggtgttataatgggagagccataaaacgaattagagccagcatcacaatttgctgattcctcagttattccatggcttgaagcatattcaggcaatgaagaaccactgaaatcatcctgta

SEQ ID NO: 14341 - DNA, 11179 bp, Cannabis sativa
ttaagtaaatacacttttgtttaaaatattattgcctcaccaaacattgtattatgccatgccatgttatgttatgttttcgttgttaaacattaattatttttcttagttgatttgattccacaattacttatagagcagtgcttttcgtaggtggcgtcatacgattggttagacatatttcctaaaagttattttcttaaattttaggagactcgctacttagttacaccaatagcggtatggcacgaaggagggtgctaggcaccagtggtaccttttagcaattctcttacttatattatataaattaatataaatatatatggatcaaccccattgcataatataataatgtatttcatgcttgaagaataacaatattgtatatctctaaaggaaagtagtgtcaaatgttatttttgtcagcttaattgttatcctaattcagatccatttaaaaataacttaactctaacagttaacattttcattattgagggctagttccataacatttgaggaattaattctcctccattgtttaatttgtgtgaaattttatgtattcatctgtatgttaatatttttggtaactagctaggtatgaagtataaactttagtcatgaattatcatttgatcagcatatatatatgatcctcttataggcagtactatatttagtttagcccatttctaggaaacagtagggataattttgataatagaagttcttaacttctatgagtaatagatggagtaaaacaattgtaacatgttggtttgtttatcatataattaattgttattcaaagctatagctccattgtgatgtgagatcatcaaataataactaattgattgtttttaatagtgacttctattgttgtgtttggtgagtataggatgtgttggtactagctagacgctcaatcacaagctaaagttgatatatataagatataagaaaattataagaacctgaaaatcaaaattgagacaaaatatttagaaaatattgtagaagtatgtgtcactatagcaaagtgacttttaacttgaaattaataggagcaagagtagagatttacttacaatcttgcatgtttaagcactagtatagtttctttggtaaaaccaaattttcttcttattttttatttaaagaatgttaaagtgactttaagtgggaaaatatgtgatagctagcaaagcttgtttaatttactccttcaatgctatggaataaagtaaaagtgtggtttttccttaacacacttagtcttttctcaccctttctctctataatggggatcctttgcactcaatggaaaatagtgatcatgtctcaattatctatagacgcaagaccaagaggcggtaaagcttaggctaataaaactatgaaccgcctatagtgatgaggcagtggttcgtgctaaattgcaaactacacaacttgttacttaattcaatagcttttgacttaaccaatatcatactgaggaagtaatagtagatttattgtcacatgtctctcacttaaattctttctacttgccattttctatgttcatgctgctacttatgtttccaactagctagctaggctgatgaaggatcaacaagaagtaaatatatatatttaatttaggttgcctttagtatatatggaatttatctacatgtccacagaccaccttccaccttaatacaaacaaaatgatatttgacttgtatgtactttgtcttttgagtcaaatcttggattattttccatgtgggtgcaaatcacaataaaagagaaattttctcttgtttgctactaaattgcttattaattatcattgaattcaccttatttagatatcacattttgagcaagagagtgagaaagagtcaacaaagataggaagtgtgagagagttttagagagaaaatatatagtggggttttctcctaaaaatttgtagtagtcttttgttagggagtgactattttctcttaaaaatgtatattgtcatttgtattgtattgtaatacttttattgtacttagtggattcttaattattttcattatctacttttagttgtgattgagtgctccccattacccattattaattagttaggttgttggatattttttttttttttccaaaacattctctattacttgaataattaagggcatgagtgagttttcaacattttagctctctaataataaaaagtttttttagaagaagttagtttcaatatgtctaaggaagaacttcttgataaaactaaaattattaggtgataaaatttatccaatcccaatgctctatatattttcttctttctaaatatgccccatatgtataattaataacttgattcttcataattttatttactgtatatttggttccagtttaaccacacttccaattatatatattttcttaagggaattattgtacataattgttgatcctatatttttatttcttattagcacacactgagtagatcattatggagctcaattgtttatattaattttcccaatgcatgcatgtatgtctacttgtttaagatcttgctattataattgattttccaataataaaatataaacttaattatgctgtctactaaatatgaattccctatatatgttgccatgtatatatatgtacctgtgcacatgttctctactaaatttgagaatatatatggcttgcaggcttttgcataataatgatcctaggttttttttgttattattatttttttagctgtatatataatgattgtgttgatataagttggcttctcttgtctttgtatacaaattagttttgggtgtcagttgatattttggtgaaaagttcggttgaattcattgtgttgttgttttctttttcagtaattagttatagagagcactcaaaataagtacttatttatgattagccatcatttttattttatatttttttcttttcaaattaaagtgcacatgccatattaaatttcaagagtataattatcattactctttgtacactttggaggagagtctcattaattaacataaaataatacttgtttgtaattacataggaagcttattgttattgatcacaataaccttatttttgtgtctttattcattgtcattcttttgtaattgttataattactttatatgatgatatatatgtctttattgacatttgacatatatattaatgttaattccagcaatgtttaaagcatatttaccctttaaataagatggataaggtagtgaatgcattaaattaatgtaagtttgttacctatgctaataagtgaaatttttcctaaatgatcatatatcatcatggtattacatgagtatatatattagctagtattcttctacatgccatggttaaaattgtatagtatattaatatgccaagctatatatatatagtgaaaatcaaccttgtcatgttctgaaatttataatctacttactgttaatgcttgagatttttaaaatgtctagtattctgtcacattaatttttgggtgtggatattatatataactaattattctattgattattttatgtgtgtatagtgtagtggatgttaatcttagcctttattatgctacacttgcatgtcttcttgttcactttttgtactttattaatgattatgcttaatttgtttacgataaaaaggaaaaatagtatgatttgtatcttttgagacacaaaatatattcatgatatattcttttgtgattttgtaattctattcaacttaattatctttttacctatatatgttcattttgataatgttagcaaaatctcatacatttgttttggacttgtaaactctctgatcgatcaagtgataatgttagcaaaagaagagcttcttttgtttggcaatggaaaactttgaagagtttttatttaatgtgtggttttagactttcactttctaatgtaacaaagcttaaattttggcattgtaatttgattctattctttcttcttctcacacgtgcgaaccatttaaggttggttattatttattaaaagatgtaaatattagtttatgaaaacttttatttgtactacaaggtattagtttttatgcaaaacttcaatcattttctgaattcaattcttaatatacttatgttatgcatcaagatcaatgctgaaatgttttcgaaaatgagtgttggttttttttatagttaagatcttggtggtaaaatctttaatctctcaatttgaaaatttggtgacttaacttttggactttcactcatctaggcagtaaaattaatttaagaggccggttaattttaatcgctagcatatggtttgtttgttcatgtgtacacaatttataagtgatatgtttatgttggtctatataatttaatcttctactactaccactactattgtcattaccaacaccgacaccactactgaaactaattaaaaaaaaactttgaagaacaatgaaattgggagacgaaatggaaaaaaagatttctcttcaagtttaaaatatgtttttaagtaataaaattatttggaccaatcttaatatgaatagtgtatgttttacagccaattcggcactccccaaaataagtgagacttatagtcatggtcaatttcttttaattgtttgcttggaaattctaaattgtgaaaattagtttcaaggtgagtgctaattacttgttagaatattctttttcaattttttctaaatagcaatatttatttgtaaatttttaaaaaaattcgaataatttacactacaaaaaaataaagttattgatattttagtatatactatgctgtttaaaaaaatttaaacttatttttgatactgtaaactatttgaatattttaaaagatttacattaataatgttgtaactataataaacactgctataaaaataattttgaaaaaagatattccgtcaagattaactaaaagattgtaatagaaaatttataataacactcctcaataactgtgagaattgaaatatgaattttacaaggcatgattcttttgatatcaaaagagtgtagaaaaaggaaaagagaaaattgaaattgagagacaagttagagaatgcacttaaaaataatgggataatagaaaaggtacataaaatgagagaatgcactttcatggctaaagtggttaagaaaaatgaaattgtatctctaatttaaaatgcaaaatcaaaaatatttttttgtatgtttagtatatgttttcctatattatgaaccaagtaataatgtaccaatagtataatggaaataacaaaaattaatgatgcatcaaaggctctcagtattatcatttaagccccaataaaattttatgttatgtatacaatttgatactattctttagtccaaaatctacaaagctggagcataacaaagaacatgaacgatactcatgctatgacttatgagccgctgggcataaatgaactccgaccgggcgtcttttcgagcccctcatttaccatcatcaccctcaacctttcagccttctcccacctctcggaagcagcataaatatttgacagaaccacataatgtggattttggctcgaacctgtactcgagcttagagtgttaatctctttcactacctcttcggccatctccatatctaaatgagtccgacaagctccaagtattgctccccaaaccgtgtcattgggttccataggcatcgtcttgatcaaatcgtatgcctcctttaaccttcctgcccttcccaaaaggtcaaccaagcatccatagtgcttgatatttgctgccactccgtatttctccattttcgacaaaatttctattccttcatcaacaaaacctccatgtccacaagcagagagaacagaaaggaaggttatggtatcaggcttttcatttgatctttccattctggcaaataattcaagagcttccttacactgtccatgaacagcgaatcctgagatcattgcattccaacatgctgtatttctctgcatcattccttcaaagattagtctagcattgttcaaatcaccacattttgcatacatgtcaactaaggcactaatgacaaacaaattacagtttacatgcttattaactatcatatggtgtatttctctcccaaaatccatcaatcctaactgagcacaggctgataaaacacttactatagtaacctcatctggtttaaagccttcagctttcattttaacaaatgcctttaaagcttccctagataatccattttgaacatacccagaaatcattgaattccaattcaccaagtttctcactggaattctctcaaaaatggcctcagcattcttaacatcacccttcttgcaataacccgagatcatcgatgaccaagcaaagaaattcctctttggcattagctcaaaaacctcttttgcagcctccatatctccattactactataaccatcaaccataacagtccaggtaactaaatttttcaactccattggaacacaatcaaaaaattgcctggcactaacaatatcaccacactttgcaaacccatcaatcatctcaatccaagtcacagaatttcgttcagacattttatcaaacaacagagatgcagacccaatatccccatttttcaagtacccaccaatcattgcattccaagtaacaacatttctctcaggcatttcatcaaacactttctgcgcatcaatgatttttctacatttagcatacgtatcaaccattgaggttccaatcaacaaatcagagtaaaccccagattttatagactcaccatgcactgccttcccatagttgaggaagcaaagagaagaacaagccttgagaatctgagggactaatcccaaaatgtaaattccttgagtacgaatttggttgtagattagaagagcttgtttaggtgatccttgagagatgtgagtctgtataagggaagaccaatttgggggacctgcattatttgaaaaagcatagatttggttataagttgtaaagttttgtgggagttttggcctaattcttcttctcatctctcattgttgttttaggctttaattgtctttatgtttagtgagattctcaatagttgattggtaagtggcagcaaaagtttctattattttccttttgtacttgccttcttcaacttttataataaaaaaagagtaatttgtgggggtaaatagtgaacttttaggaaatttgtgctgcaatttaacatcaacacgcgacatttttaagagcaactaatgggtctcttaaaacgaaaaccaacaaacatacaaaaatctcgaacttgaaaactatcaccacaatttttcgaggtttgagacttatctacattaaagtaaactttttgaggacttgtgccgcaatctcgaatttgagtactattactgcaaattttcgaaattggagcttatttgcatcaaagtgaactttttagaaacttccataatttaatatcaacacgtcgcaattttaagagcaaccgacatatctattaaaatgagaaccaacgaacttacaagaatctagagcttgagaattattactgcaattttttaaaattgaagacttatttacattaaagtaaactttttgaagaattatgccgcaatttttccataatatttaagccataagtaaaacacacattaaagaaatcatttcatttcctggtctttacttcccagtacctgcagttcttgcactgattcatatttgagtaaactatttaggcttaattctgcataattactgggaactgtattctcatactgtacaatgaaaatacattaacatacgaaacttgataaaccgaaatggccaaaatgaaaattatttacagaaactaaaaagcaaaataaacaaatgcaaattccaagagcatgccagattcaacttaatcatatctacttgcaaatttatagaatataaaaaactgggaaatgatgattaaaccaggtaaccaacaattacaaacttttcacgtatattcgtgtaaattaaaaataaaaaaatagagataaaagtttccccatgtaaacaagatctccaccaaaaaataataattgaaaaagaaaaattacaaatcggcactgaataatgaagctgctctacctaatcagtatttaaaaaaaaaaatacaactacaattatgaacaacaataagaaaagaaaaacaaaacaaagaaaacaacaaacaatgagatgaacaaatgaagtatacacgtcaaccatcataattacagatactaactattcaaaatcgcttccttttctctatgtcaatacagaaaaattgtaaatcaatggagttcttcatggtgtatcagtatcgatacagaaatttctattgttggcaaagacagaacacagcggcatgtcttgcaattcaagtagatgtggcacctgttgctaatgacgaagcctgcaaattagtttcatggatctcgggaacttgaggaagagcctcagagggttcaactatattggccgtagatgattctacaacaggtgtttcgccaggatttacctgatctgaattacttgttgatgtaacttgaggtgtatcccctgtaacaggttctcccgagtctggttggggtgtgggagtttccgtagttggaggagtggcttctgttcctgttggtgctgcttctgtgctagtagaaggttctgttgttgttgttgttggcggtgtaggtattggtgatgggactggtgcggtagtaggcccttctaatagcaattgcttgggttgttgctcggtattctgagctgctgctggagctggttttttgcccagagaaataggaccggtgagagttggcatccctgggggtaagatttcgattggtggcttcttgcctgcatctgctaaacttgtaagctttggatcctcaagagaggccaaaaatgaagctgcagcatccatctttgttgacggtgtgtgatcaacctccttctgcagcattttgttccaagtctgaaccaagctttttaatgttggtcgtccatgagcctgaagtcaaatggataagaaggtaagatcaaatacttgcaaaaagtacagggaatgaggatataaattaataaatgcagcatacatgggcatggagcacagcctcggcaagcattcctgtttcctgccaagccttttccatgagagcattgtctcccaaaacagcagctgaaaatgcagcttcacgtccaagaccaaccgagatcaagttgtttaccaatccctgcagtaaagacaattgtgtttgaaagtactagtatgttatctgagaaataagttaacacgttaaataaaaaagagtaatatgaaattggatttcggtagacgtgttaaacattctagtgccatcaagcaattcaaaaaccaacaaaaaggtaaactagaataaaatatcacaggcaatggtctcagaccctagaagacaagcaaaataaataggatagtagcatacactcagtcttgtgagctctccatgatttgcaaggcgcaatgctagtcctcttaactcctgaccctgtaaagcaccttttactgatcctgcagcagccaaccgttttagagcttcccgggcaatttcagcttgtgcagtagcatctgccgcgtcaataagatccaaaaattccttagcaaatttcactattccttgtacagcttccaccaagttttctttcttagctgttaaattgagaatgtcattcaactcgagccctgtgctatcttgccccatctccctactattgctcatggtaagaaggcattggagagctcttttcagatcattactctgcatagccagatcaaactccaacctacaaaatggaataagatacatgttattcatgcaagaatatttatgtaaaataggagtcatgaactagaaaaacaatatattttagaggaaacagaaatatcaatcatggaaacatatcatacaagataacagaggagaggagtaacaaaataaattcaaatggaattagaatgttacaggattctgtaatttgagttatgaaatgattaaagaggataacaaaatccatctagaatgcaatgaagattgaacatcaaaagaaacaagagctacagtaatgcacatgtacctcttagatatcccaggcaaatgaagtgcttcagtagcataacccatgcccaacataaattgagctaagtcatcgtgatgttctctcccaagtctacttgccctgtacaaaagaaattatatataaaaacagccaacattaaatctgtatagaggattccgcagaatatccgtcaaagaatctcaagacaaatatcataccactttacggcactaacagcatctccataagcagccagacatcggcagcgaataccagggtgacttagagataatgcatgggcacacattacctgtcatgcaaaaaaaaaaaaaggacttaattcctttcacgttttccaggcaaaagaagagtctaaaaataaatgtagggaatcaacttacctgtctattagccaaagaacaccatctctaacacccaccacaaccaaaggacccacaggtcgtttctgctctgtggggaaacgagtaactgccacagacactcctccaccaccaacagcaatctcgttgacctttctctcttccatctctttttgaaatgccgaatcatccccgtcaactctagagtgttttggcaacgacagaaaaggtggcacggaaggagcatgctgaaatgaagccaagcggaccacctggaaaggaagattcaaataaccaaaagaaagactttatcaagacaataaatactgatagaagatgaaaagctggaaataaagtggaaacatgtcatatactcaaactaaagtggaaataaatgtacactttgaaatgagaagaaacatgcatgcagacctaaaaaatatgtttcgagaactaaagcaagtctattgactatctactgattgagttatgaactaaaagaagattacaagtctatgcaagctaacgagaaagaattgtagtctcccaccccaatgaaaggttaacatggaaccca

SEQ ID NO: 14342 - DNA, 19865 bp, Cannabis sativa
  modified_base (14516)..(14521): a, c, t, g, unknown or other
  modified_base (14554)..(14559): a, c, t, g, unknown or other
tgtatgtggatgacatagttattaatgtaaataataatgatgagatctcatccctgaagtctttcattcatacccagctttacttgaaggatttaggggtgctcaagtatttcttgggagttgaagttactcgaagtaaaaagaaaaggtatttttctgtctaaaaggaagtatgtacttgatttattaacaagaacggaaaaatttagagcaaaatcttgtagtactccaataaatccaaacgtgcatcttacacgtgatgggaaactatttgcagatcctgagaaatatcacagattagttagaaagttgaattatttaactgtaaataatctagaaattacattctcaattctcagttcgtgttgttagtcgtgttgttagtcagtttaaaaacaccaaattgaaaccaagtaaaccatatgtagcatatatatatatatatttgtcaaagacttcaaaggagaacacacaaaaaaaaaatatatatatatatatacatatataagagactatttttgatgagattagattacctggcccaccagtgagaacattcagacagctccccccaagagtctgagatgaggcgttgctatttaagtttccatctcccttacagtttatcaatacctactgacaaatctactgatcctccagctgcctcaagcgatttcgcatcctcttctgccttgcctagatcatcctcgcttgctacaaggcccccataaacagcactctgtaaaacataatcagatatatacacgaattaatcagatattgaagagtctaggccgagtgaaaaaaaggcatgcatgaatagacagtaattctctgcatcaagaagagcacatgttctttcgaataaacctccagtcttgtaatgtagccaattcaataatagttcatttcagttataatcatttgttctggtttactgaaaatttcctgtattgttgtggttttgtatcataggcagggcacacccacaccatttatccaacttaatattcagaatataattaaaatccaactaaaacaaataagttgtatgaattaaatacagctatcaaattgaaggaagatgccatgcaagttaaacatttgcttatgatacgtatgcctctaaaacttatacaatattggcctaacaaaataaaaagcttgtttaaagagacaatatttaagctaaacactaacacaatcagttcttgttctagagagcttcttaatcaaattgaaggaagatgccatgcaagttaaacatttgcttctacagaaaatgtcctatttggcagttgctgtagttaacgtcttagccaacgaacgatggagagaaaatgtcaacgatgttctcaacaagtacattttatttaaattctcacctatagatgctgaagttgtacttttgttgtaagtcttagcatattttccttctcacaatgttggttacactttcaggaatgagaaggaagtactagttcagggatatcaaagtacaaaacaaaacgaacacaaagtagggacaattattagtattaaatttcattatacataagaggacacaaataaatatggaagagagttgtgtagtggttaatacaatccaaagacaataataataataataataataataataataataatacaaccattttttcatgtattccataaaacatcatgtattgtactgaaataataatattaaggcttcatgaatcataaaacttctaattataaaatatgctacataacctaaaccaacatattactctatccatcaaatttgatccacactcacagaatttcccccttcctctcttctcttgctttcttccatttctctcaccaagacaaaaatacctaaaccataaactaagattcaaaatcaaatccaaaacttaaactccaacaaatatccacttacgacactaattcatgaactacacttttgtaaaagactttttggtttagacttcagcagtaatttgagcaaacacaatgctttgcaatggtctctcaatcaaattttcaagatacaatcgattcagaaaatttgataaaaacaatggcaaggcataacgatgggaccaacattaaatatcgtttgaccatcgttaaccatcattttagcatcgttttggcaactaagataaaatattcatagtagtatcgttgcagaaaatttgacaaaaataatggcaagcatattaataggaccatcgttgacaatcattttagcgccattagccatcatttagcctcttaaaaatcaggttttcatgctatcattgttaaccaccgtagcgtaaaatttgataaaagctttgctaagcataactttccactaattgtcaatcttatgtaatttttttattttaattttggtatttcttttttcgagaaatataacatctcctcatttctagtcattgatcataggcaagcaacatctgctgtcctcttcttcatatcactcatgcactccctctctctctctccctttccctctccctctcctcacctcatatggaatctctggcttgtttactatacagtatttagaattgaaataaattaatagagaaatgtaacgaaaaaaaaaaaagaagaataatcgaaattaatattttgaatatgttgtttactaaaattgtttggaaatagaataataattatttatcttgtttattttattaggaaacgtaatcggaatatttaaattaactaaattgtcgttttacgctaaactatagtatatgatagttattttgtaagacattttaaagatttctatataatatgaattttcgaatttaaattctactattctattaaagaggattattctattgtttgtatgagttttatgatattttatgtgctgttttattcttatattgaggctaatgccttaataaactttttaaaactttgcttggaatttaagctttggattggattttgaattataaaatcattgaaatatacatatgcatatgtatatgtatagatttatggttcgggtatttttatttagtgagaaagaaaggaaagaaagcaagagatgaaagagtgaatagtacgacagttgatcagactggaatttcgagagatagatgattaatgatggtttaaaggagagtgaaaaatgagaaggagataaaaagggcttaagatgtgagagagaagggagagatgaggtcatttgaatggaagggatagtttggtcaaaatattacagattaacttatttgtccaaattaagttatgtggaatcctattgtcatgactaggagaaactcgtcaagaagtagtaagttcaaatttgatgatgctcgtgatctagttctcagtgaatagatccgactgagacagtcaagtggatcaccaacctcttcaaatctacatataacgtcatgaggaggatactcaaccaaagggaatggagatgggagatctaactaacgagatagatcaaaatataaaaggtccaaatcttagaatcgcaatatttcccactaagtactataaaaatcagtgcaagagtgcatccaagaaccaagatgtgaaggtagagacaaatgttacttccacctctaacaaagatgatgtgctgatgctctttgaaaggaatattcgaggaattcttggatagttataaaggagaattcttcgagaggtggcctgagaaaccttggaaggtatgtccacacaaggaagatgccccttatgctattgttggtaacaatgtagtgcaaattaagttgaatgtgtccctttagcagctaaaggatgttaggcacatccccaacctaagaaagaacttggcaatttgcctaataagtctcagtacactttgtttactctaggagactgggggaatagcttcgataggggattattttgtattatggtcttttagtaagttatccccatttttgtattagtggttgttttaagttaagggtctcaatcatctttttgtactgtgactgaacctataaatataggggtgagggattcatttcaactagcttggcattaaagagttgactctctgtggagataccaatcctctcaaaagattgggaatttggtgagatgagcctttcaaaagctcgatattataacttcgtgactgtttgtattaaaaggggaaacttccaagtctacattcaattgagataaacatgtgcgaaaattacatactaggaaagcagaggaaggtctactttcaaacaaatggttgaaccccagagaatgaaagcttgtttcctatgatgattaggacaaacgactacttcatctcctgctaggaaacactacctcgtgacttttatcaatgatcactcgtagaaggtagtgttttactatctaaaacataaatttgaagtgtttgaagctttcaagagatgaaatgctctagttgaaaatgagatatacttgataaataaaaggcttagaaaccacatatgaaatgtgagtatgaagacatgctatgagcacgggagtcaaagggagagaattgtgtcacatcctcaacagaataatgtagttgggtgtatgagcagaatgttaacaaataaaaccaaaggcattcgtatacagtcgggtttaccaaaacaattctaggaaaaagcaatcaacttacctgatcaattaggacctattagatctattagagcacagaatacaagatgtatggagcagaaaaagcttagaaaagacgaaggatgtgaatgtgaagacactgttttcaaaaagatttgttatgagcaggggattcaaatggaaaaaaatatgtcgcgcacacctcaacacactagtgatgtaacaaactaagagctttccatgaaagaggagatgcaatctctaatctccaacaaggagcaactcgcaaaaaaagagcatgctatcaggtcacgactagttgtcaaaagaatctaatagaaggaatgagttgactacactgaaaattttacttccattgtgaagttcaatactatcaggtcactattgagtgtcatcgttaaagatcttcatcttgaatagttagaagtaaacaccacatttattcacaaagacttagatgaggaggtatactacatcagctattttctcaagaaatgggaaaagaacacggtatgcaaacttgagaaatgctcgtatggccttacagaagcaccaagataatgctacataaagtttgacagctacatgcacaaggaagatttccaaaaatgtaatgttgaccacaattgctattttaaaagatgtagatccgaaaatatcattttactactttatgtcaattgtcaatgtaagttaatagcaattatagatatgaatgatatcaaaatgttgaaaatggaaaatgagtatgatatgaactttggtccagcaaaaaagattcttaagatacaaacaacaagggataattataaagggattttgcagttttctcaatcagagtacatcaaatgtgttttgcaaagattcaacatgacgacagtaagccagttagtacaccttatgcaaggatcagtatcctccaacaggggaagacagaaatctcatgactaaggttccttatgtcttacccattgggagtttgatctgcgtgatggtttgtacaaaactagatatcgatcaatagtagaatagcaaaagttagtcatattaatattggagaagattcaaggatgtaagactacaaaggataagttgaccaagactccggttataaacaatttgaagttgtgttcaacttcagttctcctaacaataccaaaagaactctaatttcatcgctacgagtaatgaaaagagattaaaatcaatctctaagtagaagattgttaaggtaataagaccaactatttttttagctcaaattaagttttatgagtatacttaaagaatgctaaattggacaaatttcaatgggagtcacctaaccataaagtaattttcaccatcatttttatttccaaaacctatataataaaaccatagatggactatcatttataatatatcctaaagaaaagaattagaaagtttagagagatgagcttgtaaataaaataagaatcaagaaaaaaacttgcatacaaagatctacaaaattttgagcaaaatcaatacttaactatggtttgcaatggcactatcaaatttggcctcaaaaatcaaatttttacggtagcctccttgcagaacatttgatctttagtttagcgtaacgacaaaaacatcatcaactatcgttttaccatagtgaaccatcgttttacaatcattttatcatcattttggccttaaaaattaagtattcatggtatcatcgttaagcatcattacataaaatgtagtaaaaacttttgcaaggcaaatcaattaagtcgtgctaattatcgttttatcatcgtgaattattgttttaacatagttaattgtcgttttaacatcgtttaccatcattttggcctctacgataatgttttcataatacaacttttgttgcataaaatttgatttaaaaaataacttttgcatagcatagcttttcatttcattgtctattttcgattacatctacactttttgagtgtgttaaactttaaacttcaagtgtatagaacttaaaattttgatcatctaagtcaatcttcattacaacatcaaatggatggacaaatcgacatatgttaaaattttacgttctacatcctaaacttaagtataatgcaatctaaacatgtagatttgaaaaataaaaactcaaatcaacaatcgaattaaaagttatgcctcacttaaattgttatcaaaatgttatgcaatgatggttaccaatgataccatgaaaacattactttaaatgtcaaaacgagacaaataaaaatttaattttagtggtcagaatgatgttaaacgatggcctcgtaaaaaaatcgtttaagaagctaaattttcacataaaaccatagcaaagtgccattttttttgttcatatcttaagggaaaataaaaaaaaaattataacgcaattaaaactaaaaatcttatagggaggtgttcaaaattataaattagtgtcctaaaatgaaatattcaacaagatatggatttaaaaaacctttagggctacggatggaaatgggacgagaaacacgagcggagtgcacccctatctttgtccctatttacaattttaattgtatgtcgttcccaccctcgcagatactctttcccataggggacaaggcgggatgagacttatttatttaaaaataacgattatttaaattttagtataaaaaatgtagagtacataaaattaaaataaaacattattcataatttaaaatataaaatattgccttgaataaattttcttatatgtaaatgttaagaatatactaaaaaaacaaaacaaaacaagaaacgatatttaagaaaatgaacaaaatattaaatggtcctcatcacgtttaacattcaagatgacaaattatcgacgtccatgcccctatttcaagcacccttttttcaaagaggacgaggctattcacattgcatttgcttccccattcagacggagaatgcttgtaagacccatccccgtgggaaaaatatgcatgtctccattcgaggaggtggaaaactgcctctgaggctacacctcaaaggtgtaacatattgacgtgcatgaggttccatcaatcacgactagggttgtgtttttcttaacccaatgtggatttttttttagtttttcaagcttttcctttttttgaaattaggagagggacgcgttgaacttggaacctcctttatgtgaagagaaatgcagtatcactaggccatgcatatgacacataagatattaataaatctaaaaacataaaaaataaaaccctaaactaaattccttactccgtctaccactcaaacatctttcttcccttcatcactcaacaggcacgcagcatcttctctccttatcgcattcacccaccctcccatatcgcccatgcactcgctatccttatctcatcaccttagacaaaatctagtattttactatcaactattaagaagaaaaaaaatcttatttcgagtaatttcaaaagatatcatttgtgtgcctacaaatgttatcgagaatacattccattattaattaggaattttttttaaacatgtaattttatgtattatatgattgttataaaattgtatattgtttgtacatgttttatgatattttatgtaatttttgttcttattattgaggcttacgccttacgcatagggaaaatgtctcaattcccgaattaagtttttaaaatcttgcttagttttaagttttaaatttgttttaattttgaaggttgaaaccctaccatagatcaaaatttgatctttggagaataagttgaaatgaatgagaaatctaatatcgaatgggtataaaccatagatttagagaagaaaaggtaaacctaggttaatacaaccttcttcacttcctcttgaacagagtctgaaacttcctcgtagctccatcggaatacatggacgtcatcagaatagatggtcggcactgaggagatcgaagagacgttagagagagggtaaaatactacaataccgtcttacatttacttttatgtataaaatattatggtttgtattgtgttagaagtagttattgtgataattaatacgttacagagttttatccaaatatgatgttgtatttatttaatacaatacaaacccattatacaggtgccaagagaaaatacagacctaaaaactggttcatcaaattgtaaagtcacttcatcttggaggaattttcgtagagattccaacaatcaggtacagtctgtataaaacagaaagtgtgaaaggaaaaatgttatccatagtgttgataacatttgcaacattccatcaacatggaaccttatattcagaatcaaactatcaaaaaaatttgcaacaaaaaaatcatgacttttttttcgttaacgaaattaaataaaaataaaataatcaagggtcaggaaactatataaacctgcaacagaaccaacacatttgggaaatcataactaaatcgaacagaaaatgaaaattcaaagcactgaatttacaagatgccaaacaatttcaacacactttaaaccaagaacttgcacatagtttacgaaaccaaacatcaaggtacattgtatgacagaacagattacatacattttaatgtttcttgaccttggctgtttatcacatatagtgtttgtttggtaattaatatataattaaaaataaagttctgttctcgctaatgcatgcacttgcctgctatcacttgtttgaaatatatatatatatatatatatatatataacaatcttttactgtacatatgaataattaattaagtattagcaggaaaagacagcaaataataattgtaagacacccacttgggattaaacataaagggcacccccaaaactctgttgggaagcagagaattcattgaagaagacttttgatcaaacatatgacagccactctcaaatagaaataagaaataaattaaattttttataaatccaaaaccatttcaaagacagataattgaaaatgaatgtaatgaaaatcaaagaaaggagtgtaatgaaaatcaaagaaaggagtgtcatgaaaatcaaagaaagaagatgataacactagaattccaaaacagaagataccaaacgtgacccttatggagaggtagaagaaacttaccacatatatattcatccatggagatcagagcgactagaaagaagatgaaccagttgatgttgatcagatctttgacgattggaatgaggctgtgagagagtttcgttgagtgagagtgtagagaatattacgagacttgataaaatattacaaaacaaaataccatctttttgcaagttgtattgcattaaagtattatgatagattatacatacaatacaatatgtatcccaaatattgtattgtaataaagttatacaatacaaaaggtgcttatacggttcaccaaacttaccctaaattatggatttaaatcgaaatcagattatgtctccagtttaatttgggtacaagacaaaagccttgttatctgtttcaatcagaatatactcttcctcttctgctcgatctttaaccacatacaacgaaaaataagcattaatattatgaaaacatcaaacagtatttaaccacgttagcaaagtacaactgctggaaaccaaagtctgccggagacatatcaaaagaaacaactagaaacgtaactaaaaacacactaaacaatagattgcccatccatcttgatcaatttccttttgtactttcttgatgaagaactgattgtagtcagaggagtaatctcttcgacaacccgaaaaattttaacatccaagcaaaatgagtcattaacaggactaccgggctgaaacacgcacacatcatattcttccaagttgttgtctgtagcaaaatgattccaaccagaagagagcgccgcagatttgcgaagctggttgtagttaaaccttgtacgccattctctctctccatatcgtagaaatacatcttggttttccaaagagatatatttcatgacccagtcagtagggagtaactgatcaagcaaaagataatgacaaccaacagtaacgatttagaagttttaattaatgttttagctttgcataaaactcaataaaattaaatgaaacacaattttaacagacatcattaatgaacaagatccataaggaaataacagttttaccacaaagaatctcttgtacacatgtgagggtttcatgactactattaagccctcactgtttgattctaaaatttgagaatgcgccaactgcaaggcaaagtttttctcatcttcagttacaggccttctatttgatgaatactgcacaccatatggtccagattttttggtaggtgtatgttcagcatctaaatcatttcacaaatcaaattaaccatgttaacagcataattctggaaaataaaaaaaccacagagcttctacaacaatcagagttttcgtggtgggtttgtttttcaatttcttctctccctttacaattcacaatcaggacaaaattagtcatcatttatagatatcaaaagagaagagattaacattgcaaaggtattttatattaatagaacggtacataccggagacgtacaccaattccccactgacaggggaggatccttcgttaagtgtattgtgactgcgtgtggttcttacggggcgagtagaagtggagttcatgccagcctcatcagtatttgggaagtcgaatgcctctcctgatggtaccaagctgccatcgttattgttggatactatgcgacgacgaacagtagattttctgtgaccccccttatcattgctcaggctgataacttggtctcctgattgtagccacagaccatcaaaattcctagactttttcacctgagtgcattcaacattctcaaaagagtcattgttggtttcatcacaagaagttctcctggataccttcttactcaaggtaccatgatcatcctttttatgcccacaaatcttcacaaaatatgaaaattccttctcacacatattttgtccattgaatataagaacctcaaaaacagacttcccactatacttaaagatcaacaaatcattctctgccaaaccgtgatcattcacaaactcttgccagccatgtttgaagtacaacgtgtcaccggtggttgttactcctacactccaagtaccaccaccaggacctttaagggtcacacattctggcaatttctctcttaggctactggaaaactttttgggaatggcctgcaatttcatgcagagtatcatctaaacataagagccagattctacctttaaaattaaaagcataagataatcaaaattcataagcctgatcaaactaatacatgcacaaaggggtggtacacgtgaaactgtgaaatctaaagccaaaataaagtaaaacccaaaatcaactttttttacaggatttgcgatgtctgtgtaagccaaaccctaaaaagaagggcaacccagggttgacatgaataacattttgcccagaacacacaataataaagattagggatttatccaaaaattaaacaaaagaaaaacataattataaagaaatctcagttaacaatttattcatcaaaaagaaaaacaaacaagaacaagaaaaggaaaacagaccagatgccgatcgaaaccagaggccataatctgagaaaagtggatgtcttgaaaacgagtccagtaaatttcttcagcccatttagtgcactccacacacgaatcccccattttttaacagccccacagatctgaacagcttcaaatacaaagaatgagttgtaaaagtagaaactaaacagttgttgaaatcaagtcaataaaccatgtatgtatgtgaaccggaaaaaagaagaaaaaaatgagaaaaaacctccaaaaatacgataaccagaagaaaatagggtataataggctagccaggagaacactggaggaactgaatttgggcgaaatattatttgaactgactagattttggcacctgcgagcgaatataataataccaaaagataagaatgacgtgttactaactatctcaactggactcaaatccaatatattttaagcccaatatggcccaatatcattccaattcatcttactttacaaaaaatttgcagaaataccattttttattagtcatattcacaacatatttcttgtttttcccactctctttacacatttattcacagcggttttctttttttcattttatggggaaataacttttttccaaattttgtgggaaagtttaaataaatgctaaaaaaattatgggaaaaaatagtgattttcttaatgtgttattattttttttttatcttagttataattttgtcttgagcaaaattatttataaaaaaaagattttttttttcggctaaaccatctcaactattactttacttgtactttaccctttaagctcaaattttgacagtaaaatccttcaaattattaaactgcttgcaaatttaaggtgtcatttattttttaccgttagttgccaatatgaactgtttatgtgtatacttttatatatgtgtcaaatttatattgttacacctaatattattattttaaaagtataaaaattatttcaaaatttatagtattttttatttttaaaatgttttatttttatttttttataattttatttaatttttaaataatattaggtataccaatataaacgtgtcatgtgtataagagtgtatacataaacagcctatagtgacagctaactgaatgacaccttaaatttgctactagttcagtaattttgagagttttaccgttaaaatttgagtttagaaggttaaatgcaagtgaaacgatagttaggaagattttgtcgcaaaaaactctaaaaaaaattacatttattttattttttgtaaaaataatcatattatctttgtgtttttttggtacttggtatctttattatacacaatcacttggaacattgaagacgacattgaataacaaatagtcagttttttttttaaaggtaaccgttttaagttagaaaaaaaaatattaaacaaaaatgaagatatttcttttatttaaaaagggtaattgtttattttaaaggcatgttaaactacaacattaacgatttatatagatgttccgaaaaattagataataaaaattttatattagaaaagaaatttttaaatgtgttcttatcccactaacatatctacaaaaagaaaactatatcaatatcaaattaaataaataataaaaatataaaaatttctattataatgtaataactataacttatcataaccattatatatatattgaaaataatttcttaagaaaatataaatgaaagaactaaaattattatgaaaagttacttatcttcatgaagcgttttattgaaaatgtgttatttcaaatcttaacaataaatatagaacaaaacttgttataaaaccaactcaagtaaaaatatctcagaaggtccaagtctctattggtaaaagtgtcaccattacatgtgacgttgttttacactctgtaatataattcaccaagtatactcaattagtttcttaaaaaattaaacaaagcaaaaatattaaagtgaacttattttggtgaagctctttttataatagtgtcatccccaaatctaatcctataaaaaattgtatcaagattaactataaatacatacaaaattgccttaaaaatatactaaaaccagtcaaaacaacaccaaaaacaaaccgaaccaaaataacaattaaatatatatatnnnnnnaaaataacaattaaatatatatatttttttttnnnnnnagcgtttatatattacaatcatgcgtgcagaatcggctcatattttgaaaagtctgcaataatatgaggttgtattgtgtcggcttataaaagatataggtcgtgtcgtgtcgtgtcgtgtcgtaccaatattttaaagggtaagcccaacacgccttgtaaactcatattttcgtggcgtgctcgaactcatgtcatgccttactcatgtcggcccatttttcataaatgagtcaaaccgttttcttatacgggctcgaatatatgttctatttttcactacttttttcaattaataagttaattactaaattatatgtattttgtacagtttcaattattttatataatttttcaacaataatttacacataattatataaaaaaattaattagaatttgaatatttattaataaatacataatgtattattattatttttaaattataagaatttttagcgtattatgcttttatattaatttactcgtacttatgtgtcgtactttcggacttatcataccgtgtcgtatttaagcttatttttttctaatatcgtattatgccaatttttaaaatcgtattgtgacgtgcccaaacaaatattttttcgtgatgaacaatactcttatctctcaaactcgtgtcatgtccaaaaacccgacccgttatttacacctataggagggtaacatgttaatctgattgtaaccaagaactcataatatatagaagttatccttaaggttagcgtcatgccatactcctcgccacccatataaccatttaccttaatggaaacatgtagtaaagataaaattattaaataaaattgtgaaggtaatgggtttttttttataattactgtaaatgaaaaggcttaagcatacatatcgtaaaagaaaataaaaattaaaaaacaaaaacaaaaattattcgattgattttattaaaggcataattttttttttaaaaaaaaaaaacaaatatatataagtataattacactttcttttttttttttttttgtcaattttaggagaaatgaatctcataaacataagaataattaataattttgtttcttgaactttcgacactacttgattctacccttaaaatatctgatttgttaaaattttctctttctattagatttcatctcattatttcgtttaaatattagtgtgtctttataaattaacaattttacctcctaaacattacaactatcaaatcgtaccccctctaaataaaaatgaaacattcaatatttttttttagatcttaaaaaattaatttatatcttataaaaatattttgaatgattaaacaatttaaattttgaatgattaaaaaatttaaaattttaaaactaatgaagcgatttaaaaaataattattttttattaaaaaatctatttaaaatataaaaaagtatattaaaatttcaatatcttgtataaactcaagggttgtttgacttcataacttaaaaattgtttcagtttttaaaaatagaaaataacttttaatactcttattaaattttttaataatttttaaaaaattttaaaattattaaaaattataattttaagataatttttttttaataaaataggacaaaatttagtattgatcaaagtttagatataaaaatattagaaaacaataaaataatcaaaacctaacaagagtgcaaaatcaagtagtgtcgaaagttcataaaataaaagtactaagagcatctttagtattgttttctattttttgttttcaaaaagttaatttaaaaaatgagaatagaaaatagtttttgaaactttaaaatacaagtcacgtttggttagtgctttttaaaaacaatattgaccaaaaatgaatttatttttaaaacagaaaacaacattttgttattttcaaaatacttttttgtaactttattttctgaaaactgttttaaaaaaataaagccaaacaagctaaattattttcaaaaaacaattttatatttttaaaaacaaaaaaacaattttttaattatgataccaaacatgcactaattattttaaaaataactttcaagttttttttaataaaaaaaggatgaaaagtaaaactacttaaaaattagtaggaaaaacaaagccatatttaatgtaatttcccctaattagttaaagcttccacgccgcttccatccacccaaatcagatgaaagaaagttgcacaaatgaggcagctagaaggaaaatttaatttagcaaacgctgaaaactaaactcattgagacaataaggcaaatgcagtcgaatttgagcaaggaggctaagttcaccacaatgtattttccaggaaagttaacctgctgtgctatcatacttgtcttaaaggacacatatataataaaatagctaatatgggtagaacattacaggtcacaacgaaagatgatcgctagtagatgaaatcagagcgaggttattagacgttgattctccaacttgatgatccaaccctctttttcccaccccggatatatgtacacgcatttcacatttaccaaccagttcgaaaatgcagacgtctcctattttgacatcgtttccacgaacaaaagccatccaacctccacagaatgtgtgcacaagtcgcccttgcgagtctgggacagaattaacagtccaacactctccattcaaattacgaagtaaaatctcagttttataattagggaggtgcgctatagaaaactggtacgggattttctgcataaaatgaaacaaaacataaagtttcatatcttctgcacaggggttcactaaccaacaaataaatcaaatttagttcagatctaaaaaacaatctccaataaattttacgagaagtataacccagatacaagactcaccaaggtataagaaccgctaatgttgaatttcttcatgatcttcacgaagttggggaaacaagaagagaaggatcgagctgctcgttcttcgtcaagtgctaacagcaatcttggaccacttctaggttgtgatcctagttcatcttcgacacctcttgacctgtgaacaactgtacacttttacagtttaaaactcttttcaagtccaaaatattaaggagtataaacatttcaattatacaagtgccacagccttttaacgatggtaagagccaacaagaatcactattataagaacaccataacttaacatgctgttctgcgaaattggttgtgcatcattactactttctcctttccttattctaacaacaattaccccatttccacctttcaacgaccagtaaacaagagccataataaaatagtgtaaaacatacaagaacactgcaaagtacaaaactagtgtacttagtggcattattttcaagtattacaattggaacactcacccaactttttattggttgctttggactgagagcaaagtgcaactttagttaaagcttttgacgcactgctgcgtttctttgtatcattagcatagggagcctccgtaagcttctttgaaacttttttatcagatatatctaccagttttaaggttttagaataagccttagaagagtttcccctcagtttctttgacacacctttgatactcttatgtgatgtcacagcatgccctgtgttcggcctactagaagtaactttaccactttggcagtcaacgtcttcatctccaactccaagaatgtgcacacgaaattcacactcacccataagttcaaaaatgcagacatctccaatcttgatggcattgtaacggacaaaagccatccatcctccacaaagagtatgacttgtatgaactctagtagatggtacggaattaactgtccagcattgtccgttcagattttgaagtacaatctttactttgcaatttggaaggtgtgccattgaaaattgatagggtatgttctacaaaaagtaagaaacacacatgtacaataaaccaagaactcaaacaaatatactaaaagacaaataaaacaaaacgaaaacccaccagagtaaatgaaccgctgacattgaagcttttcattattctcacaaaataagggtagcaagaagtaaatgactgaaccacttcatgtgctgaggacatttgcacacagcctccaccatttacattaaatctgtctccattgctacataaactctgcaaggcctttgctttaaataaaactatatccaaatctgcaataaagaattatcactttaaaatctgttagaaaataaaataattaataataaacataaacacttgttattcaagaaattctttttcacattgataaaagatctttaagctaacagaattttataatacaaatagtttatgctataaacagggtgattatgtgcacagatgtaactacataaagtttagattgccacaactccaaaatgataatagctcttatctagtctacattctaacaggactttatatatgattcgtctctgctgtgagggaaaaaaaagagcttctataaattttatattgaaaaaccaagagaacattcagccaccttaccaggcctttcatcacaattttctgactgggaggtaatcgcataactctttgacaattgttgagtttcttttgaataatctatatgttcacatggtcttgtcaccccatcacaatggcatccattctgacgacataaatccaatactgcttcctgggttctgtgaatccgatctggataaagttcaggagaaccctctctcattttctttagaacaccttcaacaattctatctgaagacgagataccatcctcccttactcttttcttccccaaatcttgatcatggaaattttgactgcatttggaatgaaatgccacctctttctcacatgcactttgatcaaaaatttgcacagtgaaatgcaactcgctgtcataccggaagattaaaaagtcaccacattccacgtaattatctctcacaaatgtcggccatccatgatggaggaataaatcaccattgttctgaatcaaattaaccagccatgtcttgccgctaggaccctctaatgcaacagaaccagaagatcttccttccaagtgtttcatgaatttcgtaggaattttctgcgatagattgcaatgtgtcaccctccaacaatgcaacaggtattccaccaaaatactgacaagacatagtaacgtttcctttcacgaaagcgaaattcaaagaaaagaaaacccagcaacattgagcatagatgaagtcttgaacaatctaattcta

SEQ ID NO: 14343 - DNA, 5841 bp, Cannabis sativa
agtacatcagtccactaacactttctctgatctagttttctttcttctacttatcatgtctgtttttaataattttctttgtttctttttacctaaggaaatttatttcataagagggtcaatacagcctttgcaggggctatatatacacacaacattcctagtaaaggatctcgtgagctacgattaataattgagaaaatgaacagcacaatttccacacaacatgacacaaacaaatgggtctattttactgaaagcacctataccttaattacaattaattaattaaagcttgagtcatcaaaattgctctgtggagggtatggtatcgttgagatcccaaacccggactgaataaactagtcaagaaacgccacgaggagcacatctgctgctacggtgttatggggcacactaaataaataaatatagtattgacagtttaagaaactgttcgcccataacacacagaagcaatataaagattctttgcccacttttcctgcaagacgcataagaaagaatacttcagtccaacaaatcaaagaaaataacaaaactaaactactatgcaaggatacccaattcaccttgacgtgtgcactaggaaaagcagaggtgcgcagagtctcttgcgtttcatcttgaggcttcttctttggtatgctaagaactaaagcagcttgatcccatgtcgcagctgttgaagtgatacgatatccatagtcccagcgacgatgaatgccttcacttgggtaaagaaaatccagttccaccacctgaatataaacaattttaaggacaaaatatatcagaagatacccttatgatccgtaagacactggtcagggggcactttcaaaatcaaatagattacctggtcagaaaatcctgcaccgcgcgacataacaactccccatctactcccagcagtggccattgatgtcacatagaatccctccctccattttttgttaatccatttgaaagggaaagtgtcactgaccttgtaagactgctgcaaatatggcgtacctgaatttaagagtacatttaagtaaaacttccattgattgtgagtgtactttgcctagaaaatctaaaattagaaatatgatttaaacctttcgacataactacaagggagctcccgttattagctccagctattgcagttatatagaagttcttgtcccactgctccattatccattcctgcatacaactaaacatttgagtttgccaatcgatacaaatgccagataaatacatgcccacgtggaagttaaaaataggcaaaagttttaactgtagcagagtaatatactctaaaagtgagaaacatattgagcacgttaaaactaaagcaacattctaaaccttgtgaagaaaacagggtgatagttcataaacttgtgcagtgaatccagtgcctgcatccataattagagcccatagattttgagaagaggccacgcaactgatatacaaaccatcatcgtttcctttctcaatatgctgagaaagtcttgcatcagcaacgttataatggtacctaaaacagcaagaaaacaaaaccttacaccataaccttactgataagattccaatattatttatattttctgctctttaaagaatataaagtcaaagtctgaaagtattaatgaagataataatcattgacagcacaaatgaaaaaacacaatcaaaactaatacgaaacaaaagtgggaacttgtgcaataaatataatctgaagaatgaagctaaaacataaacaaaatgtgactgaaggacaaaatatacctctgtttcattggccggcgagcattgtagacactaatccattgtgttgctggcatgcccattctaatcttcttcttcggttgttcatcttcttcttcctcgtcaataattagccgtgacctcttctgaccaactagattgataagctacacaagatgcagagtcctagttagatgcgctaaacattagcagataggtcaatggtaactcaattacaggtacaaaatagatttaacaccttctgtgcaccctcagtgttaattgggcgaatatcaggattgggaccaataataccatcaaaaagggatatgtatttcgcataattgggttcttcatcaaactttaaattaaccacatattcaacaaactgtcgaaagggttgtgggcagaagcaacataaattctctggagatgttgccatcttcttcttgcaaacaaggaaccctttattatctccctggaaaatatcatcatgttaaaaatatataactatcagccatgaacatcttctaaagtttcaacaaataaccaacctggtatccttgccaaggcagtctgcctcggataagaaaaacaagtgtataggcaagagattcaagatcatctctcctgctacaagttctccctaaatgggcgtgcacactagcataacgaactgttcctctgttaagcaagaacaattataaaattaatataaagggggaaaaaaaggttaggcacaagcagcataataactcatatagctaaccaaaaccatagtcagtgtttgtacctgaatatgtctggtctttggtcatagtcaacgtggcgaccagttgtactatctcgccatctagttgctgataaacccaaacaaatttatagaacaaaagttgagaataaacatatacaaagtttagtattaataaaaaaaagtcgtttgaaaactgtacccaatccaagatcaactaagaatagctttttctcgtcaggagtccctggaggaccaagaaggaaattctctggtttgacatcgccatgcacatacctgcaaaatgtatgacttaacttttataaacatgctttaataagctttggaggaatcaaaactgcttctttaacttttataaacatgctttaataagctttggaggaatcaaaactgcttctagataaacacacatcataaaatgacaagcaaagaacctcaaagtccacaataatcttcatcaaaacagcagcttaaatgttctaaatttcaaagcgagtcattgctacatcttcaaataaaacacacttataaatctctctattagtagtaactagtaagtatggtctaaacatctccaagtaaaaacccttctaaaactatatacaaaactaccaaaatgttaaaacaaattccatgaacaaaccctctaaattttaaatctaataaatttgtaagaaaaaagagagggggagagacaggagtttaagaaaatagtaaaggctgtgaacatcttgcaagggaagaatcttaccctcgagaatgcatcttctccaatattgatattgcttcaattgcaatgcatgcaaccatttcaatggacattctaaatgtaacaagaggggagaaatgttaataaaaaaagaaaggaagaaagtaagaacaagcaagcaaaccatgtacttgtcactaaacatttatatattcaaataaactcacgtgtgagagttattattccatacatcccacaagcttggccccagtatatccataacctgtgagcataattagacattaaataagcgagagaacaccgtagccattacatattaggcaaaggacacacataccatgatatagtagtcaccatgccggcccttgtagtgtactctaggtacgccatgactgccaccaagagtgctgtacaagcaacaacaatactcattagtgtacctattattaatggagagctaactgacaagagagaaaagcttaaactcacttgtaaacttgccactcgtagggtggcccatagttgcatcctttactagttctatgctcaaattttaaggccacctaagacaattataccatacaaagtacatacatataggagagtcaaaacaataagtcaagcaagaagacaaactcaataaaaataatagctcaaagtgaggctatatacctctacagctccagggccagtatttttatcactaccgattacaggagaaagacgccgaccaacataaacttgtccaaatcctcccttgcctaattttctttctactttgtacaaaggggaaccaccaacttgaacctgccggaaataaataaattactgcttaatgtaaccccatgtatctaaaataccaatttataatattcaaaccgtttcaagcaatcaaaagattctcgattgactatgtaactcataatttggcagaaattcagccatgagcctgtgatattagagactacaacaacgatactgtgttatgagtatgatctattgataaaataagggtgacaagtgaaccattaaaagagttgggttacttaaaaacagcgttagtaataatataacattatgcgtttattaatataatttttttcaatcatcctatttatgttttttttttctccctgccccttcatatcaatcttaacttgatttcttgcctaagactccaaatcatctgaaaatcaatgatatctccgtctgtcaaaactaaacattattcttccaatttgagaaggtgggttatgattatctgcattgtcaacaagcaattcaaaataatagtattgccatccttcggtttaacatctctaccaaaacctaactaactgtgtatttagataaatgttcaagtgtgaattagtcggagggtttaaaagttatttaaattatactagtttaacaatctcatgacgttttgagtgaaaaataatcagtaaaagaaacacatttaatcagaagaagaaaccaaaccttctcaggaagcggtgcagtgctaccctcgtcgtcaccgacttgaaccttgtcgttactccgagccccactatcttcatccatcttcttctcccctacctcctccttctccgctccagcggcttcaaccccaaccctttccttttctagtcccctatactcctcctctttagcctcagccggtgaagcacctacgttctcatcaccgaactgatgtccttgcgatttctctagttgcttactattatcgttcttcggcaccacagccgctgccgccgctcgccgtcgccgccttgttctcgtggcaatcgcctccacagcctcaatcggactcgactgttgcttcgttgctgcccggcccctgcgcgctccactacgcagtaccggcatcgttcatccttcgattttcatcctcctccggaagaagaaaacgacccaaccaacttccaagaaaaaatcagaagagcacacgtcaaatatatagtccaaaacctccaaatctctcacaaaatcccccaaagcctcacctccgatttcgacaaagaatgtcccaggacaacgatgtcgatctcagtacggaaatcaatgctccaaaacctcgaaatttcccttccagaggcgaaaaataacgactacaaagcggattgattgagatcgtagcgacaatctagggtttcgttatggatcagaaaagatggaatcggagaagaacaacaaagggcttcttctacgtacttgcagatagaaaaaaagaatagtttattaattaattaaaaaaaacgaaaaggcttttatagagtcaattaatctgggatataaatcaacggttgagattgagttctgaagaaaaactcaggaaggattgagtattttcggaatacagatgcctcagtgctgttactcctgtaccgtacaagtgagattgtgatattctgtgagatggtgtacagttggatcaaccacacaagtccaatttcagccgtttgattaaaatattttcttcatcttttatatcattttcaatatattagagttaatattatctaattattattttaaatttatt

SEQ ID NO: 14344 - DNA, 5365 bp, Cannabis sativa
atatatataaaaaaacaaaaaaaaaaaaaaatcctattttaaatgaacaaatttcttttctttttttttttctctaacccaatcaatgactaagttgaaggtgtaataatttaattatggaaagaaaaaaatatttgctctcttttactattactatacttagttattggttattattaggcgttttaaggatcaccactccatttcaaaaaacaaatatgtatttgcaaaatttaatattatttaaggtaatcattaatctcccttaataaaataaagcatttagtatttattttttgtacctcatatactttttttaatttatagtttgacttttcaaagtagtttttatgtaaattgttatatgatttttgttgtaatttaagttgctctcctaactgtaatagagattttatgtagaattccgtaaaaatatatataaaaaaatttctttttgttctaaaacaaatatatatttagtattaacatagtttattattttgattctttcattgctgtcaatttaatggaattttagataaaggtgtttttaagactttttatatataaatatatattttttttattaattaatgaatgattatatctgattcattattaataagaatttccgtttatattttaaaaataaataataaatcattctatcttaaaataaagttgattaagaatctaatcaaactcagctttaattaaaaatgaattaacatcccctttttatttttgttttattttaaagggaggctcttgtgtactatagttacatctttattctaaaagtccaattaattaacttattaagttacttttaaaatcaaaggataaaaagttaccaactaaaagcacaacattatttatagtaattaattaattaactatatatgttggttgatgactatgtataaagataaaaagcaaaagcaaaagcaaaaacttattagaagggttgtttttactttatctttttttgtaatgtaaggtactatactgtccttctcaatacgaggagaagagatatattgaaaaagtttcaaaagactttgtgttataatcatcatgccatacagccaagcatatatatatatataaatatatattatatatataattaattctatatagtgcttgaagccaatgatcatgttatgtgattaattgagtgatttttcaacaacaaatcttctaacccattatgtggtctaatacacaaacattttccaatatcatatatatgatggtggatgatagctagcaagctagctagctagctacaaaatgattaataataaattgcataaattagtagactaattaattatgaagaatatatcccattatcaatggctaattaatcaaataattattaattaataactaataatttttttggcaaaatggaaaatgacaccttaaattgagcatttgattgagccttgtttgaagctatcattgcaaatggactagattactacttagcctattttggacctgatctctttatttatatatagtgtcttggttcatgtaacaatatgaactagtctagtctagtcacatatatatttatacacatctgtataataatgataataaagtgaaagtgcccatgtgtagtggtagggttacttttacagtgtcatcttaagggttcgaaatctaaataaaaacctaattgttaatggaagtggtgtttctgtgtgataagaacttttgaagtgactattgataacccaattaagatatgctgaggtataagacctttatagttgacacgtgatcctcgaaattgtcaagaataattgaaaaaatgaagaaagaatctacaccacgtgaattttttttttttttttaaaaaaaagtgaaagtgcctatactcttttaagtcaagattggtagtagtatataatccaattaaattcaaacttgtcactaaatgtacaaatgtaccagtcacaaaaccaattgctatctttttttctcttcacttttttaaagcacatgatcgatgaaaataacctccatttatatatatatacgtacgtacatatataatgaatcaaatttcaatttgtcaaagcaactgccaataagagaaattagcttattagcttatttgatctttctttataaatatattaattaatccatcactttcttcttattacgtggatattcatagatattttgtatttgccacatcaaattttagagaaatatatatacatcctatatgtataaataattaattaattagagttaattaatcgtgtacgtcatgatctccaaatattatctatatgatacatatatattatatatatttatatattaattacgtcgtacgttgaaaataaaaacgaattcatgcatgggaatgaataaatgtttagagatatatatacgtatacatttataatatattttctataaaatagctgcctgtgtgttgtaaataattattagctatatatatatatatatatttatatgtatagttcatcgtgcatgcattttcctgaaacatataataattattaataatgtataaacctctttctcaaattaatcatcactaataataaagttaattattcgaaatatataatgagttgttgacaaactcaataattagttggcactttatataatacgtatactataattacatacaaaatattttaattatttattcaacaaagtttggtgggaattgtacgtatgttaatgaattaaaaaataattatatgtagaagtgaaatactagctaattatgtattaattaatcatatcaaacagtattgtgtatagttgattttgtcatcttttgattgttaattttaatattaattaaccactattaaaaaacaaaatagttagattacaatttacaaaggtactaatagaaaacatacggtatctatatatacacatatttattattgtttgtatataataaataatagtatttttaaacctagcaatctatatatatataggtagctatactatacccatgtgcatgttttggactgttctataagatatataaactaaaatattaaaagtgcttaattaattgattaactctactttttacattgtttatgtatatatatatagttgaaactaacttagctcttaatcataataatttaataatttaatacatataataaattatattatttttaattctcattatgtatattgtgtatagactgttaactatataatttttttatatatattcttactatttttatgattaattagctcttgatcaatgatgattagtaaggcttttgatcatcataatcaaatattaaatgaaagaacatatgagcatgatatagaaaagagaccaactaataatgcaatgtttatcctcaattaatatggccaaaagacccacttatatgttattttataggctgggcaaaataagaagacattttcaaagacataaaaaagtgttaatgatatataattgtaccaattagtgtaggaaacaagcattatcaaaggtcaattaaatgttggacaacttaaaaaggacataaataaatatatattatacataaatattatatatcttaaagaaaaaggctgaaaaagcatgttattttgggtctaattagcttgcaaagaagataacaaatttatatatcttaattatgtctaatcaatatgtctaatatgattattagtctaaaccacgggcaccttttttttttgatgagttttggcattattttttgttttattattattattttggaaaaaaaaaataaaaattatctcatattaattttagagtagttcagttcatgggccgggccttcttcagccgtttgatccattcaacggtttatttgtttcccagctttttgagcaatgaagcccttttttagggcccattaagtcttttgataaaggatgtctttttcgaaattattatttggaaagaaaaatgtaaaaatagaatgatgatatgagttcatatatacattaataatctaacgtaataaatttacacttgctgaatattaattataaccaatgatgttattcaattaacatgcattttttttaattagagaaataatataatttttttaatcacaatacgcatgctaatttgtaacaagaaaagagcaataataattaagtttgcttaacaattttgaaacaataatcgtgataatcatatatacatgaattctattattattatttatttatttattaaaaaaatagtaggaaaactatagcttttgaaacagaatttgtagtatctttccatcaaatataatacaagtgaaatttgcacaaagtaattaaaattatatttttttgtgtttttttttttttttacattttattgtttttttttttatatattttattgtttatatatatattttttataaatttgtgactttttagatgaaaaacaacattattttattattttatgttgctgcaatgttatattacattacaaccgtattttataaaacaacctaaacataacggtcataatcagaattttgtaaaaaacataatttttttttttttggatatttttaaaattaatctttatatataatagacgtagagaataatagttttttcggtcttttaaaattttagagaatggctacactttatttctatataaaaaaaaaataatgctgattaagctgttctaacttggcaaacttgccatgataaaccatgcaccaaaataaatttgaaaataatttgtattttattgaaaaaaaaaatgcataaaataataagagtcaacaccatagatatagaaaacgaccaatagtgtttcactagtgaatggagccccaaaatacagcgtcctcaaattatatacaatgtttatatattataaaagacattattagtttatatatatatacaaaattgcaatatgatgtgctatttggtatgtccgcaatgttaaggtacacaataataatttaaataacatcaaatattatataaactctataatttattgttatgcagattatgactcttcttttactcccttcatcttctgctagtgctacccttttggtcccctcctccggaagactagattaagattgattctaaaaaaattggagagtgggttgatgagtgttgtagcattagctcgagttcacttgggaactattttttgggttgcttccaacatatcactttctttgatctccttattagtgaaattgtgatttgtcaattggctcttgagacgtccactaagtgaaagtattgttttatgttaattgagagcaactctgagattattatcaagactttgcaa

SEQ ID NO: 14345 - DNA, 6338 bp, Cannabis sativa
actaataatacttggaaccttttgaaagtggtgatattttctaaaaattattgtattaaagtatatggctgatacataattacattaacaatgaatagagtgttagacatcactagtacctttatacctttagtatttctctttgtttaggtctcttttggatttgcacgttgagaactcaaatctcaaaaataagcttacacgaggattgcatttaacttgggaaaggaccttgataacaagtctttggaagccaagattacataaaataaaaataaataaataaaagaaagtctttggaaaccagttttaactttcaacttcaaaactattgatcacctggaataaccaaattttaaggttcttaataaagttaatgcaagataaccagtttgataaatttatttgatgaactgaattaccttctaaattaaagcaaaggaaaaaagaaaaatgctttcagtaaaagggttgataccacgaaggttaatgtgagacacttacaaaagtcagaaagattatcgtggaaaatattttgtttttaacacctataaaatgaaatcattttcttttacccaaaacggtgaataaataaatagatacccacccttcttggaataggtatatttggtttcaacttttaagatatgatccataactccagcaaataaaaaatttctttctatttctaaacaggacaataaaaatttcaaaaataaataaataaataaatacatgtcttgcccagttaacactatagggcctatggcaataatcctgtactatcaagacagctatatatatattaggccaaacgacagaatgagagttgaatactcccttcaaattacccaccataccaacccaccaggccacccaagcatgaataatattttgacagagaattggagacattgatgagagagggtgagagcaaagctaattacaatgagattttctctctttcttttcttttcttttcatttttctttcttttttctgacaacatattagagggagattatataaataaatataatatatatatatgcattaaagaacgaaagcaagattctacacaagcgaacacacatcagaggggctaatgttgctccagctacaaagaaagaacactctgagactaagtgctttctgctggaagctcacccaccgatccaagattgttggcaaacttgggcctccactcggtccttcccctcacaatctcacctccattctccagttgaagcaagtgctggcattcaacaccgccaggagttcccaaatctcctacaccagcatcggagacagtggtcagcgaccgcagcacgctgtccctcccgcactccctcctgtactcaagagtcagagatgagagctcgtgactctccaggactggcagcggagcactctgcaacaaacacaactatgtttgagaatgagcttgtaaatgacaagtaattaaatccagggatcatgtttcaacaaaacaaataaatgaagaaatatgtctacgcttgaaagttaagctagaatcatttccttttaatttctaatccaaacacatcctttgtatagtattaggaagtcagaatatgctttaaaacagtcagaatttatctgaatactctactctcatcaatcattttacaaattaaaactaattcatgggaattatcattgaaaaataaaacactactcggcctagctaagaccaagctcatcagccatacccataagcatctttaacgattacagtacagtgctgactatattaaaaacttaaccctgtacttaaagatgcatcacgaccaaagggaagacaaaaaaaggataaaattaaattgtgtcttacacacctcgaggatccagccaatgtatttgacattgttaacatgctggttgatatccaaatcactccatctaggctgcacaagaaaaaaatcgaccaaaatgaggaaaaaatatataagcaaggaaagtttaggaaaaggttaacaagatgagaaaactgagtttaacttacagttaaaccagtacgaacaaagtctgctgtcttgtcatcaagctttgtcagctttctaccatcctcttcaacaacaggatcaaaattccaaaaataaggctctatttcccctctaacttcttcaggcatctttgataacctcctcgtcaatttattcatcatcacccaaacactaaaatcaaaagaacaatacaaaacaccaagttaacatcaattcaaccaataaatcatagaaggacaacatttaatacataaaaagtttactattcttaagccaaccaataaatcatagggtgatgccatttaaaatatagcaagtttaatttcaagtcatcgagacattttcttcaggatacagaatatattgaataaaaaattacaaagatacaaaatgttaggatcgaaagaaaagataaataggctaacaatttaagcttagtacaaatttagacaaacagatgcgtgcttctcctatcttagtaccaataaatatacaacttttaccaccaatttgccagtaataaataccaagggaaaagagaaagaaccatccccgtataatatttttaaccaaaaagaaatacctggacgctcttgttaggattgcaccagttccagaatcacgaataacccaatctcgacgcataccattttttccagatgcactcacccaagtgtccacttgaacaacatcacccctgcaaagaaagttttgataaatttataaatctctagacattattaccacataaaactgattttctgatacagtagaaccaaaagaaataaatcataaaatatctcacccacaatatctaaggacatacatataacatttcagtttatggttcaaaaatctaataaccctgacacactcctagtttcaaagttctatctgaaacctcaaccatgtgctcaagtctatctagcttcttcccttccaaagaattaacatcaaaatatagccatcagaatgcagaattcttgtcacatatctcagggtaacaaattgatagagttcacatacatctcattcatcgaagtacttattacatgagcaaggaaggttccatgaatcaacatacatatttatgtttagtaacaacatcaaatcacctgagctccaaaaagttataaaactacagcacaggaaaaaaaaaattacttaccaagtcggatagcgatctatcacaacttgcattttagtgactacccatattaagttcttctttgtcatttccggtgttgaaccaaagccatcaccaagaagcccagcagactttacatgattaagtgccgtttcctaaaacaaacaataagagggggcaaaaatgaaaagtgaggagagcaaatcatacatgttctcatgaagcaaattagtttttttaaaaaagaaatgggtaaataacagaaacagcaacaaaactacatgtacagcatgaaatacctgtaaatgattcattaacgtctctatagaagctgttcgatcggcacctatttcatatgatctaattgaaaagttctgtctgaaaacaagaccatcctgaacaattcttcctaaatcaaatgagtccataagcatgtcgggccgtttgggtttccaatcaagcatcatccactgcttttcagcagctaaaaagattgtcgtaatagcagcaagaagcatactccaatcaggcaattggttaataaaagttcgcggatgagaatgagaggatggcatgtcgtccccgctcttcattccttccacagaactagccaaaccaacagaagtgccattgatttttggcggggcttgggcatttgccttgactcgcaaagagcctgaaccagattttgacttgggtacacctaaatttgtcgctccaatcttggaaccctttgagccagtgttgggagacggggaaggggaagcagcaggaaagaatgccgaagtagcagcagtggcaaccatgatgagctttaaaaataaagagattcaattaggatagagtaccaagaaaagaactaacccaagaaaggtgtttgttacctcatcaatgtaaaactaacaagagagaagtgcaaatataatagttatcaaaatgaaataaaaaataaaaaatgcgcacaagacacggccaatgaatagttccggcgatacaactcatacacaatcaaagttcagaatattcgttaactcaaacacaaactactacagagatataaggacaatactcaaattttcaaaaacagaaaataaatataattggcatcaagcatggactgttcaacaacactaatccgaaaattgtctaataataagcttcccatgctttcaacgagtccaatttttttaaaacatgtataaatatatttatatatacagaatatattcttctaaagaaaaattgcccacgagacgaaattgaattggcccttaaaaatggcctttttcttctcaacgatcaacaaaaaaactcatacacaaacaatcccggagcaaaattatttgttttctaaattaaaaaaccagaacacttacataaaacacgattataatagagtgaagcaaaaataaataccctaatttttttttatttaaacggatatctgaagcgataatctgggcagatctgggcagaacacagaaagtatctaaaagaaaaatctaataacgtgccactacacacgcacttccacacacacaaacacgcatggagagagagagagagagagagagagagagagagagagtcgataactttctataattcaaaggaaaactatccttcaaaccatttcaatgcatccacatagccatggaagtttcaaaacacaaaaaggaaatacgtgaaacatcatttgtaaacgcatttgactcaagagaacacaaagaaaaagcaacaaaattatatttctgaaaacagatctctcaatttaagaaccagagaaacaaaacttcaccaaaaacggcttaacaaaaccttttccactcaaaatgcaaacgttttccaattttaacaaagatgaacaaaaccagagctatatacctcctctcaccccctaactttctgggcaaccaaacaaaagcctcagatcagacgccaaatagaaaaatagaaaagtagaaaaaacgaaagaaaaatgatagagaatggcggcgtccgtacctctatcagagagaagacccagaagaacaggaaaggaaagagatatatatataaggaataatgcaggaagaggaagaagagaaggactaatgcgtcatttgggatctagaagcttgtagtttgtagtaatggttttcgactttgtttattctccttcttcttcttcttcttccttggttggttgcctggtaaggtttcgttaagctagagagagagagagagggagagaattggaaataagaaattagggccagcgatttcgtgggtggtggggaattggcctccacccacaccctgcttattatatactctctacctggcgatcccgcctctccttttttattattcaaagttccattttccaaactcaaacaactcttatttacttatttgcccctcccttcttactttgcctcgaattttcttccctttttttttctgcctctttttcaaaaataaacccccccttttttttaattaaattaccaaaattatttatacattaaaattcaaaaaatatatatatatcggaaatttctgtactacaacgggtaatttggtagacatcatgtctctttcggcatctaaaactatttatttttatttttttttttttttgttataatcgggtatgttgtaaatatttatgatatttattccacatagtcgttatgggaagacatagaataagctttagagaaattttttctctctctctgtgagtgtactgggcgtggtgtgagtgtacgtttccgtatgtccggtacggcggacaggggtagtggcctgctgccccctgaccctgattcagtggtcctagggttcaatatcccttttgctatgaagcaatattacctcattcctttttttcagccgcctccttcattttctttccattttctctgtattcctctgtcacctggtggggttttctgggctgctacagtcatggttattgcagggaagatgacgattgatgattctgtcgaagctgttgagaatttctccttggatgatttttctattcagattacacccgatacggctgctgcgaagaacactcttgagacctctattgttgggcgtttcttttcaaagagggagtactcaacggctacaatgagaaaagtgctctctggaatgtggaggttgcagagggg

SEQ ID NO: 14346 - DNA, 4932 bp, Cannabis sativa
gagagagagagagagagcacaatccctgtcactatagttttaagctcaaaaatgcttgtataacaagcacttttccagaaaacagggaacaaaagtgaaatacaaagtaagaatactgttacaactcacctttgcaatactggcagctcacagcctccctgccaattttgtgggagcaaaaaatgaagtcaataaattaagatactaaaattgaatttatggtgtttgagagtgaaaaaaggaaaataatatttatttaaaaaaaaaaagacaataggatattatagaagtcaccagcaacatgaaaacaatgaaaacagttgtatatcctacaaccagctcttcaaaatccacattcaaaagcaaatattatatccacttcctattgtatattctcacacggtaatagcagaacaatgataacaaccagaaaatcccttaaccaccaatctgagcttcccttccctaataccaaaatgtgccaaaggaaacttaataaaaaaatataaaattaacccttcctaattcctgtcacctttcaaccagaaagtgtaaatctgtgtgcgggttggaaaacaataggaccatcccacgctacacattaaatacaatttatgtgcaatagaaactcctagtttacttacagaaaaatctgtaatcaattcaaaacaacttaagatggttttttctgttttttcatcattctgttatgagatgaggaagaataaatctttagctaattgcaaataagtaaggacccacacaccgcttaaacgttacagaaaagagaaattatcagagaaaacagcacatagatgagtaaataatacagtaacaggctagcaacaggcaaatcaacaagtgattaataccttattagaacatctttgctgcagtggccacactgataatactcagacctttcagcttttgcaaacaaatatgcaaatccccttttttcttgagggctcttcttgactctaccagactcagtaactttcccatacttcaaatcgttagctttccggccaactcttttttcctcaaaatttttcaagagatgtaaaggaacataagattcctccagccaatacttcttcctttcactagaggattcttcaatcactgacccgtgttttttaacaacatcagggatagctcttctctttccaccaaaatcaagaagatatttgaccagtcccccttgaatgcacttcctgcggatgataactttcttgaacagtctgattgactttctagattccttatccaatgcagggagagagtgtgtattctcaatctcatcccatttaatgtttgaatcaagctctctaacctgataatgtaaaaagatttatgtatcacacattctacaaaccaaccagaactaagttgtacttgcagtcctaggcagtcaaattgcagagtagcatgcaatagaagcaatatacattgtctatatacatatatatattttgaggacaggacagagatgcatatacataatcttaacacaagtttaatgtataatgatcccatattatctcctgttatttagaggatattgatcaagttttgtaactttaattctgtctaacacaattttttcttatcctgacatattatttactatttagagagcattaattcaatttcaaatatggtggtaaattgaagcatccaaacatcagtgataggatgaaataggttggcaggttaaaagacctggaaagccaactgctctgcactagtagatgtctcgacagcaccttgccaaaccacatatttgcttcgcttagcatactctgaattttcggggtaaagtatgccctgaatctttgtacagccacctgcagaatgtaaacttcaaacaaattagaataattattcatgaatacagcactaccagaaaataaaagaaatgacaatatggaccttgtctggcagctttagaaaccaaggaatgtggtagaaccttccaattgaacatttgacgagaaagcctgccacccctccaccagaatattcccagtccactagcagtgtttagagtagggccaggctcaatatctaaactcttgagtctttttcgagcaatcatatgctttgaggatccccgtgcagagctggtcacaatatgagaagctgaacccatggaaacatcagaatccatgtattttaaccactctgttgagagtgcgagacgaccaagatttgacactagctgcgtaatgagaataagatctaacattagccccaactaccactagtaaagatgaatagattggcaagagctaatgatcaattgttatagctgagttgaatgcacggcagtaaaaatgaaatggaaagtgaaataattgggtaaatttggtaggcgagcctatacacacataataaatacttctataagcatatgcataaatgataggtatatactttctagatctcctaagaaacaattcaagaaacgtaacacaaacaattatccaatgacaagcacagtatcttacagtcagcaatatatgtttaacagatgtaatatcagatgccttgagagcacttttacgccagagcttggtatgatcttgattcaaccatggacccaatagaagtccatgcagacggttttcaattgacaggatctgatataagacatcaataagatgactatccctgtttttcattgactgaagggtaagcatgtcgccattggggaattcccgaacattaacagtattggtgaaaaacaagcactctctgtcatcagcagcagttctacatggaaagcaccaaccacatttctctttctgcagatctacattgaaattctgcatatttgaccaacaaaattttgaaaaccttttcaaaatagctcgcatctgtcgagatattatttcttcttctaacattactgcgcccaccttaattttctctgatgatttacccaccaaatcttctgcaaccaacgaagcaatttgaccaaaggtgtaatagttcacataaccacttccacattgtgcttgtgatgtactacaatttctggtggttacggaaattgaggtgtttacagggccagcagattcagtattaagttcttgttttacatctaacatggatttcaacgggcagtccccaaaagcaatgtgtttcccttgtatgtcagattgagtctcagctgatccttcagaagtcacaagtgaacttcctgtcacagtcattgcatctagtatattaacagactttgagatgtcagagtgaccagaatctccaatgttagcatgctctttcattttgctttccttgccagtctcattgttaacatgtgtttctggagatgtcaacggagccagggtatttgaaagatcgtgattctgtgacttcctaaacatgtctgaggacatagaatatagagagtcaatactcttacttgatccatctaagctcacattaccccagtgcttgcagattgccactaatatgtcaccatagtaaaaatctgacgacttaagcactttaataaccatattcaggtcatctctgtggtagtaactgaatgaggactcagtatcataagaatctgacctgcaaagtaaacagtaacagtgtaacacataactgaagaaacatatatgtcaaaaaaacagtgtccatggacagtgaataaatttatatctacaggtacgatatagaagataagtacaagaacgttcaatatggtatcagttcaatctgtgatatataatgtaatataagctcctccacgttaatatatattgaataatgatgggtattctagacccacggatggtaaggtttacctatactagaaggggtgaacaaacttagcttgttgctgagttagctaaaagggtgggtattttggtaattgtaattgcggtgagctgccttttgttttgagtgagtgctagagttgattatgcaggttttggagagaattctcggcatcagtagagagcttatgctctctgccattgtaagagggattgtctctattttcctactgtagggatattatctctgttttcctttttatccaatcacagctccaatatttctcttcattattgtctactgttccactggtttatctcgttatattgctactgtgtatgtgtttgactactggttgaggtgaattccagcaggtactcatcaaataagtagctgatttattatttagaactccaaacgcatgaaaataaaatgaaaatacaagttcagcaaggttaaaattagaccaagaaacacaagcaacgattttgaataaagagtaatgtaaacataaaaagaattgcaaacttacaccaaaaggtaactcgcgctgttaaaataaagacgaccatgaggatcaatccctaataattctgcccctcgaagtgactttcgtggtttcatccaaggcgtatgtttgtcaataacacattctgggcaataccaatcaccgtccggcaaatgatcactagcaacaccaacgcaccttgaatgatatgcagcaggacaaccatcacaacatattaagtttccatccatcttacaaagacagcactcatcatagttccagtcaacagcaccatcaacagccttgtcgtccaaacaagagccgctagagatgccaagtgaaacccttctctttttcctactctcaaagtttaagttcctttcacatatcatatcgggctcagcttccaatgatctacgattcaactctgatcttattgattccacttcaatcaaatcatcacataaacaccgtagcatctcaatctttacggaagaaggttgttggtaatagtcaactttaaataacttcaaggtactaagatcaaaactaggtttcagtccagaaccataaatcacaaagtactcaaccataaaaactggccatgtaattaagtccaaaaaatccca

SEQ ID NO: 14347 - DNA, 11349 bp, Cannabis sativa
  modified_base (42)..(57): a, c, t, g, unknown or other
catcgttttagaagttcaatattaggttgttaaatcaacatnnnnnnnnnnnnnnnnaagatcctggataaatataattccaacactattgaccatattatcagtctatactcggtacgctagtcagactctagtcgtatgatactgtcaaatagtacttaagccaacatacattcatcgatatccaatatgatactaaatatactgatactgttattttaatataatctaacaggcttaataaacatgtacgctaaatatgtaaacacacatgcatatcattatactaatcttacctcactttcgaattcaggtgtgtcggccaacctgagtggaaccgtttctcgacgatttacaggcccctaaatcacataattcgtaaaactaatgaatgacatgctaaatcaatttttggagacttaaaattgaaactaaaagtttctctatcgatggataacatggcaataccctaaatatcaaaaaaataggaaaagctagggttcgcaaaactgccccaactagcagaccggtttcccaaccagaaaaccagttcagtggggttcctggggaccaaccagaattccagtttctacaagtcccactgaaccggtcaaccaactcagtttaggaaacacaaaaaaccccccacaacaaccccaatttggccccaaaagctaccaaaccttctagagtacctaattacaccataatagacataatccatgcaataaaacaacccaacatatctaaaattagaattcaccattagagagcaaagcttgagttcataaactcaaaccttgctcaatcaccacaacaaaccttaatctacctgaattcaacataaacaactataatataacttcagaatacagagccaagcaccttctaacaccattgtacccaaaccctcaaaaatcatgcacaaaactatctttaaactatagaaaccataaagaggagagagctaaggttcttaccttggatggaaaaactaaaattctgctagaaaccttgaattgaagctggaaaaatcccaaaccctagctggttctagggagctcgagaaagagagagagagtttggagagagagaaagagttttctgtttaatttggataaaatgaaaaataaaggttaacttacgtgttcattaactaaaataataacataaataatcagatcatttaacttagtatagtctcactaaaagacaaaagaataaaaggccaaaaagaccattttgccctcacatacagtaaaggcaaacataccacctaggagtattttggtcatttctaaatcctcaaatattcccgacattcccaatgtctaactaaattgccctgctattactaacatactaaaatgtgattctactggccaaacaccgcgttccaatcttaccgggcacaaacatggaaaacgtaaaattttatatgtggcataaataatacatcctgaattcaaataaatctccatacattcataaatcataataaataatctagtttcataattaagccttaattatctgctaatttccatagtaaaactaagcggtctttacatagcaggtcagcatgtgcaccttcgacaatttctacggcgcccaagtgaaaatcttggttcagatccatctctacccacacaaacatgaagccaagttacttgaggcaaaaaactaagaacccaaaacaaaaattccccagagttgcattctaattgataaaccccaatgatccatatacttgcatacacctatgaaacacaaatagccagagaaaactatctagacagttctaacctccctttcatggcgaagcatttctcagataggttcatcccaaagataatttttttttcatagcctacttctattcaacgtgtaaacaatccaaaccctatcttgaacgagaaatccctatcctaaacaagaaacaataaaaagttcaacgagggattaaagttcaacggtcgcaactggtctggaagtgaaaacctttgtctggtaatggttttattaggtcaatctaaaggggctcaaaatctggaaatatcctcacatgaagatttagcaagagttggattaaacgctcaaaatcttcttgcatccattagtgaaggagcagcaagaggggaaaagtttatagaagaaatgtggagtctggtagaagtgcagaaaaattgaaagaaaacctattgagaccaatttatacttcaaaaggaagccaagcctttttgaaatcgacggtccagatcttcttcactaagcattattagatccgacggttggggagttgaaatggttaagaagcatttatttattatgatttgccatgatttacctcaagtccaacatgccgtcagctccacctttttcggacagacacgccccagcacacacgtgatgaacgaacgagggcatttaatatgtcacatgatcaccacgtcagcaagcctcaacgatctgtttacccctaacggagtacatcgcaccaaaaagaagcatctgcgaccctaacaatcagcacatgtcaaagattagtcctaggagacccgaagaaagaatgcaacctcccaatactcacagagtcccagaagcttggagggtaaatgttatccgtatttttaagtaggagacacgtggcataattagaggcaaatatttattaacctcctaaattaataacgatgaccattacaattcttcatagagatatcccattaatttgggacaggattgttgaaagcttgatgcgaagagctatcactagctgaattagcgtctctgggacgcggaaggattatacttgtccctagactttaagaagtcctgtaacaacgatttgatcactacttgacatccagataaagactctttaaattgatcgcagacagcgactcctacgcgaatacagatggccacttaaaatttatatggaaatcgacctaccgatggttattcctttttttgacacaaagtcagatcttgtttctcgtgccaagccatggtagtgcgcgtacgtacctctgaacaccgctttttgcctaacgacttgtctagagagtaattcataaaggagaaacctttgggcaacatgtgtccctgatccatatggtactacttaccatccctatgtacgggacaatcaagaatgttctcttaggccagatggttagatttaaagttgtattttcctgctcttgcaatgggctatggcacaaaaccataggtggataaagggaatgtccttacccacatgtaagcctataaatatccccactttttatgtacaaaggggtggacaaatttctaccaaccgaaccgctgcaaaaactcctacaagttttcttcttctttaagaaaaacaaaaggagtgcggagctagggtttatattgtaaacacatactgtattatccaaatactttgccaaagggccaatacaattgactcgtggactagggattattaatgtccaaaccacataaaaatcacttgtctattatttaatgatttatttatttctgaagctctatttatttagtttccaaaaatctcggtaaacaattgggattttatgcgctaaataaaatctaattttaatgtaatctcatttactttcaataaagatcagaaatcatatcttgaacttgtcatatgctttgttcatatgtttgttacatgattataggtttaatatataagttcaattaaatcatatagttattcacaattaaagtgatccatcacaatggaaaagtaattgtgattatatgcttcaaattatttagtcccataatttatcaatgaacagaatttatactaacgtgataatcagggatggggtttgcttacacttggataagtagaatgtcttttctagggtatttgtaaagttaactagcatcagatgtattggctatacatcagactggactaatattaatagtggaaaagatattataaacttattattatatcttttctaagtcaatatcacttaggtgatcatagatcatttgatctcaatcttgagatggttaagctctagcttaaatgtattgcacgagtttttgacttgttggttaccagcataccgtaggataagcccatacatacatcttggggactcgatagtgcaattgagttggagtgttaatcataaatatggacagctataggttctatatttattataagtgaaacaatggttccatggagcttggcttaacgagataaatgataaagtactcattttggtaattatattagtttcttaaaatatcttttacaagtatctaagtgttttaaagctaaatgattataagatcattttcaaccaaggagaaatgcaaattttgtagtagtgagggctgaaggaatttcacaacttggtatgtattagagataataagattagcaagatgaattacaatgcgacaaaggtttagtgggattgaaatagttcattagtcaattgcatttgtaacctttgataatttaataattaattttattctctagacgaggccctgtggactagtaatatttgaaagaatattgatatcacgtagaactcgtgtttgtgaatttcactttatgcattatttatttctataattgtttgctgctgcaagtattggttctgtgtgagcaagtaatcttgtttctgcaattgttttttggtttttttttttagcaacacgctgactttcactgtcttttaagccatttagttttacttgtatattcgtacagaaatcattgtgattccacaaagaagaatgttgtgctaattatagcgttaatttaattttgtcacaaaaaatcatagttgtattttgtttcagtaagcacattgttacgtgttaaagtattcatatcaaatgaaaaaaatcttcttcccctccttatataaagtgaatagaccaaatattagaagcaattgttagtctgagcaacaaggagttctcttgttcatgagattgccagaaaaatttccaacattaatggcagtgccttgtggaaggccagtggaggaagccgcctcctgagcagccaatgcctttttgcttattatctggtaaatgtcaagcaaaatgctttggaatgccttctcaacattgagggcctccagagctgatgtctccaggaatgacaacccttccttctcggcaagagcaccggcttcctctgccgagatggcgcgaaggtgattgaggtcggctttgttacccgccatcatgatgacaatattggaatctgcatggtccctcaactcgcgcagccacctctggacattctcaaaggtttgcctctttgttatgtcatacactaagagcgcaccaacggctcctctgtagtaagcactcgtaatggctcggtacctttcttggccggctgtgtcccatatttgtgctttcactgtcttaccttctacctgaaaatattgacacttgaaatatgactaatcaattcaacttttcgttttcttaataatgaacattttgttcaaaataattactccatctattcagaaaataaaaataagtatttactccatatactttctcaaagattattaatattattattttaaaataataggaaatttcactaatatggtcaacccaataacgtatatatcaaaatcaaatgcatattcaaattaccaatattaatggctaaactataacagtttaatttcctatgctataaagatatgcttcttgttttttcaaccaatgtggtgtggaaaccgctcatgtgattttcatgtttttccaattggtgcatttttctttattaacggcttcatgaatctttgtttggctagctaagagctttttgacctgactgaatattttttatttagcattaagaaaataatatgcgcaccgacgttatgtaacatgtgactcaattaatttgttttgtttgaagggtcatgggttggtttaaacaaacagcttatttaggcacaatgtaacatacataaatcaactaattacaatggaattaattagtaattgaccagtcattgtaactgaaaatatatattatcaaatttgtcattataactaccatacagccaaaaaaaaaaaaatatagtataaagattacaattcgcaaaaaaataattatatacaacaaattattttcatatatatatagagactaggtaataaaattcattcaaaaaacttatgttgtatctatcattatatatcacttagctgtgcaaaggtatgtaggcgtatatttacttttttttaaaaagccatatatctatgacaagtatttaagtttgtaaaacaggcagcaacacaataatttttgttagtaggaaaagtattgagagttaattgtaactgaaatcttcaaaagtgacaaaattggaaaacaaaaatggatcgactatgcaatgaaaaaaagctagatgtatacgatcacttggtatagggatggtggcagtatgcatatatttatagatataatatttgttgaacaattatttaatatgttatatttaattgatgaataaaaaaatataataataaataataaaagaaaaggaaaaaggaacctgcaatgtccgagttgcaaactcaactccaatggtagacttggactcaagacaaaactcatttctggtaaacctagagagtatgttagatttgccaacacctgaatctccaatcaacacaatcttaaacaggtagtcgtattcgtgatccaccttgtacgccatatctcctcctaacccacacccaaacctgtatatataatacatccattgtaaaaatcttgatatataatgaaaaatatatgaccatgttgtctacaagctaggaataatgttctttttaaataaaaaaaaagccagagggtgttttaagagcctcatgttgttgaaatttcatgtatgtcaccaatataagggaagcatgaaaaagtaattaaagtccttaacaaattaaaataataacttaccatataatgaaagttttgaggtgattatctataccactggaaatatgatgaacatctacatcaataataagtttgaaatttctgttttaatctgggtaatgaaatgtgtttttgggaacaagcttgacaaaaaaaaaaaaaaaacgtgaataggaaagtaaaaattaagaagagaggaaaaagaaaattcattgttttccaaagccaatgagaagaaacagtcttgcaaaagaaaaggcactcaaaacggaaaaaatattctaggttcgcggactacgtaccaggtcaaatagatacatacatttaatttttttttttttccttttgtttattttctggcacacgtgtatactttttttgtggcacatgagtacatatttatcttaataattaatgcgctactaaatatagcatttcctatattacaatgtccgaataatttagtaaggccgtctgaaatattttttaggccctgttctaattttaaaaagtaggcccctaacaaaaaaaattgtaatttgtaaataatattttcaaatattattatattaggaaaatatattttacataattaaacatccaaaaatttaaataattttattaaaattgttgttatttccaatgcaacttcaagctaatatcaaatattatggggaaaaaaaaaattaaaagacattaaataaggaaaaaaaattaaggaaaaacctttttttttttttatttggaataacaaattagtggaagattgagttaaaaaaaaaattcctaaaaagtcatattgggcctttttaatttgtgggccctgtgcattagcactccttgcacgggttaatggccgaccctgtttagtaataaatatattattagctagggttttgtctttaggtttttctcatactctgccaccgccgaggtttctttctttcctccgctgccatggctcaccgtcctttcaatggagatgggtgtggctatatggtcgttgtgtctcattgattgtgcatcttgaggatttcaatggaggaggatctatgcttgttatcgtcaattggttattaggtttccgtttggggtgttgtttagagttatcatcgtcgggatcttgggtagggtggatgtcgagaggatttttctgatatttgccacaagctttcataaatcgatgtctactggttgttgtgcctaatttttgtcttttgtgcgagttgttttcttatctaatggggtggtttgagtgcgacatttctagatggatgacaaaaatttctttattagatgggtgtttcagtattaaaaaaaaacgattcttctcgattataaaataaaaaaatatggagaattgacgctattaaaaatgttcattagttgtaaaccaactactattgttgggcattgttggcagttcctataagtcaaaaacccaacgattttaaacactcacgcatcaataattaaaatgtgcatttttaacctcataaaagaaattgctatcgatttacaagagtcgcttaagggtaagcaaacctaatgaaacaatgacgataggtttatgcagaaaattacaactagtgtgcagaatgaaattaactaaaactttaatcaataaacaatggacaatgacaagattaacaaatcacaaataagaatcgaagataaaacagggatgaacagaatatctaaaccagaaaagataaaagtaatgagacaataaaaatcaacaccaatatatatactggttcaagtcctatagatcgatgtgatctattactctactgcagttttggaacacaatcttctttattgattgagtaagaataggaaacaatacaatcgagatcgattctttattggattcactcagagtgtttatctctcacactcttacccaaaaatattcttcatctatagaagattcttcatacaaaatccaaactcaatctatctcttttctctgtacctctctctctctctctctctctctctctcaatctttcactctcaatatcacctctcgaaattcatctaaactcgttctctaaatgataattgttggtggtatttataggttcaggatatagatcctaatgtgagtggttgcaagtgctaagttgttaagttagttgcgacataaccaacttaacaaacttctgttaacagtatctccacgccagtacaagtcaaagtgcttctagatgagacatactcttatggggctaaggattgaggcgcatgctgaagggacttcccgtataggaaaggtgacacctagagtttactattcgaaacacccttctaggagagaagaactagtcaactgggattcctttctggatgaagactagttttcttgaagatttcttctaggtagaactgataaacatctacgaatgcccttccggatatcatctatcattctatgtgatttcttctgggtggacaagttagaatttcgagaatacccatctggatgacatgcatctttccataactaggacaagttttgaagatcttttcatttggaggaactataccacaatttataatgcttaaaacaaactaaaatctatcagatctcatcactttgtcttcattctcttcctctattgttaataagtctctccggcaattagtgagccaaaacaaccatcgatatttattgtcaccttctcattttcggtctcctctatcgcctttcctcttgtctcatcttgccattagtctcctctatcttcatcccttttacgtttgcaaccacgacgagccaccaccaccaccaatctcctctcctctctttgtggtgttgatctcctcattgttcacaataatgagtagcaaaccaaggcccatccattaccacctcgtgaccaccgtcggctgccaatatgcaccacttctacctctgtcgaaaaggtatatatatttatttatttttatgtatatacaatatatagagtcatgctgtaaataattatttctttattttatatacatatattttttaattacttttatttattaattttaaatttaggtatttttaaaaatatttagtttaaatttgtttgttactttaattaattatattgaatgttaaatttttaaatttaattagatgttaaattcaattaccattttacttgataattaatttattcttagctaaaacttttgattttttatccatagatttgttgatgagttctccccatcaacattactatttaacccttcaatatattgtatcctcaaaatacatagctccttgtaaatgatattttattaaattaatgtaattaataaaataagcgctctatcatttatcacgtttagccaagcccaaaggaaactattatttcacttctagacaaacatagaagttatagatgtttatatctataattaacactcccacttaatttgacttctaacccttgggattagtcaaggttagtttgagagaataacgaggttcacccccggagtaagtcattactatggggccatttgacagaatgcattcatgccatttgcagtaaggcctgacatagcatgcgtgtcgcaacaggcttctcatagcaagacccttgcaaggagccctctcattgcaagcccctcgcaatgaggcctctcgcagtaagcctctcatagtagggctatactgaaagaggcctctcgcagtgaggccacttgaaacagcgcctcttgtagcaggcctctcgtagtgaggcctcttacagcaagcctctcgcagtgaggcctcttacagtatgcctttgacagcaagcctcttgcagtgaggcctctcacagtagggccactctatgagacctctcacattgaagccccatactaaggccttacacattgaggccatttgctacaaggcctgtaaaatatggcctctcgcagctggggctctgaaagcgaggcctctcacaataagcctcttgctgcatgacctcttacactagaacctctcgtagcagggcctctcgtagctgggtctttcgtagctagtcttttgtagctggcctctcgtagtgagacctctccctgtaggcctcttgtagtaggcttctctcaccagaccctttcgtactgaggcctctctgcagaaggcatctcgtagtaaggcatctcttagaaggctctcatagcaaggcctcttaaagcatggccttttgcagcaagcctatcgcacgatggcctttcatagtaggtcaatcgtagcgaggcctcttgcaacaagcatcccgtagcatggcctctcccagtaggcctctcgtaccatggcctcctacaaaaaggtctctcgcagtaaggccttgttggaagttattttaccaggaact

SEQ ID NO: 14348 - DNA, 8173 bp, Cannabis sativa
  modified_base (6753)..(6754): a, c, t, g, unknown or other
ttctttgtaaatgtttgtacaaaaatattgtggatcaataatactgatttatccaaaaaaaaaaaaaaaaaaatgttgcactatcaaactcaattttttcatgtatcatggcttctatatcttcaatctcataataataaatgatataagttaaagcaatatattgaattgatgttgtgtgaatttgtgttttttaaaaaatttaaatatatatattctatcaatcacacaatatatagtgtcgggtagggatcataaaatatgaaataataatactcatatatacaataaatatgcatagttgatagatatataaggaattggatcaggtggggttaatgaaataaatatcttgaatcaagttagaagttcttcaagctacttttggttggtgacaagtaacaaattaatattaagaaatatatagggttacccaccaaaaagaaagcaggtacactatttgtatttaattttacatgtaaaataacatgtttgcaggcatttaattttctctcttgagcttaataaaaaaaatcatatatataaagtactctttgggtgagtatcacttttgcactcagaactaagagcaattttatagcctttaattttcaatcaaatgatagtagttaatttgattataatagggtatttcataagagattaataatttttattatttattttaatttgttttagaaaaaagaaagaaaaagaaaaccacccacatagtaatacagttcatttttaattttctaattatattttcaacatatgtcgcgtgtttgtcgatctttaaatttcaatcatggtcttgaatctccaagagttagacttggtggaggacttatggtcttatggacagatgatgttgatataattttgataaattatggtcaaaccttttttgattgttacttggtggctaatggatgtccaagctttcatttcacagttttctatggtgaaccagttgccactaacacatcatcttcttggactctactcaaatgtcttcatgatgttgcaccactccaaccatcgcttactatcggtgacttcaataaaatcctcactaatgctgataaatcaggggtaatcttcgcagtgaaactcaaatggaggcttttagagatgccttagatcggtgctctttacatggtactcattacgaaggagaccacttcacttggataaagaattgtactgttgtgcatacagttaaagagcggttagattggtattttgtcaactatttttgggatctttctttctgcaatccgacagtgcagcacctggactattatcacttagatcactgtgcaatttttgcgtcttttgctcaaatctcagtgcagtagcagcctcaacatgacaaaaggagaagtagttttgctatgaaaagttatgactttctgatcctgaaagcaacaaaatcatcaccaacagctggtttaataatgaatcggatgaccgtatccaaatagtgcttcaaaacttggaagtttgtgcaaacaatctgcaaacatggcacattgctaaatacaggcgtatgaagaagaatatagcagaaacacagtccaaagttaattatttaaacaacacccgtacatctgattcaatggctgaaataaaagaatcggaagctattcttgatgccttgttggaccaataagtaatttattggcaacaacgctcacgaattgattggttgcattcaggtgatcgtaacaccaagttttttcatgctagagaatctgctacgaagtcaaataataaagtcaagtttctctatacagatgcaggtgttaaagtgtaatctaaaacccaaatagctaccgttatccgagattttttgtcaacatttattcagcatctgatattgatgaagtagctcttgacttcactttgaacaccatccctttagtgattactgatgacatgaatgcagctttacttcagcaatttcaagctgttgaagtggaatcaacccttccctcaatgggattggataaaattagtcctagagttgacaaaatttcttctatgttctactagaataattggcctattgttggaagtttagtcaccaaagcagtcttggcggtactaaatgatggggctaatccgtcaattttcaacaaaacactcatcacccttatcctgaaaattaaaaagactcattatatgaaagacttttgacccatcagcctatgcaacgtcatctcaaagctaataacaaaagtacttgtggcccgttttaagcaagttcttccacatataatctccgaatctcaaagtgtttttttgccgaatcgactaattacagataatgtcttgctagtttttgaattagttcatactatgaagaacaagactgagggtcgtaatggtatcgcatccttaaagcttgatatgagtaaagtgttcaaccgtgttgaatggcgtttcctcaaggaagtcatgagaaaaataggttttgcagaacaatggatctatcttattatggagtgcttgactactaatagcttatctttcctcattaatgcgaaaattagaggatctttggttccttcacggggtctccgccaaggctgtcctttgtcatcgtaaatgtttttaatctgctctaaggggttatctcggttgttacaacacgaggaaaacgtgggaaaccttaatagtttcaaacttactcgacgtgctatttctatttctcacttactcttgctggtgactgccttcttttttgtcaaacaaatgagcgctcatgccttgcaattaaaagagttttggacatttatcatcgtgcctcaggtcaggttcttaactcggacaagtctgtaatgtctatttcacccaacacaacacaggctgcccaagtttactttcataggtaatttttcatgtccatttgtgagtgccacgagaagtatcttgggttaccatcatactcgaaaagagataagaagcagattttcagtgatatcaaagcgaaaatttggaaactcatgaacacttagagtgagacaagtttttctataggaggccgagaagtacatctcaaaacagtggttcaatctattcctacttatgccatgagttacttccggctgtcaacttacttttgcaatcaactcgagtcaatgatggcaaacttttgctggggtttatatgaaaagggctcaaaaattcattggcgttcttggaatctgctttgtcaaagaaagggtgaaagaagggtgagtttttgatcctttgaaaaatcttaacaaagctctacttgctaagcaagcttgaaagttattagagaatcccggctctctttcaggaaaagtgctcaaaagccgttattatcctcaaagctccttttttgatgcaatccttggtcattctccttctttaacatggaaagctattcattggggaaaggatttactttcaaaaggattaagatggaaaattggtgaaggatggggcattaactgcggctatgacccttggatccctagtcatagctctttcttactagttttttactcgagttctccttatggtgtggtgtcaaacttcatcacagaggaaaggcaatgggatatatctttactgcaacaatcatttttatctatagatgtcgacatgattctcactatacctttgagtctcttcccaaacaaagacactcttatttggcatcaccaaaactcatgtacctacacagttcaatcaggtcatcatttagcatcatcaattgaaaattttgatctaagttcatcctcaaatttggccaagtattggtggaaattcttttggtctcttcatctactgccaaaaatcaaaatctttgtctggcgtatttaccatgatgctctactggttgctacatctttggtaagacaaacgattattactgattcaacatgttcaatttgtcgtcaggcatgggaatccattggacattctctctttgggcgtcggtatgccagagtagtttgaaaacattcaaatcaggactttaattggcaacaatcagttacaatgaggaaatgcgattatttggttcacctatcatccatttattcgaaatctaaaatggaacacatcatttgtaccctatggtcgatttggacagaacgaaactaggtaattcatggccataaagccaaactagccatggatgttgcagcttttggtagcaattacatccataattttcaagctgccagaagtaaatatcactcgccaaatactattgctgatagaatgccttctcctactgaatctcctcctccatggcagccgccaattttaagtgctctaaagcttaacgtcgacgcagcagtggatgtcaacaagaatatcattggagtcaatgctactgtacatgattccctcattcaggttacagcggccctctcaatgccaataattgaaaattttacctctcatgagatggaagctaaagccctttttcacagtttaaattaggcatctcaatggtgacttcctattacaaaaattgaatctgatgctctgctggttgttagtgctttacgcactccttcaattgcaatttcttcttttcaagacttaattgtagatgttactagttttcttttccctagtgtgactatctcatatgtcaagcgtacaactaatttggctgctcatggcttagccaaatttgtattggaaaaagcttgctttttgtcggtggtcatccctcaacctatttactttgttgttgtaaatgaattacccacacgtttccccttctaggacgttgggttggggactgcaccaacacacacgtttccccttcttttacttctcttaaatacctattctgtgagttccttgtgcttcttgcaagatgtggtcttcaagagatcatggccacatgtccatctactaaaggcagagcaaatcctagaggatatgaagtttcatgtcccagagcaagtaatactactccagctggcactgacagagcagggagtgtaggcagcaatgatctaggatcttgagaacgacctaccccttgtagaggattgatggcgttatgttgtctcggaacaatcaaatgctcgtgaataaccccttacccgggatagatgattggaatctagacccattttcctaagtgtcctaatctgaccaaagtctcgatctcatctttcaaatattcacgctcattagtggtggggcctttttctccgtgatattcacactctttgttctggtcacgactatttctccctatgtgagacattcatcaaggctttctatagtgtaccctattttaggttgctctgtagacattctccttcgtgcctactaaactagtatactcagtgtatttggggtcatactccttcctcgacttctattcaaagaatcaattcggttgttaccttcgccccttcttttgttctgtgtatggttcacatttgattctagagcttctgttccctgtccgggagccacactgcacccgatttgtgtctctctatacctaaaaatatgggtctatgtaggtgcgagaccaggagcagtgggtccgtaaacagttggcgaaaactgatttctaggaagagtcaaagttggagctagaacttgaagggtaaagctaggtgtagtagcatatttgggcaagtatttgggtgatgcaagtgtttacagtataaaccctagctctgcattccttttgtttctcttgaagaagattaaagcttgtaggaatttttgcagaggttttgataggataaaatgtgttcatcccttgtacatagaaaatgagggtatttataggcttaaatgtgggtaaggatattccctttatccacctagagttttgtaccacagcccgttgcaagggtagaagaatacaattgtagatctgatcgtctggccttggagaaccttcttgatcgtgcggtgcacaggggtagtggctagtaccatctggataaaagaaatgtgttgctcaaaggcatgtcttgaggtacatatgcgtactaccatggcttggcatgggggacaagatccaatcctatgtcagaaaaacgtaatttcctgtaggtcgatttccatatgaggctgacgtggccatccacatctgcgtaagagttgtcgttcgtgatcagtctggagaaatccttatccaaatattagataattgaaccgtcgctatgagatttcttggggtttgaggacgagtgcagtccttccgtgtctcaaagatgataactggccagaaatgactcttcgccttaaatatctataaaacctctcccgaatcaacaagacatctccatgaggagccatgatggtcatccctatcggtcagggaggttaacacatctttgcctctaattattccacgtgtctcctacttaaaaacacggataataccctccaacacttgggtttcattttccctccaagtgtaatccctccaactctactctctccaactcaaactcacataacgaacaccctattaggtgatgttatttggttggaaggaatgaaaacataactagaataagaatgacattctaattctttaaaatgaaaccaaacaaaggaatgaaataaaagtttcctttccattctattctgtttcattgccttaaaccaaacgtcacattagtgtttgtgaatacagttaagtgaagtttggttaggaggaatgaaaacataagaataggaatagaataaaataaattaaaatgcataaaaaaattgatnnaaaaattattaattttttttcttaccatgcattgaaatggaaggaaaatagtcattctttccatttcaaaatggaatagacattccactaaaatgatggaaatgtcattctattaaaatgaccttcaaatactttaatatgcaactaaacaaaggaataaaatgttttcattgcattctatctcattaccctctcaataatacaagataattattttgtcacaatctttgtttctctttatttctgcctttcatttctttgaatattgcttcagtttctaagagatacgataattctaaggcgtttgattgagaggaataaaaatatagaaataggaatgggaatggaagtatgaatatgaatgtaatggaataaaatttaagatacatataaaatattgataaaaaaaattattaaactttttctcatgttatattggaatgctctttacttctatgtcaaaaataatatctcaatactttaatcacaaacaaagaaatggaatgaaaattgtttctttttctttccattccattcaattttattacctccaaccaaacgtcatgattaactaatttagattgtaagtatcatgattgaacactatgatgatagatagaaataacatagtatactaaattctccatttataaagcgttatacttaattaaagtagctaattaaattttccaaaaaaaaaaaaaacagcagctaatgtatttctagccttacttaacctactgcgcaatcagtttcgattgagtgcttctcaattttgaagtttattgcacgcatgggttagcttgtgcatacttgtcttatatttttatctaaaggcaatttggcatcttgctacatacacatataaacctaattaatttattgacataaattatattccctctaataaagaagaagacaaatgctttgatagtggttgataatgataaaattttgaagaggactcaatgctttgttttgtggagcaagaataattaatggtattcttttgaagagagtattaattatgtataaaactttgttaaattaattcaaagtagtataacttgggtcttaatcaaattggttctcaattagagtctcatcatcatatatattatgtcacttgaatcttactctctttccttttatgtggaatattgggtcataatcaaatggtgctctaaagattacgtggtcattatctaatgaataggataagatagctaaccaaaccggccactcaagcactatatatgacttatcacactatatattattaactataattatttttttctcaaacttttttttgccttatttgattattattttcccctattgctcttctagttaggtcattaataaaacataaatttattcattttaaatggctaaaccaaccaattgaagacacat

SEQ ID NO: 14349 - DNA, 7567 bp, Cannabis sativa
atttggagagaaagaagtctcaatctgttattgatgatgaaatcagtttatatacacatacaaacaataacagaataggaaataacaacttgacaactaactgaattaaaactgacacctaacaaccaatacagctaagcactaactgacagtaacagaattaactgtcttaacagtgtggtaatcagacttccaagctctcttcactctttttagatagaatttactgttttcaaaaaattagtgaggagttcggggaccgagaccctatatttatagataagatactctattattatttttgccacattaattattaaaatattttgacaattaattcaaaaaataaattaattagtaaattatagtttggttatatttagaatatttattccaatcaattgtgataatataccgacaacaaaacaaaatcaatttaaacaattttatattaatactagaaatattttaaataatttttttttaatatgtgtcactttgcagatgaggaggaacaagagccctcatgatcatcagtacaatagaaaaattactcataaatcataatccttttagagtacttttgctttgacgaaataccaagctgaatgctttaatagaaatggagcacaaacttggccatcatactttggagtcgagctttgaaataccaacctcaatgattcaacactgtgtcagtatagatagtgataaggaaaactctctaatagagttagtacatgtacaatctcatcagaaaatattcataattaagattgtatatgaatgattacataaggaaccaacatttggattttaacatgtttttgtctccacaatgttgagggaatgatcagcagccttatgcaactgcattattggaaatgaaatgtatggtgcatatgactatatactgattaatcatcatgcttttacaagtactgcttatcaaaacaaataatgtatatgtgaaactgaaattcagcagacatacaaaatatttttccctctataaaatcattattattctacctttaagttttgggatacaacgagtcatgcacatataatgagaaaattttcaaattatgatgagtatgctcactttcaatggagaaagcaaaagttttcatggaagggctacttggttaactatttagatagcactattaaacttaatgaaatcaaaatagagtatttgacgactaaatcatcttaattatcgtgtcaattgcatttaattttttaaattaaaattttaatagcagaattctttaaatttctgaactgttattaaatttaaggtattagctatttttcacagttaattgccaatatagattgtttatgtgtatactcttgtataggtgacacctttatattagtacacctagcattattatttaaaaattatacaaaatatttcaaaatttataatatttttatttttttaaaatcttttatttttatttttataattctatttaattttgaaataataatattaggtgtactaagtgtacaatagtgtacatataaatagttcatgccgacagttaactaggtgacactttaaatttgctaacaattcagtactttgaaaagttttatcgctaaaatttgaacttgagaatttaagtgcaagtgaaataataatggagaggatttagccgcaaaaaacattgcaaattgcaaaaagagtgatttttacaacccctttgcctctgttatttttgaaagatgtatgaaaaataaataaagttctgtttttcttattgagttgttatttcactcattttaacttgaaaccatgtccctaataaacatcatttgttacctcgggatgaaagaatttagtcattcactaatcacatacacctacccattaaaaataaatgcttttgattaaaataagccctttataaatccgacgagttgtcccctaaaaaaattaatttatttgtatcattagaaaaggaataataattataatatagaaaaaggaaagaaaagctgaaaatttgaagctttttatgcttaacgtcaaaatagaagttatttgcatgaagttactacaaaaatcagatactttgtggagaaaaaagaaaaagtaaaaaataaaaaatataaagagggagtagacagcaaaagtgctcaacggctttacttatcagtattaaagagaagtgttttgtttagtttattcgaccgttgaaatttctaaagtatcctttaattaacttctttgactttcgtctcttactctctaagtgggccccacctgctttatcttttcactaaactacacaccgttttagttgaatctcatcccttagatcttctcaaatacacggcccagatcacttgaccgttgtgattcaatcctttctcttctctttacagtttacaaacacccaagagctcaaaaaattcaaatactcgaccgttgccgaatatgctaccttaattcttctacttctttcgttttctatctatggattccaaatctaaaccccattatcgttctctctactcaatctagtgatcactatattttcttgagtaagctcattgtatagagatatatttctgggaaagtttctatttttgggtgggaattagtaatttttttttgttttgaaaatggcgaaaacagttacatctccgtcttcttctccggtgacgatcacggtatcttcgggaggaaaaggaggagggagtagaaacatgggtctaacgagccccgtgtcccgagcttcgatatcgaacaacccaaattctcctctgagcggcagagcaaaccggcggtcctccaccggcggtctaaaatatagctcgatgacgaaagatgatacgacgacggaagagattaattccgaatacgttagctacacagttcatatccctccaacaccagatcaccagcccatgtcagcttctcaaactagtttgaccgaagagggacgcaagtcaacgatgcttccggagaggagttacatctcgggcaccatcttcaccggaggattcaattcggtgactcgtgggcatgtaattgagtctatctcaatggagtgtccaccgcctgggaaaattgggttggtttgtggaatgaaaggttgtgatgagacagccattaaaggtaaaagtgctccatgtgagtgtggatttaagatttgcagagactgctatttggattgttttgggactggaagagcgcgttgtcctggttgtaaagagccttataaagatgcgagtgatgacgatgacaatagtggtgatggagatgagacttgctcagaagcagaggatcaaactatgccattgccttccatggctgatgttaagcttgacaaaaggctttcgcttgtgaaatcgtttaaggcccagaaccatcccccggatttcgatcacacccggtggcttttcgagaccaaaggaacttacgggtatggaaatgctgtgtggccaaaagatggttatggcactggttcagggactaatggcttcgaacatcctccagattttggtgagaggactaggagaccattgactaggaaagttggaatttctgcagctattctgagtccttataggtaacaacatttgtcttcaaacttgcttgcttttaatctaatggtcttgctagtaatttcaagcattatgtgtaaatatgaacacttgcttgttatttttgcagattactaattgttatacgtcttgtggcgcttggatttttcctgacatggagaattagacatcccaatcatgatgcaatgtggttatggggattgtcaacgacttgtgaactctggtttgcattttcatggcttcttgatcagctgcctaagctctgtccagtaaacagagtaactgacctctctgtactaaaagagcggtttgagtcaccaaacctgcgaaatccgaaaggaagatcagaccttccgggcattgatgttttcgtttccactgcagaccctgagaaagaacctcctcttgtcactgcaaacacaattctttcaatcctggccgttgattatccggtggaaaagcttgcctgctacttatctgatgatggtggtgctttactcacatttgaagcccttgccgagacagctagctttgctagaatctgggttcccttttgccgcaagcataaaattgagccaaggaatccagaggcctattttgggcagaagcgtgattttcttaagagcaaagtacgccttgattttgttagggaaaggagaagagtgaagagagagtatgatgagtttaaagtgaggatcaactcattaccggagtccataaggagaagatctgatgcgtacaatgcccatgaagagctacgtgcaaagaagaaacagatggaaatgggaggcaatccttctgaccccctcaagattgtaaagggtacttggatgtctgatgggtctcattggcctggaacatgggcttcagctgaggaagaacactcgagaggtgaccatgctggtataatccaggtaattctgcactccctaattatgtttacatgaatgtctaataagtgattggacaaattgcgactcaggtcatcctaaagctgtcgataaagtttaatgcaattttatttctttttcaactggagagatgggaatgggaatgtcaaacttaaattatgtttccaagtgggtctcactttttaaactaaaattgtggtaatgtttaatccactttaatacttgggtttgacattctctccaattcaaactcacattacaagcacccattaggggggtttggttagaatgaatgaaaacatagctagaataggaatgacaataaaactaaacaaaggaatggaataaaaattgtttcattttcattctattctacttcattactcaaaccaaaagccacctaagagagctagtttcagggtttcttgggaaactagaggataccaagtgtttctctctgttgtcttgctgtaacgtcttgctattgcttgttggattgactaggaagaaatgatcttcttcttgctattatgttcgttattttattttgttattagatttagagcttgttggattaactaggaagatgatcttcttcttgctattacttttgattgtttagtttgttctgagatttagagcttgtttgttattccttgcgcaatctcagcattagaactgacaactttggaatcttgtttcaggccatgttagctccacccaattcagaacctgtttatggagcagaagcagataatgagaacttgattgacacaacagaagtagatatcagattaccaatgctggtttatgtgtctagagagaagaggccgggttatgatcataataagaaagctggtgccatgaatgctcttgtccgaaccagtgcaatcatgtctaatggtccattcatcctcaacctcgactgtgatcactatatttacaactctttggccctaagggaaggaatgtgtttcatgcttgataggggaggtgatagaatctgttatgttcagttcccacaaagatttgagggaattgatccgaatgatcggtatgcaaatcacaacacagtgttctttgatgttagtatgcgagcactagatggtttacaaggcccggtatatgttggaactggctgcattttcagaagaactgctctttacgggtttagtcctcctcgggccacagaacaccatggatggtttggaaggaagaaaatcaagatgcttttaagaaaaccaaagataacaaagaagaatgaagatgaagtggctttaccaatccatcccagtgatgaagatgaggatggtgatatcgaatccttgttgtttcccaaaaggtttgggaactctactactcttgttgcttcaatcccagttgctgaataccaagggagattgcttcaagatgttcaaggcaaaggtaaccaaggaagaccagccggtgctctttctgttccgcgtgagccattagatgctgcaactgttgctgaggcaataagtgttatctcatgcttttacgaggataaaaccgagtggggcaaaagggttggctggatttatggctctgtgacagaagatgttgttactggttaccgtatgcacaacagagggtggagatcagtgtactgtgtcactaaaagagatgcctttagggggacagctccaatcaatctgactgataggctacaccaagtgttgagatgggcaactggttctgttgagattttcttctcaagaaacaacgctttgtttgccagtcccagaatgaaattcttgcaaagagtggcctatttcaacgtggggatgtacccttttacgtctatattcctcatagtctattgcttcttaccagcggtttctctcttcacaggggagttcatagttaaatctctcgacataactttcctagtgttcttgcttgctatcaccatcaccttgtgcctgctagcactcttggagatcaaatggtctaaaatcactctccaccactggtggcgaaacgaacagttttggcttataggtggaacaagtgcacatccttctgcagtgttgcaaggactactgaaagtcattgcaggagttgatatctccttcacattgacatcaaagtcaggcgcaaccgaggatggagatgatgaattcgcagacctatatgcagtcaaatggagctttctaatgattcctccactcataattataatggtgaatatgattgcaatagcagtgggaatggcaagaactatgtacagtccattcccacagtggagcaaacttattggaggagtgttcttcagtttctgggttctgtgtcatctctatccttttgcaaaagggttgatgggaagaagaggaaaagttccaaccattgtgtttgtttggtctggattactctccattatcatctctttgctttgggtttacataagccctccttctggaagacaagaccacatgaggttccaattcccatgattgattaatgaccaccgcatgtggtggttccttctttgattgattgttgaccacgattatgttatgtattagctaatactgatcatattttgctctttccgttaagtcaaatgaagtttttctctcaacttcattgttctatgtaagcagtttagtgattagttagatggtttttgtttcatgttgttattgttgtcattgtacttagcttgagatgctgttattcacctattcttttggtatataacgatatattcctattgaaagaattatttttattactctcaattcagtttcaatagaaatatgaggaagggaatatgaccataataaatcatactgcattttaaaaatggtcgatctggtcccataaaaagaaagaaagaaagagatattgcctaaaacacaatgacaaaccagaaatcagtagaattaaatgcaaggggtccctgcaaaattataattacaccccaaaaatatcattacatatgtaactttgtgtaaaattactaaaatagatatttttaataaaaattgtttttacttttaataaatgcaccccaccacaaacaataactgaatgttaaaatc

SEQ ID NO: 14350 - DNA, 8647 bp, Cannabis sativa
aactcgacctcgaacccgaacccaaaccctggacccaaccccgacctagacccagctctcaaccctatacttaaacccaaacctcgaacccgtactcgtacctcagccctgaactcaaacccgaacctaaacccaaaatctgtcccctgaccaaaacccgaacctaactccagcgccaaacccaaacctccctaaacctaaacctcaactgcgaccccaaaccttagacctaaatccaagcatgacttaaatgaaatttacaaaacatactataattttttattttttaattaaaaaacaaaaataattataaaacacatttttcaaaaataaattttaaaaactaaaatttaacttgtatttttgtaattaaaaaattttaaaacaaaaatattaccaaacgttacctatatttttcatattctcttatcaaaagaaaacctataactctactacgtattaaaactcatacgtttcgaataaactactgaggatagaaatatgtattctacttttgaagtcaagtacttgaatggaatcaatatgaccaacatgaactgtgtataccaaaattatgtgaccatcaatggttcagttaatcatattggcattttcttctctatgatcaagaagtatgtaaaattacaaattatcaaaagattgaaaatttaaaactagcatgggcttgcctcaacattgcacttaaataaaatcatatccaaaactttcgccgatcctgcacacatttgttgccagtaaattcaaatttgagtcaccaaccacccgaccgatacaaggagatcaccatcaaaattggaacctcttttactggctttcaggtggacattagaagatgttaacactataagggcaatttccctttaaaaggaaacagcaaacacaacaacacagtttcctcatccaaaaaccagtgctctgtttcactactgaccaaaaagggtttattttctccaacaataccagaagaatcatagcaggatgaggatgcttttgtcaattagaaatgttcatctcttggctaaccttttgcttcttctcactcctgtcattggggtggcacaatgactgcttttcacagctcgctgtggacttggattggcttcttcatcacttgtttcatcagacctccacctcggtccaccgttgacagctaggttttcagcagctaagtccttgtgcccgtggctgaaactcagaaaacatatcacaagcaattcagattaaagttgaaatagttggaatcatcgtcatttgataagaatgaaatggaagaaatggaaaaagaactttaacctccaagaaacgtccataatgtcatctgaggaagtcgttttcaaaggtgtatcatctctttctggatggacccttctactggacacgcttggctgtaggtcatgtgaaaagtctctaaacaagccacggttactgctaggtgtaattattggattagctgttgaactaccagaatatggactctcattcaggaatggattaggaacgctctttgtcttcatttccggtgatagcagagatgatttattgtcccgaaaattgctatttagaagcacccgggatggagtaagcacccgggatggagttttattcacgtcctttgatggtgaggtacttaaaggtttaacccgaagaattgacttgtccccgacctgaaatttgaaattttttccgatgctaacttgaggctgtagtcccatttcagaattttgaaataaactagcaccatcaagtttagagtgatagttgtcaaaagatccatctcttttcaagggagtttcaaaaagtgagggcttccgtgcacttgtatgatcagtccacagagccacaggggaatcatttaatgctgggattaataaactaccagccttggtagagggaaaatcagattttgcaggcatttcaacttcatcaccagtattaccagcaatttcaggcaattttccagtcattacttgttgccgttggacttctggtagcaatgccatgcatttttcctgaaaaaaaatctaatcaggtaaaagagaatacgagaatttaacatgtcattgcatagtaatttacaatgcctgacatttaaaccacttacaactaagccttccctccagccacacactgatctcatcctagataaaacctcttcactgacagaattctttgcaatgaactcctgctctagacttttaagtcttaaatcaacttgataagcttcagagtacctgtatcgctggtaaacaaaaaacaagtatctgtcaggactattattcataaacatactcggaagcatgaataacttgtaccaaatatgtattctcaacattctcgaacaatgtaatgcagtactttttaatttctaattgactttctgaaaatgattgtatgcaaaaggatcaaagattcaacaaacaagtgaacaactcattaaactggaacaatgtatgcattacttttcaagttgcatttggcatttcttaaaatggtcaaaagcaaaggatccggattcaataaacacatgaacaagtcacaccaaaaagggtagtatataatctgatactttatcctcacttcgaatttattcagccaaaaaaaaaagtaactgaaaatcttatgttgtaaaattcaatgatttgtaggtgtggcatttcccttgttttctttaccggtgaaaaacagaggcagtggaagatgtatgatcagatatttcaacataactttaaaattatgaattactgaaaatcatatgtaacacactcccacaacttaaatatgatttttcttgtttctttatagtgaaaaataaagaaaccacacttgatgagacactaacaatatagtcagacgacagactgcaattactcagcacagttaaatataagcaaatgacaaatacctgaatatagaatactacaagaagacttccaacatttgaagaaggatcaccaatagcataatctaaaaggcatttatggagatgtttttcttcatcggaattccacggtaactcaatcattctgtctaccatgttccttcgtatacaaagataacaaatttcagccaccaatatctccacccagtccttccaactcttgtgttcacctttggaatcatcatgcgcatctgcaaataccccattctccctgactttagtgcacaacattctttgatgtaaaaacgcttcagtgaaaagtccacactctaccctaacccgaacagcagtaacagcctcactaagtgaaacaaaccgtgaaacaccatcttgtccagaccaccttaaaaccatgagagctgcatcaggatttcctctttctaatagaacttgtgcaatcttaggatgtgtggatggacctgagatttcaggaagcagatgacatgcttcctaaataatttcgtataaaagtaattagcttataaatgaagtttgcaaatcattcatcaaacaaattgacagggaaaaataagcattttaactgactgggaaaaacagtattcgtgaatataatccaaacaaaattctatcttaaggccttaaggagcccaatgatctaatctctagtattatttgtgctttttcccctcttcttaataatttataagttttacagagaccacttattacacctctaattttataactctttcagctcacagatcaaatcagattaactaaaacaatcttataactacaagctaaatgcaaataaacaactatccatacctaaaatatacacagcataacacataatgtgtgtggagtcccacatgctatacaaattaacatttttataactacataataattagctttaatatccattgtaagtgacaagaattgcttttcaaagaaagcaagaaattgaattaattctctagtgtgataaccttctctttagtgctaatattccacacacaaaaaaaaaatgtcacagaaaatatgagctatcttgataaacttgatatatggaattatttctaaagagaaaaacaaacaagaacttggcaaatgtaatcattatttacctgcatagcctcatccgtgaagtcatccaaaagatagaatattaaagattccaataataaaatcctcgtgatgccaaaagaagcagcgaagtcttctacaatgcgtctccatttgtcattaggcattgtccaatgtcgatcgtataggtaatagagaaactatcatgaattaaggaaactaaactggatgcaccaaaactaagatttcattcagctaaaagaaatataagaaatgcaaagtgcatatatataataaaaatatatatatcggtatatatataaaaggatacaattgcttgttttgctaccaccatatcagaactaccacctagaaatagtatatcaatggcagctcgaagactttcaaatggataacatcctacaagcccctctaccttagacctaaaaactaatgaaattccatccttctgcaaagcaacttttaattcctcccccatatcttgtgcatccccctgttctttttcaagattagtcagtgcatcttcaataaacaacgaaccttcctgtctaacaaactcttcagaattatttatcgcatcgggccatgaacgctttattgcagctaatttcctttcacggacacgattacgccatgaattggtattggcataacgagattcgacattctcaagaaacttatgtcttatacaccaaatcatgatctccaaatgctgaaaatcaaaaacaaatactgagaaagaaaaaaagaacatctacttatttgcaaacagaagaatgcttttcacaaaagatggttcattaagcatatccgaaaacatacatactcttagtagtcaaagaggaaaaaaaactatgtcatctcgaaaactacctaaaaagaagtcaaacatttctaaactccgaaattgtgtatgttgccaccaatttacaccttaagaaactgttatttgcaagccttacactttatcatgcatgcactactccaagttcaaacattttgaaccaaaataagaatctatgttcctcaaaatgaagcaaattatagagatggtttgatatttttatgactgcatttggtttcttaaaggaggctccattgattttagaagtgaaagaatttttgtaattagccaatgttccacatgtgttggtgtttgcttttgaactcctttacaaggctgccactcttggttttaggtaccatctatagataatgcatacacactaatattataaaagttataaggaaaactaaaatgaggtcacacataatagtaaaaccaactgaatataaagttgtcaatatttagacctgctttgtcttcgatatgctttcttgaaggaggtgcaaatcattgagctgagctgctagagaattcctgaaggatgactctaaaacctcaagcacattggatataccagctagctgggcagaatacttaagtgtacttaacctgacttccatttctgctgcatcaagaatatctattgatacacgttaagatatacacaccatattaatagaaaatatataggacacaatgcaagatacaaccaagcttcagtgagataaatatttcgaaatttgaaggatacaaattccctgaagttcctttatgatattcccatatgttcgcttgcaccagtctttgacaacaacttcatccaacaaaaaagcaatgacaggattgctagacacagcactttcatccatgcaaacatctgtaacatctgttgaattactgttaaagatacatgaacaaaaaaaacatcatgtagataaagtatccatggcacgttaataataatcttctggtaatctttcaaatatctgtttcacagcttcgtttactcagtctcgaatactattgcagaaggcatagactatagaggataaaaaactaaactatcctatagaaagtctccctgatgggtgattcaaagatcatgagattttggtatattgaactaaatatgagggtagagtgaataaagcactaaactaatagaaattctcccaactagatgattaaaagatcaagagattttggcatatttagctaagtatgccttcaaatcaagaataataaaatacataaaataagacaccatgaaaggatacaatggcatatcaaagaaactaagttattctctagagccacatcgaacagcagatacaggtgtaagacatcagcagttatttgctcttctccctcttctttttcttgaaatctatcatcatatctttttgatataagaccagcatcgatgcactcgtaataaagacgaggacgtagactaacaccattcttttcttttccaattgggattctgcaaacagggcaaaggtcacaacgctgactacattctgtacataatgaagcatgtccacaagagttcaaggcagactctacacagcgtccacagcttctcaagtctcttgttgctcgacagcgctcaacttttgcttcattgcataactcaataagatcaattgatgccaagtgctccaaggcttcctaacaattgtaaatgaatgtataattctatcaggaaaagcaattgatcaatcatcgtagactggaagactaaacagtggctctatgactctgtaacaccactatgcatagaactccacatcataatttggtattatcaaactaatacatatgaagtttaatacaaaacagccagaaatggtacaaaataaatttataactacactacgaaactcgacacaaatataaatgttacttcaggtgaacctaaactaaagcaaatccaacttatgtcgtgattattaagctacctagttatttacaacagaactgaagctaaaataaaaaagacaaattgcatttcccaaacaccttcttagctatcaaaaaccacaatattcagtatttaccaaaggaaaaccgctaaagtagaagctacattttaaaacagttagggtttcgaaaaaatgcattaaaatttgctcaaagaggcacctgaacagcttgtcgagaataattgggttgccggagatgagaaccagaaggtgtggcagtgttgccgccgacgtagctggaaggctcagcggggccattgtttcgcatctccatagttccctaaaagtgcgcccgagtagtcgcaacaatgctaaataaaatatatatagctccaaaaccctagagtaataaaagtaagaggatggagtgagaaggagaaagttaggagtcgagaaaaggcaccattgatgctgccatagacacttgaaagcgataggtgaggtcagagaggagtggaagggggaagagaagggtttttgaaaaatgtttgtacggacaacgggggattttggaaacctgtcaatggagcgccaacccgcaaaattgagcttttgcggttctaatcttctattgggtttggccgaaagcccaaaaagctgaagtgttcaaaaactagatgagaaaatcattttaattaccttttctgtagttcctaacaaataaataagtattttgctttaggtattcaaaataatttaattaattaaaatatataattctctgtaaatttataattgtatttagttatgcatagaaatatctagttaaattagtgttaattggattatattgtttaactaaataaaagaatatgattaaagtattgtgaaaatttatataaaaagtattaatgtattaagtccatagtattaagattgtgatggttagtgatttgaaggatgcgaatgcagattaaaatagggacctagttgatgacctctttttattggatgaggctgagcaaattttgtctattttgagtcacgacatattgttgacaggttaatttggtactataactcttctggtgcctactctgtcaaaagtagttattggaatactattagacttttgggttggggtcaatgtgactcttctttgggtcctttttggtggaagtatctttggagtctctctattcctccaaaagttaaagcatttatttagagagcttgccttgattggtttttcacttcgttcaacttggctactcataaggttcctaccgataaagtgtgccccaattgtaataaggaatttgaaacttcttttcatactctttggggatgttctctccttaagcccgttgtggagttaattgagttgggtggatggagaggggtggaaggagaaattaaatcacttgtttggcaagaaagagaaggaaggagaggagagatggagggagacattctctctccctccaaaccttcaaaatttaatccctccaaatttggaaggattgtagaaaaaaaaacaaaatacattttccaaaatacaataactacccttacaaaataacaaaattttattttaaaaggacaattttgtaattttactaataaattttttctccatccttcccacctcacacctaataccaaccaatactaaggagattaacaatcatctctatccctcttacttcccatcctttataacctctccatccatcctactctccctccctcccaccaaacatagccttaggaaacatgaggcgattcttacaagagtggaaatagaattgttgtttgtaattttgtggcatatttagtatc

SEQ ID NO: 14351 - DNA, 4895 bp, Cannabis sativa
tgagcatgttgaataaatataactaactggtttttgtgtgtgtgtgtgaattgaatttttatcttagttgctttacgaaaccatggttgataagtccgccggtataagtccgccgctaatgataaattaaaaataaaggcgggatttttcccgcacatttcacattttgaataatcaatgaaacatgccgccggtaatattttatttcccgccgctattactaaagaaaaaacattttaaactaaaaaattaaatttttttactattaccgacggaaagtgtactccgctggtaataacccttattattaggggcggatctattccgccgctaataagtccgcccctaatgataatttttgttgtagtgtgaaacaaaaccaataggacaccctactatagggtaggggcatactttgcctcaattaagacaaggatgatatctttttcctcataacttttgtctcaacaattcttgtcttgataaattttgtctttattaacttttatctttttcctatttaattaatttaaaaaattatttattgcaaaaataaataattactacattgccaattataaaagatttttctgaacaacattatacaactctttattcctatccttgaaagtattttaaggtggaaatttgaggaccatagacctataattctaagctccaataaagtagattatttattgagtcttatcaaccaaataatcatatttatttaattctataattactccactataaatatggaatcgaactcttagttttgtagaattatatttaatgagtgttactgcagtgtctattaatataatcaattccagttgttagcccttgtgtcaattcgtaattagttttggtcaaaatattatttcgcccttttaattaattttttatcctttagtaccgctaatttactagtgaaagtataatatttagattccatttaaatttgtacacaacttttcagttccagaattaacacttaaagggaaccaacattctatccattagtaaagtcaggattgcataattgtagatcatgttcccaatcatccacattattggattcccaaaacaaaagttgtaagaatcattttctctgagaaactttaacgaatgaatcaaagaaactaataacatgaacaggatcatgattactcaagatttaggccggtctatattgttatgatatgaattaggtctttatagttaaggatacatgtttgataaggatagttttattcatatcggtcattgtcatatgtaatctttattatatacaccactttcactttgatttaattctacattagttattcgaatcgagattacttgtactgaaaaacggacatcagtgaaccatactagaaactattgattaaaaatttcataactttaatatattattgactgatttattcataactaagagattttaattttttatagctacaatcagtcacaacctcatatatatagataaaaaaatttctcatatttatataaaatttttaacaataaatattaataatttaacattaatgcatatatcaaaatattaactcttatttattaataattaaaaatgtgtctagacacttttcagcatagaacctcacatatacatcacataattttcaataatgccttccttaggttcttaactagatctttcacggtcatgctgaattccttttccatctatatttatccacagggaaaaaaaaaaaaacacagatcaatatatgaattattacataattatttgcaagcatataagacctataatgtcgttataattaagaaggtcaattatacctgagctagtattgtaatatcgagagtgcagttgccaaagggcatgacactagtgttaaccacagaaagatgatgatcaagcttttcgatttcgctcaatattttgaccacaatccctttgtgattttcacaatggattcgaatgagcacatccttttcataaactcttgcttcgatttcaggaagtaatgttagtgtttgattattatcattattgttattatgattataatcttgatcgttattagagcgaccctcgaaattttgatcacttgaagaactatcttgattttgttcatcagttgatgatgatattgatacttgggattttttaaacaccacagattccacagttctactcttcgactgttcttctagtatatttaccctctcttgtagttgcttcacataaacaatagcatctccaagaaccgatgctttatccatctatacaaaataaacacatagaattgtgaagacaaaaaaatatatcatggtcagttatcaaatatacataagtactattctatagtaaagatttttcgtgagtggaactggatgttttgattcactggtcatgattttgtttgtagaatagtcctaagacttttatttataatttgaaagtttattaatgtagatatatatattaatggggggacgtgatttagttttaagatgtgtttggtttgggagtaataaaatgggaagaaatttctttatttgtattttaaattattaaaacatcatcatttcaatagaatgatttttcctatttgatgtgataaaataactatttacttaaaaattactaagaaaatcatttcgatacaatatgaaaaaaaataatttttttttttttttaaggctatacacattttcattttatttcattctgttccaattttcattatcaattttatatatttttctatttttattgctttcaaccaaaccctctatgagtaattgtgtaccttctttaagcctgggacaattgcagaaagagcgatgaagcgttgggtgagcttttctcttcttttcctctcagccatgatatggtcttgagcatgtgaaggagttttgatcattgagtaaggcctcttgttattattattataatcattagtccccttgatgaagattgatggttgagatgatgatgagtaattttccttcttattactaataataaaggaatttcgatctttattatttgataccacatgatcaagatcatcaagagatgagaaattgatatctgtttgggacagtcctttcttgggtcttaatgtagtactactaatatcactcatgttaattttaggtggtgatgaggaatttgggtaatgctggttttgataattatcaaaagaaagaagctgagaggaattagaagatggtgcaggttttttgttcgaagcttgatgatgatcatgatgagagtactttttgatggaatcagaaccacctgatgtggtgattgtagagtaagatgaattactctcagaagagaaatcttgtttgtaattgtctcctcctactaatatttgatgatcatctgaaccaaactcaagttgattatctagagagaatatattattgtagtcttccactccttgctgaaatattaattaaatttgtatagctaattattacatatatacaaataattcacatcatatataatcatactgatcagtgatctatatcaattaccagtacttctgataaccatttcgacgatgccacgtccatgatcagccaagtacttgatcaccagattatatagtctacaagaaaaaaaacagtacgatcgttaatttgttaattagagctgtaaataatacattaattatttatattatgactaaaagcctggaaatcatgaaaaccccaatctaattctaaaatatgttttcaacaagaaattgaaaattaattttacgataacatagatatgttctttcagcaaaatgatatatacgcagaaaaaacagtcatcattattataccattaggaaaagagagtagtaatatttcagatcaagaggaacaatacaagagatataggcaaatatatatcaagtataaatttatatgttgaaaaagtaaagatagttatagcttactttgtttgatgtccagtactactagtggtgaaccaaaagtggcatatttgttcggaaatggagctgtgttgaaatgatttattttgactacactcttaattatgataactacatatttagtagaattaattggtgattaaatttcttaatttggtagggtaagtgtgaacaatttttgtcggttatattgatggagtgtagagaagagacgactgagtaattaattttgtacttttgtatatatgtatgagtctatatcacacacaataataataatagtttgagttgacgcgataagcggggatcatgcctattactacattatcatattagatttccaaagagatactgtcctagctagctttcatgatttgttcaaattaattattctcattaacattattatttgccaacaaaatgttcaattaattatattaagaaactctttattattaattatctatctctttctataaatatatatatatatatttgtttaatcacgtattagccgccccaccgatcattttaatattgattattaatcaattatggcaattatatgagttatgaagaattgatgatgttctgcaagatatgcctgtaaatattgagcatgtaaatatgtgggtgtagaatcaggctgtcttgtccatacatattttaaaaactcccaaaaatatgggttgtattcctatgggcacggcttgtaagtttttattttttttcgtgctcaggattgtatcacatattactcaggcgactgcacttgaattcgtgtttcacttttctatttattttttttacaataatgagctaaccggtatcatttttttagtagttttatttattttagggtaatttgcggcttaacctctataagtgtttagtttattgtaactaactcctaattttaaaattttggtggta

SEQ ID NO: 14352 - DNA, 3821 bp, Cannabis sativa
ttcaactgtgcagtcccatacctatacagtctcagaatcatcccacttgaccatccccaggcggtgtgggattgtacagcttacctgatatttctccttacggatcacgggactactgtgtcacaattattaaattttattttgacaaaaaatcagtttagggtcttatttgtaccattttaaaaaatacaggatctattttataatttaacaaaacagagaatctatttggtaacttttataaaacataaaatctaaaatagtatttaccctaaaaataatagaactacactttattatatgcttaaaatacaataaggatgtataattaactatataatgatatataatattttgtagtactagtgttgagtattagtagtatttttttataaagattttgttcatgtggtacccacgtgtaatttttactagtttaaagtaaaaaagtaacaataaaaaaattaatttcaatgattaaagtgttaatataaatctcattgataggggttcaaaattttagaaccatctaaagtgtaagttagcttataaccatcaaacaattaaaacaagaattttgttaatagatatcactttttaattttaattataaattatatatattgtaactaacaaaagtatatctaattcttatggcctttctctatgtggatcgtccactatatatataaactcttttctacaactattctacaaaagtacaataattagttgcccaactccacttttggctctttgatctagttcaatcgtggaatataatgtaaactgaaatctttcattatagttactttacattaatattagtgttagtttagttaagttctgtgtttttctacactaacaatatttaatccatttcatttagtcatttattatcaaaagtttattatatatatataaaaaagttggtttggttagattgcatgaaaataaaggaataagattaatagaaataggaattgggaatgaaattaaattaaagtatttatcattttattttctgttttaaaataatataattattccaccaaaataattattctattaaaataacattcaaatactttaatataaaaaattagaataacagttattttctttccattcactccattttattactttcaatcaaacacaaccataattatataaaaaatattaaaaaaaaaaatatatattgttatttgttacgaacattaatgtccatgcaggcacatccgttattcagagagaataattcaattcaacaataatttctaaattcttgggagtttcttttccattaacatataaatatatattattaatatattagataattaagagattaaaagtacacattgtttgattaaattgcaatacacacccttgacaaaattatcactttgttaattagcatatataattagctagctatatatatatatagtagtagtactctcaatctcacacatacacctctagcggccatctcttcgcataaacacccttttccactttgccagctctctcaaaaagtccttaacctacagttaattagaatatatacaaattaataattattttataaaaagtaatattacttttgataattattataattataatcttattacctcagatggttcttgcagagaatatgtggcatttgtttcctttggaaatttagaaacaaggattccaaatccttgtcctctatcacgcaaaacctatatttaatgtatagaagaataaatttttagactctttttcatttaattagtataattgttaattaataattaataattatcattaccttgaatgcatcctcatcggtttgatcatctccaatatataggggcaacacttgattagcattgggatatcctgaaaaaaaatataataagtggttattagatataaatatatatatatataaacatattaaaaaaagaaaggattaggtttattataataaaatatacctaaagattccaataagaattcaagggctttgcccttatcccatttgatggttggcctgatctctagtacctttttaatatttaaaaacggcacaacaaattgttataaacttatacacattttaatttaataaataatataagacactttaattttttatagagtacctaataacaatactctaaatatattttccttattattactattattacctttcgcccttgagtcaatttcagctttggatattcagtgagaaccactttaacttgatcagccaaagcgtcccaattctgaaagttaaccccacaaaagaaaattatactcataaagttgatgaaaaagaaagggtccaaagcagtataattcatgttaattaagttgtgatattattgttttacattctcatccacacagcgaaagtgtactgataagcagaacttgttatgctccactctgactccagggatggattttgtttcttccaccaaaatagtgtacacctgtatgcatgcacatctttataattatttatgtctatatatatataggagagaaaattaaattataaactaattaattaattataattacctcatcaatcattggtgaaaattctgccgcaggttgatacataactgcattcttaatctgagtatcaattaaaaatataaaataaacattaaaattttaatgttaaggtcaacaaaaaataaagtaccgaagtacaaacaaatcaccaagaagacaaaataaaaaataaagctcacctttttttgtttggtaatttttgtgggaccctttatgtccattccatggctgcctgcatagtatagctcaggtagtttcacaaagtcataaacctgcatcattaatataatttgtatcatcatgatcatcatattatatttatggtggatataaaaaagtaataattaaaaaagaatgaattttgtttaccttgtctctgcatcttccactgactatggcagttgggaaatatctagcaactgttttcacagcaaatctcatctgaaaatgagttgatcatgatcagttaataataaactttattattaggtcaaatttttaagtccagacatatataaatgagaaagagagagagagtaccttatcagacatgaaagctcgatctgggtcttctacaatgggagaaagggtaccatcatagtcaagaaacatcacaatctgttttccttttgaagcattttttatctcttcaaacatggttagagctgaaggatgactagcctacaaacaataatattatatatatattaacaaaaatgtttaaaatgattatataaaacatcaccacaaacaaaaatcatatactattaatataagttattacttactatccaagagttttggttgtgattttgtgtttgtgagacagaagcaggattattattattagtagcagcagtagtaattgttttgttattactacgtggaggagaagaggctctcatggactcaacccaagaactcattctagttcctgtaccagtcctcccatcaccatcaccaccaccaccaccaccaatattatggatttcattaagtctctgaagcttgttcatggaaatggtgacacacccatttcctaatttcatctcagacgacgaagccacattttggttagccataaatatatatatgaagataatcccctgaatatagcaaacaacacaaaatatataaacattatattgttatatattaagaaatatagaacaagcacataaacttaaaagataaggtaattgtggcatacgcacacacaccgtaaatattattagttg

SEQ ID NO: 14353 - DNA, 7303 bp, Cannabis sativa
  modified_base (1261)..(1278): a, c, t, g, unknown or other
caacttgtgggtgaaatgggttaactcgatctatctcaaagggcaatcaatttggagttaccacacaaagcaggatgcttgttggtacttcaagaagttgctgaatctcagggtatcaaggagtgaagctgagctgaaccttgctgtcaatggaaagaaatttcatgcctcaaagttttacaacatgcagctgaaagataacaaagtcaattatgctggtgcagtgtgggataaacttgtgttgcctaaacatagatttatctattggcaagttgtgaacacccagcttataacccgagacctgctgaacaaatttgtgccaattccagatgtaaactgtccagtttgtaatcaagcagaggaaaaccataatcatgtgttttttgtatgtcttttctccaaacaggtggctgctaaagtgaaagagtggcttgggcaagtgcactggccgatttctgtcaaagatctcagcgaaaaatgctcgaaaactcagtttaacctccggaatagagtgataaactctgtgattgctgcttctctataccagatttggctaaataggaatgattgtatttttaatctaacttgtgccactccttgtaagattagtagagttgttagaagcttggttaagataagaattttatgcttaggtcctttcaaagaggacagaatgacaagattcttacttaatgttgtaaaggattggtaggttgcagctgctgcttgttgctggcagtggcctttcggctgtgttgctgttggttttttccagcttgttgtattggttctgtttttgaataaaatcttccctttgttcaaaaaaaaaaattgagaaatctattttggaccttaaaatatggcccacacgtgtaggccataatttattttggaccatattttattggccatattttattaatttctttgttattttattgttaattatcttttaattattaatttgaataaattattggataatgtatttaattaaaaagataataataaaataaaagatttaacaaatatttgttactcagttattagatatttatatttgaatttgaattatgaatttaaatcagtttagatattttcttttattttaaaggattaattaaaagactttgtttataacattatatataggacatatcattataaactaacaacctgagacaatacgaaaaagcagagaaaaatcaagtgtcagttgagagaaattaagaattgaattattctctctctctctctctcnnnnnnnnnnnnnnnnnntctctctctctttctctctctcccctaaacctcacacaccacacacagtgttgtgtgagattgtgatcaatactatctcatgagttaacaatacattgtaatacataaatttgttcatcctagagaatttaatatcccactctattcatgagtgttgaggctggcttggaagcttgtagtgtgaattcttcagcgaagttcttgggttggatgatcgtaattatactaaaagataccaaagatcccttaatagaatacaagcggtattgttcttttattagtctagatttaatctatttatattatgatgagattctttggcttatagttcatattagataaaactccttttttttttaacaaatttgcttccgcctttctaactctgatatggaccataaaaaattaacacaaggtgcatcttgttttctggtagcccatcatgaaagaactccacagttacacgtgcttgacctgggataattttaggatgagtgacctcctaggaagtttttctaagaagcatgcgagtgaggacaaaatatgctagaaacacttgtgttggtttgtagggtcagtcgtcattttatgaagcagcaagagtgacgtactcgtgtataagagctatcattttatagatgtaaaagtccaataaaaatttaaagcggaaacattacacttaatatgaataaagattccaacaagtacaatgaggaaactcaatccattccaaaattatatttcattaaagctatggtaaaatcaccaaaaattattgttttaaaataaatacataaaaagaaggatataattggttgttggtgggcttctgccctgtagggatggcttctattgtatcttatgaagaaaagattgggtttgagagaaagaagtaataatcaattacgatgctttcttttttttttttttttgaaaaaacaatatacttattgtgtgaatttaagttttatgtaccaagttacaaaacaatctcatgtaattttgagatttgcatcgaatcttttacacagttctagtttatgtacattttgaaatgatataaatatataagttgtaaagttaatcatgaggtgttatcttatcgaccacaaatccttgtcttagccacatatgtacacttgaaaagtttatttatttatttttttgctgaattagtacacttcaaaagttggtagcctaattatttaatttaccaaagcatgtgacattcttgcattttttaatccaacaacattatccaccactattttcttcacaataaaactttcccaatatcccacttcaacatttaaatttgatgattcataaaaccattcaaaatgactacttttaatttattattattgaattattttgtcaaaactaaagtgggcatacgacacgtgtcaataaaacaagacaagagacaaaactcaaatcaatagtacctaccactcactaagtgtgattggtaactaagtaggttgagctagctccttaacaagttagtctcatcaaagtaaaagtgttgattttaaattgattacaagtagcatatcaatgattaaggaatattatccgaagtgtagtatattcatacaatattttaataccaacttggattggatctatagatgtaataatggtacttagttactaatagcctaataggatacacatcatagggaataaaaaaaatcattcagtgacatattccttttgagctattttgtcatgcacacttaagtgttggctttccactaaagaaagctcaagtgggattttctatgaaactctccaaaatggggctgtgatactgataatggattggccaatactagaaaattgggataagttaaaatgctccaaactttcaaagtgaaactaatggggttgaacatggagaaactgaatcaaatactaccccatatcttatacacttcttcttatactgtccatatacattgctgactcccatatttaaaagaacaaatatataaagaatgaaagaaaaagaaagccaaacttgaaatggtaatggtcggttttcactccattatgataatagtgtcaggcgtggaccgacctttaaaaagttgtttccactagtaaatcttagtcttacatttttcttttaatcaataaaaataaaacaagagacttcattaactcattctctattatctttgcaacttgttttagtgcttaaagtggtcacataaaaaagcttaacgaaagtcttatgcttcccaaggacgtgggtgccttgctctatagtgtctataaataccctatgatacttcctatagctaattagagatgacaattttgtaccacaagttttaattcaaattctctcaaatatccaaagcgtggtgaactaagtcctatagtctaatctagttttgtctctataagtatagcctaacattttgcatttcatctagtgaaaagaaaaccattcaagaattagaaaaatggtatctttttctttggttctcatttgggtgttctttcttttttacattccaatacaatgtaggctacttagttataatactaaacctcaccaccatttgctagcaatatctagaatttcattgccaccttctcctgcacctgaggctgctgctgttagcccaagttacaatgcacatgattctattaataataaagtcagtactgttttcaatgtactgtcttttggtgctgttggggatggtgttagtgatgaaactcaagcctttaagatggcttgggacacagcttgccagacagaacagcaacaacaagaagaagccattgttattcttgttcctcgaagctatagtttcatgatacaatctacaatattcacagggccttgcaaatcatcaaatatttcttttcaggtaaagaatagtatagttcatgtcacattcattttattactactactttatatgtgaaaacaaaaagaataacatttcaacattttttggttttgtttttaaaaaaaaagattgatgggacactgatgccaccagatggacctgattcctggccaagaaatatcactaagagacagtggctggttttctatagagtcaatggtgtggcattgttaggtggtggtcttattgatgggagaggacagaaatggtgggatcttccttgcaagcctcacaaagtaaggcttttcttctttgtactctctaacaccatctttctccattaaacttatgaactgacattattatcacattatcaatgttacagggagtcaatggaactacagcacctggtccttgtgatagcccagttgtaagttaacaaaaaaagaaaaggctaaaattaacctaaaattatttactatctatttactaatagtgcttattatctttccttacaggctataaggttcttcatgagctccaatgtgacagtaagaggaataagagtcatgaacagtcctcagttccattttagattcgatggttgccaaaacgttcatgtcgaatcactttcgataaaatcaccttctatgagtcccaacactgatggaatccatatagagaacactaacaatgtgagaatacataattcactcatagccaatggtaattatttcaagctcttactaagtcatttttttttttctattcttctcaatatttcactctcaaattactcattatctttttattttctacaggagatgactgtgtatcaattggagctggttgttacaatgtagacataaaaaaccttacttgtggcccaagtcatggaattaggtaaaattcccctgcttcaaaacagaattagtagcagcatataatattcgcttttcaaaaatcaaaagccaatccactgaaacaatgtttttctctttcttttttttgcagcattggaagccttggcatgcgcaattcgcgagcctgtgtttcaaacattacagtgagcgattcgatcatcaaacactcagacaacggagttcgaatcaaaacatggcaagggggatcaggagcagtttctggagtaaaatttcacaacattcacatggacacagttcgaaatccgattattgtagaccagtactattgctccaccaagagttgtcaaaaccaaacctctgcagtacatgtttcagatattgtttactcaaacataaaaggaacttatgacataagaagccctgctatacacttttcttgcagtgactcagtaccttgcacaaatcttactctttcggaaatagagcttcttccagccaaaggagagtttatgtcaaacccaatttgctggaatgcttatggaattatggagacactttctataccaccagcattttgtctcttggatggaaatccactagtaatgcaggacagggatgttgaccagtgttgaccattggtatagataccaaaaaaagagttaagtttttatagctgtattagtgaaagtaaaagtatgaatatgtcattactactcatgtatttatagtaaaagccattgaaaagaagccactgtatcttgttattctcttgcttgctttttgcttctcttccattctaataattggagtactaaactgtagagatttgtccaaaaatgattatatgggttggggatatgaaagtgacactcaagtagtgggcaacataaatagcagctaggggaccaagtatgttaaatgacatcactgcaaggttttcattaagaataaataactaaaaatataaccatcaattttctttgtttttccataatataattttacagcccttaaatcccactctaagattcttgaaattgatagccaacaatatctttttgtgaaatactgaagattaaacttaccttagtgtagagatttgtccaaattttatattagtttatggggtaatattgtaagtgacactcaagtaatgggaaaggcaatagatcctaggtgacgtaatttatagtagctagagccagaggataaataaataaataaataaatgtaaattttacagctctttatccccttgtaaatttccctaaattctcaaactgatagccaaccttagattaaatttaccaaagtctacctacttttacacctatatggacagtaacttattttgaaagaaacaaaatagtgaaatacatatacaatctacaccaaatcatcgtcatctttctctgttcgagatttgatgaacaataaaaaaataaacccaaaacccaaagcagttgctcctccaataacaatggccattaatttcccattgttgctactattattgcctcccttgttttctccatcatctgtttagaaacagagcaattccattaagaaaaaaaaaaaaaaagaaaataattcaaaattattaattgatgactaaaaagagatgttttaaaaccataccaggtatgccttggggataataagaataacttaaaaagcacttgtccaagtaaatttcagccgaaacagctctaccacattcttcttgagctatctcaacagccttgttcacacacaaaccacactcacaagcttccatttccccctcacactgcaccattgcctgcaccagttccaagttagtcttacaaaacccgcctttttctacaacagaatcttccaaggccaataacgcggcgtccctcatggcctcaaagtcgtcgacatggtttgattctgggccacaagtcttgtgcagtaatactagttcgtcttgtgaggaagagtacacgtccaaaacaagctcctctggctcataacgaatatagcactgctgaagctgtacccgggcagcatagcacctgttggtggtggctgtttcgggtagagttttgacgcagtttaggcactcctcattagtgatgtcttctctgcattggaagaggccagtaatggctgtttggtcatccaagacacttaattgggtggttttgaaaaacttggacttggaggatcgagagactagctcttggaaaaggaatgagagggcttgtgagtgagattggtatgttgaagtggtaagattttttt

SEQ ID NO: 14354 - DNA, 5633 bp, Cannabis sativa
aagtccaatttacgttaaattttgaataaataataactagtaaatacaacagaagcatatgcatatatttattctagactgactaaatgtcgttttcataaataaataccaaatattttcactagaatgattccataaatccgagacgttttgagtgtcatggtatttgagaaatctcttaacaccatttagtccaaaacagtaagtaaacatatcccaacatatactgtacagaggattcattataacttatagataccagaacagaacagaacagaatcagataataataactaaagcctatttggacattgttcatctggaaactggagcgtgttcaactaccagaccagactttcacttcatttccaaaaagaagcaaacatgtcaggggcctgtacataagaattagaaagaaacctttgaaactctaaaaagggtctttcagtttcaaatatcaccattcatctaatctatatccaggcttaaaatgtcatctccagcagcagtgaactccataaggataccgtgcaactgaaaaaacaaatttaagcaataccgctgctgttccattcattcacatcgtgctcgttttgttggtggaacatcagagttttccttgcaggtttcggtttcatcatatgccttttccttctcacttggatctatgaaacttacatccggattagacttaggattactcgagctgattcctttttcgaggagatccacttctgaaattttggatttgttattctctgacgagtgaggtgctatattcgataacgaattcttgttgtcatgggaggttgacgaagaagccttgtacttggtttccatctttttatgctgatcaaacatcttttcaaggtacttcccttgttcttcaatttgcaactgcaactttctttgatgctgcatttatgaagtaaacattacactaattagtaacaaagtacacattacaagtacttgtcagttgagaactttgatgaatggcaattcaaggaaattgagagaacaaaacttaggcactctattaatgctactaaatggtaaatcaacagtaatttcatgtttgatgttatatactgtgtttgcctaatccacactgttagatgtaacatgcttctactgaaaatacaagaaaacaaagctgcataaccaaatatacctcaagttgttcgtggaggcgcttctgaagttccacctgcaacctcaaagcttcagtgatccccatactcctgcacaggggaaaaattttcaaattgtgagcccgaggagatttctatgctttacttctccgagaaaggacaacaataatattataacattaaatacatgagtattctgtcagggtaaatgaaaaatacacacgtgtttaactcttgagatctcacgtcttcagcggttggtgattttttcccagtgatccctgaaaataaacaaaatacaggtaaaatactttcaacttatcaatcaattatcaattatgaatacatatatgtagagaagttagaatgaaatttcatagtaaataagcaaaggtttgtactgaaatctttcaaaatactagtcattgacaagaaaagctgcataggcaaagcaggtcaaacattcaaaagattaaccatgaaaacacatgcataaatgtttagaaatgtgaaagtcgataggcctcagtggtacaggagataatgagagaggaaaaacaagggtcattgattaccttctgacagttctggcttgtatctggctgttctatatttctataaaataccaaaaagaaataattagaaaacaataaaactggcaaggaacttggcagaagaagaagcaaggatttaacatacctgcaggtggctttttacatgataaatagtcaatcctggaactttcatcagatttaagataccttttggagtagctcctatatgcatttcaataattttaagtaaatatggaaaggaatgttctgttttgagtcctaatcacatgtaaattgcaataacagaatcaagtggtttacgcactttcattgccaccaagtgtgttgacagcttcgacaaaggcctcgtgaagctcttgtgtccaacgcattctggatttcgttgaggatgcattacacaatggatcaggagtagtagcatgctctccacattgcagtgaaggctgttgataattttggatctgctgcaccgaggcatcaactgattgtatacacaccttcaggtataagaaaagaaaaagtcaaacaagtttcctttttgttgaaatccctaggaaataaacatgtacagaggcctttttttagctaagagcaagaatcaaagtgatcttaggtcctcttaaatattagaaacacaaaacacctattttaaaagttaactactgttaatttgaaaatgcaagagacatttcaaaggcgtcaagcaacaatgaggtatcatagaatttcaactgtgctttaaaaagaacatattctttaacaagtgggcttccttacatgtctataaaactccagcaaattcagcaaaacaatattaagttgaagtacacacctctggtttggaatctgttctattacgactaataggaaggtcaggccataattgatccagatcatcactgatggaaatcatctgccaatctggccaatcattcttttgattatggtcctgagatcttgcagcaacagtactagattcaacctgatcattcgggacagagaccattccaggaaaatcaagtaaatcatgaattgaattcggacaccaggcaatatcattattttctgtaatgtgatcaataaatgttgtagattgcccttctgaaaggggagaatggattggtggcattccaccacttgactgaggaacaagagaatggagggaatgtctttcatgtggggaaactgaagatataggatcttgaacatcgctcggtaacctggagggtgatgaaaagaatcgctcattagacccagcactggaacttaacgaaggaccctgtcttatggaggaattcatcatgatttttctttgtgaagaaacctggtaagtatctggcagcttggtatacttgtcttcaataggggtagagccaacagggaaagataaagacataatttgagatgccccaaggtagctcagctgttttgcatctgacccttgaacaaataaagtaggacatgttaaccatcgcaggcatatcaagagtggtaaccagtaaccagtaaccagtctcagcatcttaaataagatgtagcaaaaaaaaaaaacatcattacatgggatattgtattaattagctctgatcatagaggaataataaccccaaaaaaaaaacaataatgatttttttttttcagaataccaaataatttaattgagtccctaataaatattaaagggattaaagtggaatcagaagcccacacttgaaataatagtgacagtaccaagaaaacacaaaaaagtaaacagtatggcaaccaacagacaatccaagttgagcatggcatatttcttttagctttatactatttaccaatctatgtatatatttgatatatcaaagaaaacaaagcatagctataaaaaggaaatgagagaagtaactttcatagtattatcattatgtgtacttgttgattttttttcttcttttcataataaaaaaaatctggttgttaagtaatcacacatctcctttttatttctctttgaccaatatgaagctgaatttaatcatattaatgacaaaaacagactcaaagtttactctcctaagaacatctaagaaagcaaatattattgtagacaagtgtcttcaacatcatacaccattatagggaattcaaccacaacccaacaaattctcacccctaacccttttaagaagaacagtaaactagccaaagcagttgccagtagcataaaattgatgcaataaacaattacctaaaagcatcaacagtatcaaaccaaaagtcatataaaatttgatgaatatatactaggagaaaagggtttagcacagtcaatcataagtcccaatcataggatgatttgggtcctcgtcttaagcttaattatgcatgaaacaatacaaaaagacaaagccatagagcatgagcttgaattaagcttttagacaatccaaatcacagtacaacggatatggcccctactcacgatcccaaaaagagtcatcattaaattcagctacagcaaataaataaatatgtattatatttttttctttaaaaaaaccccaaatagcaaaagagcaaatggactttgttcaattagaaaaggagcaaaagaggctcgcaaaccacaaatttatcaaaaccaatcaacaaaatcccaaaatctcaacaaataaacaacaaaaatcatgcatccagtcaaaaaaaaagtaggacatgcagagacaaagattgaagaaacgcaaactgggtattaaagaatcttacagaagaattggaaaccccaaaaattgaatccaaagaaaatcgatttgattccaaaagtagccaatattggagggaaaaaaaaaagttaaaaggcggtgttggaaaacctgaaatgatgggctgctattgcttcacttgccttgccttcctgactaggaactcacaaaaacgccgtgctttgtcctaatagaggaagaagaaagagaaaatggtgtccaacatagcctatattgcttaaatttatgttccattgagtgaatgtgtcaggctgaactaagaaacaagtcctcaacttttggccgtctgattgaagctcatggcgttttgtttattgggcaacgaatggtgttgacttgcccgaatttattcataaaatatttgagctccattagtgacggccatacatacatattacataccaagctagctttatggtccctttttgcttctttgttttctccttttggtgggtcatgttttgtacggtaatatctacacaactttccataacacccaaaaaaaagaaaaaaaaaaagaaaaaaaaaacagtaattagatttggtcagttacttcttggaaagtagaaaccaaaataatagcgctattatatcatcgtatcatcattattgacattgttattcttccattaaatatcaaatatgataacatattttcctcatgggaaattttccatctctttgttagtaaattatactaataattatctctttttactaaattttactcttcttggcgtggtattcaagcatattatatttacttctgacaaaaaaaagaatattatatttactaatatttttcttcttcattttagattcattttaatttctaggcaagtggtgtgttattgactttttgagtttattttatttttgttaagagaattcattgttccataatagatatattcttagaaaaaaaaaatctaagaataaataagacttttgtcccgaactattacttatgcgaatcctaaatcgtggtaaatatgtaatatctataatttaggtggtcaaagatcacactttgaccatggtgggaagataaagtttataaatgatcctttaatttatatcacaaaatactaatttaaaagtaatgaattaactcaccacttgaggctagctcaagt

SEQ ID NO: 14355 - DNA, 5084 bp, Cannabis sativa
actttacgagattcaccagaggatctccaccagaatttagagatcagggattcaatttccttacaaatcttagtgggaatacgaaaacaggccatggcatgtgagaggatagcacaaccttaataagtatttccttactcgccctagctagaaaaccatttatggttccaggagtgaatgatagtggcaattttatatttaaggaagttgaaagcaaggtatttcacacgagaaagacattgaggtaaacccatatacttagtgataaaaggccaattttgaagctgaaaggtatgaaagaacagatccctaacttcagtatgagtgttaggagagaacaaaatagaaaacttagcaaaattaaccatttgtcttgaggctttggaataaacagtaagtgcatgatgaaaggcctcacaagactcttgatcagctaagcaaaacaaaatgttatcataagtaaaaaaaaaggtgagatataggtggagcatttcgagaaatggcaatgccccgaaggagcccctaccctaatgtcctaaaaatagtataaggccttgagaactaagaatgaaaagataaggggacaagggatctccttgcccaaggccacaggtgtacctgatggtcccacgaacctgaccatttacagagaaagagatagaagcagtggtcatgcatttaaagataagggagacaaagtggacagggaaattaaaatggaacataccattttgaagaaaatcccattcgacttgatcaaaagctttagccatgtcaagcttaaaagcagcccacccccacttacatactttcctattatagtgatagcatgcagctcattagctataagaatactatcatgaatgacacgacccaaaacaaaagtactttgacagggggagataatcttatccagaaccagcttaagcctgttggcaagagttttggatatgactttgtaaagagtagtgcaaagactaggcctaaagtctttcaacgtattgacatgttgttttttagaaatgaggccaataagggtagaattaatatcagtgaaatccacacccttattaaggcaatcaaggacaacattggtgaaatcatcacccaaaacaaaccaattaatctaatagaaaaacacattgagaccatctagacctacaaccttatcccatgaaagttggaaaataacttttctcacttcatcaacagtaaaatcttgagcaaaaaactcaatttattggtcctcaaggcgaggccccaaagaagcaaaaattgaagcagcaacttcaatatcacttccctaagaggagaaaaggtcagaaaaataagaggttatcaaatgtgcaataccatcctgggtgttgataacagtttcatcctcaattttaaaatacttaatatgattggactttgtacgagaagagacatatttataaaagaatttagtatttttatcaccgcatttgttttgctatatatatggattatttttgtgatggtaatttttaaaaaataactataattaaatggtaattttaaaaatattaatttatatatacatatacattgataacttaagacctcataagacctccaatattaagtgcaataatttattggccagcagaagacctcataattaatttcatggaataatgtttcctctgtattctgtaatatagatttatgtaaaccactgactctttggactttttcatagacgcggtgaaattaaaaccataaccatattaattacattaatgaaatgaaatgtatatttatagttttgatcaccaacctgacctgtactaattaattatgtttctgaatttcttaagtaataagtactaattaattattaattgaaacggtaaatacaaagacatatattttcatggttatatatgtttatatattctcatttttgctttttttattaacaaaaaaacattatttcatgttaaaaataaaactaatattaaggaatattaagatgacaactcatattttgttagcggttttgttttcttggcttggaaggattgaagtgcatacaagttgttttgtgtcaaagctcttatataaaaagtcaacaaattatacttaagaaatggtcaatatatatataatctgacaaaaggaaaagtctacatatatgtagctcataatatacacaaccttaactatggcaaaagcaaagacaaaatttcagaggaaaaagtcttaacatgttaatttgtcacatatttgtaattgtgcacgtatttgccaatgttaattcagatgtaaaaataattaatttaatttaatctatatatttatgtgtttgaaaaaattataaataaaattcatattttaatataaaaaataataattaaattctaatacatatgataaaaatacatttcaaatttcaaagtatagtagattaaatatatattttatttttatatgtaaaataaaattaaatatttttttatacatataatttttttttctgcttggtttaaatttattattttttgttttatttatttttaatttattgttggatacataaaacaacactaatttattttattttttgttagttatgtaaaaaaaaatactttttttaataaatattaaataattatattaaaaagtaattaatccaaaataccattccaattaatatttttgcgaattaaattaaatttgagttactatgtagatttgattggattcaaaatatgaaatccatactaaatatgaattggatgtactataagcaaaatagtataaattaaatattcgggatctcctaaaaaatattgattcctacatgggtgaagaacatattacaagatgctaaaactgattaattaactaaccctaacaactacctttttacgtagtcattgattaatatatagctccatgcatgcaatacatttcataatagaataattttgtctcattcttcagaaattcattacatttcatgttataataaatcatgtataaatatattgtaataaaaaaaatgttgataattcctaattacaaggggtaggacatggtatatgtaggatatagtacttttgcttaaaattaacgtttccttttccaattttccaatcatatatatatactattaaattattaaatcactaaaaaaaaaatagacttcgtcttttgtagctagaatggtatatatatatttatatatatatatatatataaaccagtcatataattataagtatatatgactatactcccaaacattaattgagcacgactacagaacggtttcttaagagaatttgtcaaaaagatatttaaaactcaacagaatcaaattgaaatttataataatttgactgatctatatctatatatataataacaacgactaaatgataataaaataaatgctggattaatcgaatgtaaaatacacgtaatgatatattattcattggtatagaactggtcataaaaaagcatcaataattatgcctatatatagctataatacattattatgtgcttgactcttttgcctatatatagctaatatatatgaagtcaaattcagcttttgctgttgtattgtttcttagtaaaataataaataaaaactagcttacttgacgtattaagttaagtaatatatatattccaatcaaaccaatcaaagtaaaagtaaaagaaaatgaaaatgatgaatatgatttatatatgtaataataataatcagttattatatagcatcacattatcacatgatgtaagagaataatgagaggttgtatttgtttttaaactattacttcacgctatttttataatattttgtttcataatttatatatattaaaaaaccatatatataagagcacttacatcatacacttttaaaatacaataactaaatttaatttaattttactttttctattattttattttgcattaccataatatgtactagtttgattatatttttatttcaatataattcaaatagtatatatattataaattaattattataattttttacttattttttaaaaaaattgagagaaaaatataataaaagaaagagataagagataaatttaaaatatatattgtaaaaaaactaaacctataagtatttttttttattaatgtgcatttttgtaccctcagatttttcgttcaataaataagacacttgatgaagtgaagaatatatatataaatacttataatataataggatgaacatagaatttaacttgtgtggttccataattaaatctacctactttacaagttaataaattaaatttagcacaacttttagcatctgacaaatttagtacactttttaaaacataattagagtaataatttttcttagtgtgctaaaatataataatgtaccatctttttggtacttcattggagatgctctaataatacagatgtagggtaagagtatctccaaccattctctaaacacactacttaactaaaatagaaagtgagacttgaaaaaataaactttaaccatacaaaaaatgtctttctataatatagaatggataggtagctctttaaatgtaaaaagctccctactttttttgctattttttttttaaatagtatattaattaaaagcactattacttttcattattttataaaattaatttatattaaaaaaaattaaattataaaatattattaaaataatcaaatattaactatagtagaaagtatgattggatcaacaacaataaaaaataacttcatattctaactttaagtaatttacagtataaatatctgagtttaacttttagttgtaaataaatacttaagtttaatttttagcagtatctaagtttaactctcagttgtaaataaatatttaaatttaatttttagcagtaataatacctacgttataattttaaagcttctataagtatctgcctattaagtgttaagtaaattgtcacgtggtaattcctgattagttcaagttattaaatttttatattttttaagaaaatagattaaatactaataagaaaataaca

SEQ ID NO: 14356 - DNA, 7279 bp, Cannabis sativa
tgtggaaatgttcccattgaagaatacaacaaccaaagattcccaacaacctttgactaatctgttttctgcaataatttcaaaccttccactttaatatcatatccaatgactgtacaggatatggaccacaagccccaccacaaaccattaaagctactacccactgaaaaattcgtataaaacccccccattaactcattctactcacattcacccaaacaacaccaacattttttgaaatcacaaaaacccctagaaaatatggatctgggacttactgtagtcgggaggaggatatcttcttctcacctcgacgcgacgaaacgccatttcaaaaaccttctacttctaccatttttttgggtttcgttcgatttcacacgaggatgctgaatctcaacctcggctggctgggtttcgtgtttccctcctgcgtgctttctctaccacgatttttttgcctgggttttcttcgatttctcacgaaaatggtggtaatttatgggtttacttttttggggttccttcgattgctcaaacacttctgactttgcgttttttttttttgatttacagttataatttagttttaatttttgtaccgtttctatttgaatttaatgtgtcttttagagaatgaattgtgtcttttggataattaaatgtgtctttaatttaaatctgtgttttttttttcttttatttttttgtcttttttattttttctaattaggccttagttaaacaaaaaaaaaaaaaaaaccttttttttttttaaattccacgtcataataattaataatatgacaagctattgcatacttggactgagccacgtaggcaaataatagggtcagggggacggatgtgtgttttcactaacagtatagtggttttaggggttatctcgcacaaatttggactttgggagttaagtgaaaccgaaacgaaaattttagaagttttgccgccatttacccttaaaattatattgttcattgaacaacatccataagattagacaactaaaaatatactaaggactgcacctagtttgtaataataaaagtaagtattacttttgttcaacattttcgacactattttggtgatttggtaatgaaggagactgataaatgcataacaggtgttccaatctcatgaatcaaatctcaaattcatgactttgcaagttgcaagttaagtaaagtgctactgctacccaatacccattgtttttagggcacttttgtcttaaaccatggttttcagggcacttttgtctaaaaccagggggcatgtagaaaaaactagtgtcactaatctataaccaaacaagagttgttactttacttgttagaataaattatcttatgttagagcactcccaacatcacaaatttttttttattattttacaatacatttttacattacgatatataaaagcttcttaaaaatacattgttaaaatcttacttttttaaaaaaaaaaaaaaaaaaaattattatattttatttattttaaatatataatattaatttatacacgtatttctataaaatataattattaaatttaaaataattaatttagaataataaataatattctataaatcaaaattctcttataaaaaaaatacttcttttgctcatttattctgagtcttctgtgtttggtcctgaaacattattaaaagtaaacacgtgaccaaattcaccaattgggtaatccaaattacctttcggccctcaacaaaatttcagaccatgtgctgggaaaccaagggcatttaaggaataacacgtgtctaggtgaaaacaagtgcccagaaaccttagaatttagagcaaaaccatcaaactctggacacccaaaaatgcttaataaataatcataaccaatccaacatcttcatcaattcatccaaagcttaaaaaatcttttagacctattatctgttgttataatttctttcatttgaagttatctttaattatcataaaatacaatggcaaagaatgcagctcaatcttcccttgaccagaggctggccatggctaaacgctgttctcatggtatgttcttcttcttcttgctcatactcgctgttatgaaatttagatttgagagctttagtttttatataatataaactctatattagtattagtaatagtaaaaatgtgatgcgagtctttatgatgactcccaaaattctatttaatagatttatatagccaaggattagaaaagcaatattaatgattttatgtttgttttgtattaaattgtgcataaacatagactactttgaccgatatttcttttcttttaacacaaaaacagaaggtgtcaaagcaggagctaaggcagctgttgttgctactattgccactgccattccaactgtaagtccctccctggtcatagccttctacttcatatatacatgacattatgtttgcataaatattacaatttcgccctttatatagatatatgtttgtttacttgttttgaaaaaaaaaaattgtttgtttacttgcagcttgctagtgcaagaattctgccttgggcaaaagcccatctcaaccacactgctcaggccctcattatctccacaggttactatactctttcatctttaatggattatattaatgcattaaaaagttgagttattatgatgaaatatttggtttttgttaatataaagtttatttaatatatctgatggcagtggctggggctgcatatttcatagttgctgacaagactgttctggcaacagctaggaaaaattccttcaagcaaaatcaccattgatagagaatcatataagaacttcaaattcggatttataggactaattaattagtgttccttgtatacacatgtaccaacatgtcttgatccttcatgtattattacacttgctactttcaatagccccaatgtatgtgtatacaaggattaataaaaagaatttcaaagctaaaattattgttataattcgtactattggaataaaggtagttgataacttactatggtagtggtgtaattactagcatatagtaattacaaaatataattatattatattttaaaatacaaaatttgtttggatctcaaataataattatatatgaatttttatttttatgtttcgtagttggtaattaatagcttaataatattaattaattaaaaataataatattttgtaattacataatagtcccatcaattttaatggagtcataaaaattagataatgtaattgagactccttggactatctcaaattatatgattactgagcaattatttaactaaacaaatacatcaaatcttggaattacttcgaattacattaaattttaattttacattaatttttcaaaagcaccttataattttttaacaataataatttagtcaaattataatattttattaattttttttagttatgtaaataaaataaaataattttaatttcttttctcattagtttaataaataacataatattatttctaattgtttatattttaaatttattcattatttttaatcacaatttaataaacgtgccaaatttaattctatatgccattttcttgcatgtttttgagaaaaaaaaaaagcattgttattaaatacataataatatttcttaatagttattatctaaagctatataaaatttaatatataaattagatataattccacttcttttaacattttaaaaagaaaaatactaaaagtcatcagtggtgtcaaatactctcctacgtgttaatatcgttattagtctaatttagtatcgcgtctcatatagtttaacataataatttttagagagtatcgctagccaatcgtaagacgacatgtttaggcaccactggtgcccaatagcaatgctcttttaaaaacaaaatactaagaccacccaaatccacgtgtcatttaaccattcgaaatgccacgtttgacatagaaaattatttttttttaaatgaaaaaaaaaaaaaaaaaaaaaaactctcagtttttacctttctgagttttctcgcttcgtgtttgtctaacgtaggaaaatcatttgcattgcaaagacttagttttgtcattcttctccagacatcaattccctcgcaaaacggcatcaatttcttcatccagaaatgggttggttttcactttccgagacgcttaactccatcaagtccatccagatcagacaaaccatctctcaggtcatcactctaggtctgtaaattccaaatccaaaattcaaactttcattttgggtctaatcgtaacagtcaaattgcagatacccttttgttagaaatgggcttttttccttgtttgaacatgattttgcccatttttaggcttgattgtgtcgtcggcattgttaatctggaaagggttaatgtgtatcactggcagtgaatctcctgtggttgttgttctctctgaaagtatggaacctggttttgcaagggtgagttccttttacttgttaaaccatttgcttttttctaattaattgcacccaaaagattgaatcttattttgggggattcgagctaaagataatccaagcattgtaagcttggtttagtttttgatgaataatgaaagtttataattggtgtcttttgccacttcaaggattgggccttatgaaaacctgtatgcaagggggtaaaataagtttgatgattttgtagttcaacattctaactatctcaccgctatagttgcaatcttaagtgaagaagctaactattagactttaattaggactatgtaggttgaagcacctcattgtttcagtataactatctttgatgtttgtttcagtaggcagaaaatgatttctcatactttttggtttggtgtggtgaggaacatgacacattttaattcctatgcagggtgacattctatttttaagtatgagcaaagatcccattcgcgcaggagaaattgttgtctttaatatagatgtaagttgttgtttaagctattttatacactgacttgattcttgcactcatcacttcattctgaattgtttaaaatgttttattgaacttgacaactttcttttatctcaactctggaagctcatacttttcattctttaaggtgatctgttttctataattatttaccccttgaaaggtcagcttcctctgtgtacaatgaacctttcattatagagataggattgctctccatttagctataaaagtcagctttaataaatcataatgacttggatgtacttcattaagttaaaccaacaagatatttttgtgaagatgtttgagagatttgttaggggtcatttccatttaatctgcatcttgatttataatggcctatgtctgtttaatttgtatgtttgctaatatattattttcttcatgttttgtagggacgtcctattccaattgttcatcgagtaattaaggtaagaattctgagggtcttccgtcccagttttcgtttcagtccaattctttatgaatgatgtatccagtcctcaagtctgtaagcttcttctcaataatgtatagactctcttaacttaatgagtatgtgagctttttgtaaagtgtagaccaataaaatttgagcaataggagagttacggagttttatagacaccgttaaattgtttagtaggaaagcatacaattctaataatctatggttctaatatctacttagctttttacctatgcaattctgcacgcctcatcttcatctccatagcctgtatgtgataatttagtaatattgcattattctgccaagattggtatgaagtctactaaaatacaaaagatatctcaaaataggactcttgttaactatgcagtatttactgtttcaatgtatttttttcagtaaacatatcttccacctgccaaccatgttgttagccttaacaactaatcaaatgacttaattatcttctttggcaggttcatgaacgaacggacactggtgaagttaatgtccttacaaaaggtattgtctcttccatctctacctactcgtgtatcattgggggcatcttaattctggttagaataatgcattaaatgtaaaacaacaaatggtaaaatatatgtagttgttcaggatagcataaaacttacagctcataacaaggctgtggagttagatatttgaaatctctatattttttatttggtagatctttctgtgatcataaatttctcttgttttggaaattattcaacagtgacaattcaattttctttggtatcctcgtctcatgtgtggtaatttttccaggagacaataacttggtagatgacaggatgttgtatgcccggggtcagaaatggttgcaaaggcaccatatcatggggagagcagttgggtaagcccctaaatgtttggtgtaacattcttatcatctgatgtatagacgtagatatatacatttgtctgtgtgcaagatgcattattatattgatagatttttaataaaattaaagtttaatacatcatagaaaaaagacatcaaatcgtttatactaaccattaagtgatagatttaggtgctgaattccacatgtatacttttgaaggatcacaccatcaacagagaccttcattagatagtttattttataagagcattgtcattgagcaacagtggtgtctagtaccttatatcaaattatatgagattcgatatttaattgcattaatagcgatatgatagtgctaaaacttattgtgagttttaacttctcgtctcgatgcataacatcaattacaattggcaggtttttaccttatgttggctggatgacaataattatgacagaaaaacctatactcaaggtaagtttttaataaatctggcgacttattttttcattttttcacactcaattctcaatagtacttagttgaagctcgcaattgtcacttattttgttttattgtattgttgtcgttgttgcagtacataattatgggcgctcttggattgttggtcattacctcgaaggattaggaatacttcctcctttattggagtagttaaagaggctaccagataaatgttgtactagcttacaattttttatgaacttaagaaagaaaagaaatagaatttgggacttaaaattcttgtaacaaggaacttgccaaccgcaaggaatgtcaattaatatttaaatacatttacggaaattt

SEQ ID NO: 14357 - DNA, 4845 bp, Cannabis sativa
agagttttgagtatgggtgttctcatgctagagtttgagctatttttgtctcaagaggaatagtggagataatatggctttactggttcatttgtttctgcttatactgagtttttatatattgaataaaggctattgtattgttaggctggataaatatgaggtccaaactttttagtatatgttgaatagtgaatattttaattagctaacattatatctggattaattgttgtagtgtcataaatgacggaacattcatcaacaatgaattcaatgatgtatatttggtaacaacgctagatccaattcctcttgaggcattcactcttcaggtgaggaaggttttgcttaaaataaaataaattgctagtttcagaaattgagatatatttgttgtttttctatagtagtttactagtttggactttggtaatttaggaaaagacacttaaccaacctgaaaagctacatctatcaagcctactatactgctgtgtcatttggagtgttccacagggatttgcttttctagctcagctcaataccttttagcctcttccagaacacttctcttcacccttttctcgttattgtgtaatgaataaactacttttttttacttaaaaaaaaattacttctcttgcatttgctaccttatttttttcttcaaaaaaaataaaaataaataaacatatgagcaattttaatcatttgcttcttattggtattgttctactgatttgttaaggtgtgttacttttgaagctttgaaatatacaagagctcatatttttttttttctgtatataataatgacaggaatcagaagtctctgccgttaaatatatttcttacaaggagtataaaagcttacttgctaaagaagatccagcatatgtcccatatgatgtaaatggacagtacggtcaactttttgacataattgaacagaggtatgtcattgtaagaattggctggaatctgtcagaataattaactccgtagttttcattttattatgattcggtttctaaattgttttaggtgattcctacaacatagggtatgtttaggatggtatccttctctaatgtatataaatttatgatgtatctattattgcccatcttgaattatctttgtttttcttagtgtggttttgatttttcaaagaacccaagaagagtaattaattcatctattatttatatctcatgaatacagcggaaaatcgatcctataactaaccacacaaagatgcaaaaaaaaaaaaaaaagagagagagattatacatattctgtaacatgtgagatttttttaactgaacaaactcactcctaaactgcaattaccatcaaccgtgtatcttagtgttttcatttcctttcaagcatgaaaatgttctagaaactacttgataacaaaacaaattgtagctgcaatattctgtttgtcttcactttcttcaataaaacaatttcagtttctttgctgcaatagccaatagtttcttttatttgtttagttactactcacaaaaattttgtgtttattaggatattgatctacatctatatccacttttatgtttttagtaaaaatcccacctcgtagtattaggtcaaggttactggttacgggagaggttttggaccaaaaatatttagtcttgccacgtggttgtatagtggaaaaaaaattcccaataaaatcttctcattcatctgctttgctcatgtatgtggaacttctcactattgtttcaagtcaaatataaaatctcatctcatttaagtatgaccaattatgtattagtaaatatttttggtacagggatgtccctgtaatattgacatttattaggggatgccactatactactattccttttgatgttgtacaagagctatatgaacttgttgaaaagcaaaggaaaagaaaagaatgggttgtatagtatttatacattctactcatgttaatgttcttataaatttgttaaaggtacaaagagaacaatgtagcacgctctttaacactacaaaagcaactacgtcgatatgctcctgtttcccttgatccagaggttattttctttttggtgctgtacatctattacggtgttctattttttaatatccaattcctttagtgctttctatattttattttctgtctacaactataaaaaatacatagtgcaaacatattttatagaagaaagaggaatctaattaggtcgctttggagtttggatcattgttgttttggctgttggttggatgagttattatggtagagcctcaaacaaggctcttgaattctttgggatttataattaacttttcaatctcataaaattccatcagtttgtttttgaattcctactctgttattataacagtttcttcaagttaccccccttttaactttatcctttctcaccacaaagccctacattgaatggtagggtacataaggtatgggtaattatgtagtgaaaaacaatatttcgtcccatacaattgaatacaattccttaaaatgttcaaaaccctgggtgttaataaacttaaattaacttttcttttaaatctaggtgtttgcattgttattacctcaacatttgttatagtgcagttcttcaattaaaaaaacgatggattgttataatttcttttggcctattttccatttcattgttttaattcttattgcagtcaactgagaattagagatgattttctttgttcacttgatgcagttgacagggtttacagatgctgataaggaagctctaaatctgcttgttcaggctgcaacgatcatggatgaaatattttgcttgcaggttatttaacatacaaacatattgaaatataaatagttatacacacattacaatatcttctgcatatagtagaatagctgtaagatgtattctcttttatgacatgtctatgccataaagatgtgtaagtgttgtggtgatgtttatactgcctttttggccaatggttgtggtttttccttttggaatgaattcctaatgatgtacatttattgaatgcaaatatcttatgtcttagcaaaatggttatcattttttatttcatgttgaagaaaatttggaattttcattgtttatgctctgacatatattatttccacaaatagtgtgaatctgatttgatttgttttgttttgagcttgcataatttttcatttctgcatttcatttgattgtaaatggtttcctctatctaatatgctctatatttaataatcaggtttggtacagtaatcctgatttaagagattggttgaagaagcatgcagatgcatcccatatagacaagttaaaatgggcgtattatttaattaacaagagcccatggtaaatatttctcgacttactatgcttccaatacgtgttgtttatcccaaatccacatgcgtgcatgtatgtatgtgtgtctatgtgctttgtatcattcttcaatgcatgttgatggattcatagctctacatgtttgacatgagagatacaagaaactacttaacaatttttcaatttctgtcaggttcttctttccagagtttttctaattttaattatctttttctctaaaagataataatttacttattaagaaaatgaaatcgtactactagtagaagagaataacattctcaatgcagtttcctctattatgcaaccgaaggtttgctttttaaatacccgtaatgtcagtattttttttgtttttagatatccaataattttttgttgttgaacatatcttcatatatttatattattattttttccctttttagatgctaaatgttacatagttttctttaatggaagctttactagttatgttgatatgtagctacacaaatacgaagtttaaaattaagtcattttccatcaacaggtctagccttgatgagaacgaggcatttttgacaactgcggattctgctgtgaagttgattcctgaagccacaattgcagttactgggtggaagggtctcgaatataaagctgcatttcctgtgctgaagccacctggtgcaaatttctatcccccggatatggacaaaacggtacaactaagttgattctgtggcatctcatagagaatattgttttccttccatgactgatgaccaacatttttctcaacaggaatttgaattatggaagagcagtttaacagatgaacaaaaagaagatgcaacaggcttcttcaatgttgttaaaaggcgtagtgaattcgctctagatgcttctatttataatagaacagttgatgacacagagcatctactgcattctgctcatgatctatatactgttcctcatgatctatatactgttcccttcgctcaagagtacagttctttcctcagaaaggctgctgaattgttacataaagctggtgacttatcaagctcacctaggtatcttgtttgctgctctctgttactgatatcgtatttgatgaacacctctgtatttctcaaatttacaaaatcacttctacgtgcagtttgaagaggtttcttcatagcagagctgatgctttcctttcaaatgactactacgactcggatatagcctggatggagctggtcagtatttttatcatttatctaccaaagtaaattcaaagtaaaacattttgactaaattaatttcagcattctctttaaagatatctcgacccctgttatattcttttccactttggtaaatttttctgtttttgccatgtaagtatgcatgcacacacatgtgtgtatatatattcacatgcacatacatgtaa

SEQ ID NO: 14358 - DNA, 4770 bp, Cannabis sativa
taatatattgcataaagtatttatatttaggttgtaacaccatcatttacatgtattgattaaacataaaattaactctacaaaatagttaatattatttatttttcttgtcttaatcactttatattaaaataatttaattagaccatataataaattaaaaaatatataattatttcttgtattattttcaattaaattatatagtacctaacataaacttgtaaaactttaattatttctttgtatttttttttttataaatttgtaaaattttgttatcagaatattttactttttctatattttgttactttttttttatcatatttttaatatatatttttaattcaaaagtttaggcatttcctttcaaaataaaaaaaaaaaggttaggtatttatcataacttctatataatgtttatagtagtgtatatatataaaaaagtcaattagaccggaaagatggttcagaatcgccaaataagaaggaaacaattaatgataataataacgtaacaatgtatactaaagcaataatatgtattaggttccttagcaataacatataactgcataatgcatattactaaattattgagtaatgcagcatataaggcaaagaaccttttgagaacgtatataaaaagaaaaagaagagatactgcatataaaaatatcttgtttaattattaattaagaatcatcatttgagatatatatacatatgtttttttttttttttttttgatggaaagagtcatttgagattaaagcacaaaagaatcttttgccttttttaattagaaaaaaaaaaagaaaaaaagaaagagctcgtagtagcaagcttttaggtcctatatataggtgcattaaaatatgggataaagtaattcttgaatcattagccaattattcaacaacaaaaatccaataaaaatctaatgagagacagagtaacacaagtgggaaaagcactaggttaaaaaacatgaaatatagtcaaaattcattggcgttggactgtgcatgctttgttcttatcgtgaatattgtaaaaatcccacttgttaaactctctaccacaaatcatttagcttcatatacatttttcttccttatagattagtgatcaagttgaaaaaaatatcaattaactaaaaagttctaagtactatattactaatgtggcagcctcaaattaggtcttaattttgtacccgataatattgtatgatgccatccatatcaccgaaaaaataataggacagatcttgttgtagtatttcaataaatgataaccaccgaatccaacagaataataaatccacttgactatgaaaccgaaaacaccataattgaaagcttcggttcaatacacacaaacaaaaccacagatactgtaaatgtcatagtgacataaaattatagatggcatctttcagattttcagttcccacttttggattttggagtgaataatactgaaaaaattcaatgaataaattaaagactgtttaaaaatataatagtgtgtataccaagtaaagcttttaaactccaaccataccaggtcattacttgttcttggttccaaaatctttcttgttaagctatatatagctgatgtaatacttttcagttcgattaataatgaactgacaagctagcttaatatatatatataaagtagtaaaaggaccacaacctaacctcaacaacaacaacaaccttattactctctcttacgaccctgatcagttgaacctactaaaataattgagaataatataacgttaaaattaagtcataccaagtatatataataaattacaatatttatagtaaacacgacctaattgagtattacacatacataggattaataattatctaagtacatatatatagaaattagaaacgatctagctaagctagcagcagttagttgagatgactaatcattcattcataacatcatggaaataagtaaactattaatgctatatggcttgtttttattattacaaagagagagagagaaagagattcgatgaacacgaacgacaaagagagaggtgtcgtttgaaggggacagatgagaagggagggattttaatgtggatgatttctcaagttccaataacctctgaaatgctctgcaaagctggtctccattgccccccaccactaactccgtagtgcctcccaactgatcctctgccactactactactacccacaacgacgtcgtttcttcccatgcgatgaatctcaggttccgactaatacaaaagccaaaataaaaagaccaaaaacttaataaaaacactatggagattggaaaacatgcacgcacttgcgtggtgagacaatgactactcgtgtttataccaaactccttcgattaaagcaaaatttatacatacaacatactcttgttaaaaagacaaaaacaaaatctgcaaatttcaatattaccaactttttttttggttttaaactttgtcagtactacaatggctttttaatttttccttaggctttaattatttgagtcaacttttttacaaatgaaaaccggtgttttccgaaaaaagacatggcctcgagaatcgtggctccaacttcaaactaagttcagattattccatatacagaagacaaattgaaatgatagcagtatatattcagagattttctttatacaagaaagctacggattaaatgtttatttaagtaaaatattctatttaatttttctctttcgttaatttgtgacctatgttaagataaatgattaagaaaatggcaaaataccaagtcactatctgtgcgtgcaagaaaataacaatttaaaaggaaaagaaaaaagaacatatttgacaaagattttcataccgaaatgacgaatttgcccaacaaacaatacgagtacgtacttctaaaaacgaaaagttaaattgtaataattaattttaccttgagtgagttcgtgttgttcggaatcgggccagtacccgaatctctcttcctggtttccggcccaagcccaagcccaactcctcctctctccttcaacagctttcctagtttcacgctcttcttcgctgcaaactccttcaacacatctgttccaaaacaaaattaaataaataaaacaaagacaaaattctggaatatataataagttagcttagctcgaagtttcaattgataaaaaataaattaatcaccttcaaaactgattaaacgataaacctgaccgatcaacaaggtatcttcgggtcgaagaagcttgagctgcttcaatggcgaaccgttgtcagatttcaaggtcggtgaagtgaagacgagagccacgtaatgacctgggttggatgtcatgacttcttgagcactcaccgaccagtaaatccggtcgattttgttattcgccggatgatgaatcaccaccgtcgccgcctctgccgcttgacaatttcccatatcactacttaatcaatttacttccacgaaaaaatatatgtatatatataaggagacgaaattatgggagagttgaggagggacacgacgtcgttaatggtaatgggcttttaaaatttttttggggatgaatcccaatgtttgaagggtaattagggaataaggtcttcacgtcctcttcttcctcggcccattaaatgactacacttctctctctctctctctctgtatttctttctctcactttaattctcttacacgttcaccgacgcacggcaaagaaagaatccaaatatatataaaaataaatgaaaagcgaatatcgagattgatcagaagagaagagaaatcacagaatttaacaccaatgagaactgagaagtggtgaaatatatatatatatatagttagtgtgatgggatattggggaagcgtaattaggagtggagacgtgttaggtctgcaaagagagaaatcaaaccaggttagggtgatgagttgcttgcgttgctgtgcgtctatatggggagaaaatatggggacccacgtactggatctgaaatctgaatcaatgcaacactacgatactacttctactagtactactatgaatatcatggtgcttaaatttaaagcatttgaacccagctctctctctctcaaatctcttgttcaacttaatccaacgtggttgtaatttatatacctgctaataataaaaataattaatcgtacacttgtttcttttaataatatttaatagaaaaatgctaaaaagatggtaagatataatattactattagtgaatttaatattacttttttacttatttcattttaattaatattataaaaattattactaattactaataaaaatattttatcgtgataatattttttctacatgtagttctttgtagagtattggtattaagtactattggtgactacttttttaatatgttgtgttgcgattaattaacgatactttttaaaattagcatttctcttcatttaaatgatatttttaaatggatattttaataatattatttgttttgatttcgatgctgaggaggacacttttcgaacataggatgtgatggaaagacgggagattccacctacaggctgggcggtattgacctacttctttcccctcaaccttcaaaattgcttttttttttttcaatcaaaaaataatagtaataagagtaatactctgttttcgtagttaattgacaagtgttttacaaatataaatttatatatatat

SEQ ID NO: 14359 - DNA, 7430 bp, Cannabis sativa
ttttttttttaattttttatatttataattgttttttaaaattaatattacgtgagccactaaaaatttgttacgtgtacaagtgtctacacgtgggcagttaaaaatttgctatgtgtacaaaacaaaattgaaatttaagtagttttaccagaagaaaatcaattttttataattaaaggttaaaaaatttaaaatccaaataatttaacccccaatatccttatacaattactagagctagatcttgtaattgttagcctaaaatacttacacgaattcgtaattacataacgaagacgccgggtcgggtatttgaatatatgggaaggctgcaaataaaatccggttacccgaaaaagaaaaagagagagacaacaaaacccggtaacgaaagagggtccggccgttgagagtactgtatatgtaaactcggctcagttaaggcccctcatatcatcgaccatggcaaatgcagaagaagaagaagccaaactcgactgtttccgtcagtggttacaggtagtattttctttactttcgccttcttaacaagtgcattgttcactccttttgacgtacttgtacttgtctaaatgtaatgtttattcaggttaatggagttgaacttcgtggctgcaagatcaaggattgtgattccaacaaaggcttcggtattttcttggccaatgatgtttctgacggtgagcacaatttcttggtttgtgtttcaattagtgggtgtttgttgattttgctaaattctatatgtattcaccctataaatatatataattatatatattacttatatgtatagattatagctaatatgaattaaggaaatgccagaatttttcttttatattttgcattggatagtttcttttttccctgttctgtttagagtctcataattcactcttcactgataaaacattcaaaattgttatttgttaaaaacaaaacaggggttctgttagttgttcctctggctttagctattactcctatgagagtattgcaagatcctcttattggatcagaatgtagagagatgtttgcagaaggggaagtggatgataggttcttgatgattttgtttctaacagtagagcgcctacgtaaaaattcttcatggaaaccgtatgtttagcattaaatttgttaaatttctgtgacttatttactctagttggtcaaatttgatgttttagtgaaatatcaggtactttgatatgctaccaatcagttttggtaatccactttggtttagcgatgacgagatttctgagctgaaggggacaacattgtatcgagcaactgttttgcaggtatcagatccacaagttgatcatttcgtacttttcttcttttcgatgggcattcgaggaaattcactgagaaaatgattcttccagtcacagaaaatagtctagattgtgtttcacggatgcatgatgtacccaaatgtattaaactgttaatttcatgcattcagctcatctcatggtttgatgtctgtaatacataatagtgtctagaggcagcgtcatagaacctaaacattgatttgccaatggaagttgtatcgattctctttccgctcatttggcttttctatgtgttgaacattttaatgttttccagtgagtgtgtagtctgtcttcatttgcagtatgcatgacagaaaatatatttatcttacagagaaaaaatttgctgtctttgtatgaagacaaagtcaagagtttggtggagaaacttttgactcttgatggaggttcagacaggtgtgtagaagtagaaatttttttcttttaattcctcttccccttcccctatatatccgtttcatttcttccctctctttatgacatacgaaaatcatcatcgttaattagtttttgaaactcagtttttgtgtttgttattgtctgtattactgttaaggtgaattgtgggactcagctcatgaataaattgaagatcaaaaaattcattgtgaaaattataaaggattgctaaatacttacacataactttctgcttctttgcagagaggtctgctttgaagatttcctatggtaagtatcttattcttagtgtagttcacaataataattgattaacatgaagtcttgcttttgttatgcaattgtaatgtagggcaaactctgtattttgggcacggggtttgaacattcctcttccacgttcatatgtatttccacaaattcaaggaacaaaagatgatagctcttcaactgaaaaaagttctgagatttcccccaaaattttcagtggagagttggctaaaggagtggatgagaaaggtgaagtcatgtttatccctgcctatatttatgaaatgaatctttgggatttaattgttacaggttttctaatctggcttttcttgaattcaaaatgttgcttctcaatgcaggattgcaggctcatgggcttaacagtcaagtgaatgaagagacagccagttcaacacaaggggagactctctgggttgagggtcttgttcctggcattgacttttgcaaccatggtatctatttgtattctgtgaagtctattaagtcttatatgatccataattggttttacagttttactttttattccatagtaatgtgctgtttaaaatccattttgtataaaccttgtccttgatattgttgcaaaatcctagctgaatttgttgtatttcattcatcttgctgaagttcttgttgtgcagatttaaagccagcagcaacatgggaaattgatggaactggttcaataactggtgttcctttctccatgtatcttctttccggtatgtcatcttttcccacagataaatttttgtcagttgtcaacattatctagtatggtgcaattgaggttcaggagtattactatttaaataaatagtagctgtatgacttttcatgacaatcatttttaattctttttacctccatggggaagctggacaaagttctcttcagatcaacaaagaaattaccataagctatggaaacaaaggaaatgaggtactaactactagcaattgtcatctaggggaatgacattttgtaataccattaccattattaatctcttttatgactgtactctgcattatctaaattctctggtatcgcttgcttaagcttcctccagctataacataaatatgttctttataacagttgtcgcttttggtacaatccttagtaatgactttcctgcccttagggcaacattaaaaatgtactgatttcctccggtttgcccaagattatgttacaaaagcaatcccatggcatagttctaaataatattttgtagtaaaaacgattctatctgtttctggttgttactatcttttcttttcaagtcttttgttgtcaagtactgtatggttttgcaatgttatgacgcattgacatgtctagaattgtctatccagtgaatggttgtttttgtgcaggagctactctatttgtatgggttcattattgaaaataatccagatgactatctcatggtaatgccttgccaatatgtggactacaactacataatttggttacctggaaggaatcaaataataggaaaatagctaatgggatgattatatggtcaggttcactatcctgtagaagcaattcagggtgttcctttctctgattcgaaagcacagctccttgaagcacaggtttgcttgttgtctggtttctaaatttctgtttaatatttcacgttatctatgtagtaggaaaccataaatgcaatacatttttttatcatatgccctgtacatcctttctctctttccctttttcccttcaaaaaggaaagattatacaaagattaattgtttcacagaacgctgaaatgaggtgtcttctacccaaaagtttgctggatcatggatttttcccagaaggtgttcagaaaggagaagatgagaaatgcaaacgtgaccatgtttgcagctacagctggagtggacaacgcaagatgccatcatatctagacaatttgatattcccagataattttctgagtgtcttgaggactatagccatgcaagaagatgagctttataaagtttcaactatgctggaagaggtagtttttttcaagctacttctttgctttattgaagcacatagcaacatgttgtttcattttcactcttgctaattgtttgtgaaatagagcagctaatgatgtttctttttaagcaacttatttttggtttcatttcttgttttccctaagtcttgaaaatggttgaatgtttcatttttgcttaaagcttgttggaaccgaaggggagaggcaaccaactgatacagaagtccgagctgcagtgtgggaggcttgtggcgattctggagctttccaacttcttgttgatcttttgaatatgaggtaatcttcttgttcaattatgctgatacgagtagaactcatgtttttcaatcgccatgttgcttttccttgatctgtgtatgccaggatgactgaacttgaagaacattctggaacggaggactctgacacagatttactcaaaagggcagatctcactgaagctgcagattcgctgcttgtagtaaaggatgacaaatcagggtaccgtttcctccttctattgttattcctccttgaattggagtccttagactaatttgcattacatagcaaattgattcgcatagtatatattagtaccctaaatgtagatacggtagtagcaaagatacttacttggacacaattagaggatgagaaaataactttgagctgaaagaaatctgtattgaagatgagaattcggttcccaaagccttgtttggattctaatttacaaagaaagaaatttaaggaaaatattgagaaaactgttttcttaaattttcataactttttttttcgtaatatctttctcttttttataaaatattttcatggtttttctaaattttctaaattattttatatttagattattattatttattttctttagaagagaacaattggggggcctatgaagtattaatatgtttcttatatgaatactagttagtttgcaattggttgaagtaaaggaatacagtacactgctgtatggattttctatgattttcagccgaagatgccctttatttagtctaatttgtttattgtggatgcagtgaagaagatgataaatctacagaacgttacttggttagtagacacaagtggtcgtgtatagtatatcgacgaggccaaaagcaactcactcgtctttttttgagagaagccgagtatgccttgcgattagctcttagcgaaggcaactgaacttagcattttaaccttattacacattaaaaaaaaaactatagaggcaaattttcagtgccaattttgctggcaaattttcagtgccaattttgctctgattgcagcttttgttatttttcttaagacttagttcaatagcgtaatatttttcttaagctgagtcagttcaggcggtaccgagttcaaaattgagcgtacacacctgtacatctttaaacaataccattcaattttctggttgctaatttaaattagaaagagagaaccataatagatttatgattttcgtcccaaaagcagtgcctgtccctgacatatatgttaacacaacacaagagaaagcatatgtgtccgggaaggggcgttggaaaaatcggaatgtctgctactcttggtccagcaatgttgttcttgttttgagacttttttgggtgtaactatataggggttatgtttctgtgtccaggcctgctatgctcctcagtatccaccccaaagcataagcagcgccagcagcaatagcaccagtaaatagagtcgtgaaagcagataatgcatagttttggcctgcaatctttgccttggccactccaagaaatgccaaggcgagcgcagaaagtaaacaagcgccgagaaacttcaccgattcattgtctgtaattggaataagaatgataaaagagagcaaaggagcgctgccaaagatgataaaggcagcaaaggtgacaaggccattcttccatggcttgtctcctcctgcttgatctggtggtagctttcctttctgagccatcatcttctcatccaccaaaatgtccttgtacttagcaaatatgttcacaacctaccatttttgtataatcaaattacaaaaacaatcattgattcaaccaaaccaaagaaataatcttcaccaataagcttttctttctacatctttgatgaaacataacgtacaatcatgtgctataacatgacaaaagaaaatgtataattgatattttatttaccctattattataataataataataaatttaacataccgtggtggcatcatcaaggtccatcccaagtgcttgatattgatggagtaagtccattttctgaggaccactatgattagtaacatcccactcagtaacagccctttctattacagccgcatccttttctgtgctgcttgatacaaaatctccaaatcccattgatattccatccgccaccaaatttgcaaacccaagcaccaaaacatccactacaccaattaccacactcctcaacaagttaccaaaatacagtaaaacctctatttaagaatactctattcaagaataacctctaatttgttatagaaaaatcaagtcccaatttgggccagttataaataagaataatctctaattgtaattagttatacattttctaagtctcgtattaacaaagtataccctatttaagaataattacatctttataaaatatataaatatattttgtaaatttatttacaaaaaattaataattttattctaaattgtaatatatgtattaaaattatatttactttgaaataattctattataatatagtattaataattatttattgttattatatattttttagtattttaattttttttttttctagggtaagtctatttagtcataaactctcgaggttctactgtatatcttaaatattactagtactactgctaatatcacaatctaacacttaataaaaagcaaattaacataaaatcgcataaaccaaaaaaaaaaaaaaaaaaatcctttttaagcaaaaaacgtactgcatgtgtgactatacatacattcttgttcatcctctttttttctcctttagatatactatttcacttccccagcaccaccacgagggccataaatcagaccacccatgttctccgcgacttgtcgttttcgttatcatcgcaattacttttttgacccactaaagtaccattcgttgcttaatttatttgttaactgtatttggtaattggttccttttttttttcttcatttgtttg

SEQ ID NO: 14360 - DNA, 2480 bp, Cannabis sativa
ttctcattgtgttccaaaattattgaaactttgatgatgaaagaggagaaatttcactttcaaactctgtgtgtccttgcacataacaccaagaaggattccgaaggaaatgcatgtcccatttttaacggccttgtggttagcttctacttcctaaaatgttgttcaactttgttattatatgctatttttttgtaaaagttacggattagaccttttgttttgttaaataacaatttagtcctgtattttccacttaatttttcgtcaaagtaaaacttgataatcgcataatttggaggtattatgaacagactggttacaatttttgcatactttaggttggttataagtcagggtattattttgtaccattttagaaagtacaggacccgatttttcatttaacaaaacagagtgtccactcaataacttttgtaaaatacagagtctaaaatcgtatttattttaagtgaagttactttcaacaatgaatgaatgatgatgaaatttctttgtctataacatttttattttaatttgatcagatagaaatgtcaactggatctgtcatcccggctagtttcgatacaacctcaagatgtcctgatgaaattgtcaggagaatccgtgttacttcatcttatgaagatcacaaatgggatgggaagttgttggaaacatataatactctaaccgatagattcgaaatcgccccatgtcgctggtagaagttcaacttcctgtaccttaaaaaaaataaaaatggcagctttgttttacttctgaaattacatattgtacagtttatgtgttaagttaatgtgtctattgttacatacactcatgaatcatttgctcatttttgactaatataggacttggcgtcaagaaagaattgctaggagattgagagacctgtctgattctgaggtcctccatttgtgttctacttcaccttctgctgaggctccagattttgttgcaaacgaaagaaggtaggtaaaaaacttacattagatttagcttggtttgaagtttgaacatacatgaacatgttagttattaatctcaatgtgtagtgtagtgtccaaacataatatcgtattaaataatactaatacaatacaatacaatatagcgtatcaattgagtctaaaaatgaaacttgtctgtaggtgtaggccaaataaaatcagaaattgtctgtttcagctctttggtgtaagaagaaatgatagttatgtcttgggctgttattgtggtctgtttaagaaagtgttagtacttatattcatggagttctcagtttggatagtggaataggctggttgcgactgttatcagtttaaatatgttatgcaataagtggaggaattttttttatattcattatctattctaaaaccatgcaatagtactctaaaaaaactagataataatctaataagtcttaagataaataataaaagggtaattgggtaatttaggtctcgtctctctcgaatacccagtaaacttgttctcatatcactccaatgtttgaaaatatcataaatactttaatattagaaaaagaaaatctctaacttgtaattttctgtcccaccaatctacatagtaaacttttattatctatgtaatccttgttgtgttcaaacatgaatagttggaaagtagtgcataatatacttgtgatctcatttcaggaagtgggagtacttgattcaacacccgaattggaatgaaacatttcctatggaacagcctcgagtatttaagaggactgctgatggagattggagaaggtgctaataataatcaccatttttctctctattttctactctcatattcactttttatatatttgtattgtttggttgtttgactcagttgaacatgtaatttttgttgagaataagaagaatgttacccaaacaatcatgttcacaatccgaggtttgagtcttcttgggtaccaacataacaatctctatacttacttgcttgttaaacaaaaaaggccaggtgcccaataatttaaagaagatgataagttatggtatttgattacgaaaatgatcttaaattacaacaaaggtttctaatcatttgtttaaggtagcaaaagatttaacttttcctacaagtcatcaccctaaaaatttgattgttctttcttttagcttcctttcattagtttacttttcgtcatgctgacatgataatgagacaacacccacaatgctcataccaagtagaagggttggtggtctttgcaatctttgttatgtttatagagaatgtaccaatatcagtaaatgggcaagagttttcatgaaaagaatgataggaaccaaaccatgatgagatcaatcagtctctaagacatgatatttttctctttttctctttatctactttctctcgagctagtacatatacacatatgaataagaaagtgccacaaaattaga

SEQ ID NO: 14361 - DNA, 12564 bp, Cannabis sativa
tttttttttttgagagaaaaaaaaattatttaagtttatgagatgtacttatagtgcaaatagaacaagaaagaaaagaggcaattacattatttaggaataatttctctttttttttttttgaattttgaattatttgtcatcattaatgatattaagaaattaatttttttcttttcaaaaaaataaaattattttttttaaaaaaaaagacattaagaaattaattgtttttgaaaaaataatattaagaaattttatttaaattgcaaacgcgtacataaatttctctttacttttctttcttagctttttttcgagaccaaaacaacactctaaaattttccctagaaaattctttattttctcgggaaaatccaaaattcaaccacaaacaaattcgatttcaagctcaatttccaggctttccaataaaccaagctccgatctcatcactttctaattccatctgccaagctaacatctcagaaatgagttcgttcaaatcctagggtttggttcatcttttggattcttcatattaggtatttggatttagcgatttttttgattctgtttctgatttctcgagtacacgaacatgtatagcaattttaaggaacaagcgattgagtacgtgaaacaagccgtacaggaagacaatgctgggaattacgcgaaggcttttcctttgtatatgaatgcgttagagtacttcagaacgcatttgaagtacgagaagaatcctaagattaaggaagcgattacgcagaagtttacggagtatttgcggcgtgctgaggagatccgagcggttttggacgatggtggtcctggtccggcttcgaacggagatgctgctgtggcgacgaggccgaagactaagcctaaagatggtagtggggaaggtggtgatggtgaggatccagagcaggctaagcttagggctggacttaattcggcgatcataagggagaaacctaatgtgaagtggaacgatgtggcgggtttggagagtgctaagcaagcattgcaggaggctgttatattgcctgtcaagtttcctcagttctttactggtttgtgcttcttttcttttatttggtctaaattcttatgatttgattctttgggtaattcgtattgtttagtatttatgtcaaatttgattaaaaaaagcttagatgtttagcgtcattccaattagactgggatatagttgtgtatatgtgtctatatatagagagactgggataaagttgtgtgtatatatatatgggtaaatagtgtcataagtaagtttatctaatttttgtaaaactataatttttctccagtttcgtcatgatatactttaatattgttgaacctagattgtatattatagggtctggacagaaacatataatgtcagttacttccaaattttttttaaataaattcaaaacagagtattgacgaaattggagaaaaattatagttttacaaattttaggtacttatgtcgcgcggcgccactaaaaaaaattattgggcttatgccactttatgctgcaatttactctataaatatatataggatttaggctttactggtttgtgcttttttctccttatttttcttggtctaaatcattatgctttgattatttgagtatagtatagtttagggtgtgtttgggagtgacttaattacttagtagtgtaattatattacactctatattaagatagagggtgtgtttagatatgagggggtagttatatatgaattgttgatatttttttttgtcaaaatagttaggaaaataatattttttagtagtgaatgtttaaagtggaaattttatagtaattatacttatgattctcattagggccatgataattggagaatgtccaatgtaccaaattgtgtaattatcttcaatccaaattgttatgctttgattcttttgagtataatattgtttagtgttgtgttcggaagtcactttgtaattctaagttgtgtactgatgaaaataatattttttagtagttgctatttaaattggaaaatggaaagtttatagcagttacacaaagaaattatactcattctcatggggttcatgagaattgggatctctcaattattttcaattatagtaattacattgttagagaaatgtatattaccttcaattacacttaaatccaaattccaccatggctttccaaacatacccttagtacattttgtcaaatttgacaaaaagcttaaatttttagcattttagactgggatatagttgtgtgtgtttatactatatatatagtcacataccactataaatgtgccttgtgacgagtcttgacttgctggaaaagcatttgttttggtcaatgggtagatgaagtgattttagcaacatggtatctaaaagattgaaagttcaccattgctaatggtttattcatttctaaatcttaaccattatcctttctgaacttgtattaccctaccatgcattggcgattttatttttgcttttacttagtgccttacaccttctaattgtaaattagtcttatagtttgcagaatgattcatagtaatcttctttgcaaatgataattatgtataataatttattatggagttctagttataacataacctgttgaacacaccgcatgaatgcacattgtttgaatatgaacatcagttgttagattgtttaaaaaaggttacttgttgtacattatatcaaatgctaggtttgtaatttgttaccctttgcttctagggtcacaactcatagtttaatctggtattataactgtttagggaagagacgcccatggagggcttttctattgtatgggccacctggaactggtaagtcttacttggccaaggccgttgcaactgaagctgattctacattttacaggtaatacattttgttaccttttttatatcttgacattttaaaatttttattgaacatagccgtttacaaaatgtccataagctgcttgatgagaaagcaaccccctgtgattttggtactatattgaacatgttttcttgttatgacttgtgtggacctgtgtaaagaaatttacatgtcagtctcagttcgagctgctttttgttccatagctttctaactcattgcatagtagatagaacccatagtgaattgaactattgtacttgcatctttgtcttatgacttttgtaagttttgatgagagcatattacattttagtgtagtaactcttcggaaggtgtaatcttgtcattggtgcataaagtatactactctataagtactttcatccggtttctgtggtgcatagcttgttcctacataaacttgtgtaaatgaatctcatgtttatatattagctaggttttgcataagggtgtgactaatggcaaccctttgcatatttaatttaacttactttctgctggggcctaattttcaattattttgattacatatggcagcgtttcatcatcagaccttgtttcaaagtggatgggtgaaagtgaaaagttagtttctaatctctttcaaatggcacgagacagtgctccatctatcatcttcgttgatgaaatagattccttgtgtggtcagcgtggagaaggcaatgagagtgaagcttcgaggcgtattaagaccgagcttctagtacagatgcaggtaaatgcagcgggaagttgtgaatgtggattattgagttgcttggtcaatttttatttcatttggctcactcacatgctctatattatgcatcctattctcgcagtgacttattttaactatatatatgatcatcaaattatttcgggctattagttttacacagagaccgatgaagtaggttgatgtgaaccaaccccctagcagtagtattagcaatagccaagcaaaacagtaggaaattaggctatggcaataaaagagaaaatacaatgcctaggcatttcgagaggcctaggataggatgtctccatgatgcaaatagagaaaatactcaattctttgcatacccactctaatcccttactcacctctatatatactattaaaatctcactggagactactctccatacatcgagtcatacccctttatttcctatactccagcacaccctattaatatggggtctaacataggttgtgtgtatttggtttctttttctgattgtgttcgggcttagtccttctctggaaggttgctttattttcatctacttacctatttttcttcctcgacttttaatgaatgtttattccttctgtgagaaaattaatatgataagtgtaataaaaattgtctttttaagtttgttcttcatcaatagatcctcgatattacttgtttgttgagatgtatcataagattttgttctttttccgtataattatgctcctaatgtatcaaataatagtatatttaagagaaaatgggtgtatcctaatttccatggttatcgttagctattcggtttattttaaaaattgtattgcctgttattgtggggactttatttgtttatttctcttatggaagagttgatgaactcatttgcagcttgttgcttaacttgaattatctttcaaatgtttagggcgtaggaactactgatcagaaagtacttgtacttgcggcgacaaatactccctatgctctagaccaggtaaaagaaaaaaacatgaagcttttagtgtcttcatttgaaccacttgcgatcggttttgtagctatggctaatcagtagaaatgcaggctattcggcgacgttttgacaagagaatttatattcccctacccgatgcaaaggctcgacaacatatgttcaaggtaatataaaatgattacacgcaatcttttataatctaatctaaacaacggcttaaagtttgatgttttggattttggtaactattgctaggtgcatctgggagatactcctcacaacttgacagaaagtgattttgaaagtttaggtcgtaaaacagaaggtttttcgggatcagatgttgctgtttgtgtaagcaccaacaagcctcatgatatgctattagtttcgttctttttagaagaagtgtttaactgactacttgaactgtttcccacaggttaaagatgttcttttcgaacctgttcgtaaaacacaagatgcaatgttctttgttaagaattctgatggtatgtgggtaccatgtggaccgaagcaaccgggtgcgatccaagtatctatgcaggatctggcagcacgaggcgaagcttcaaaggtaaagaaaatcccggccctcattccaaattcagttttttttcttgttgtatcttacattctgatttcggttgttgtgcagatccttccacctcccatttcgagaacagatttcgataaggtgcttgctagacagagacctaccgtgagcaaatctgacctcgaggtacacgagagattcacaaaggagttcggggaagaagggtgatcaaatttttctgtaattatgataaaaaaaaaaaaatcaatccacgctaatcgttgtcgtcgtcgtcatcattggtggtggatctgatgtattattgtttttcacttattagtttctttgaatctggaaaaaggaaggcaaatataatataaccttttcttcaattctgtattgagaccaaaaacatcatactttgtttgatttgccttgatttaaaaatttctgtaaattacagttgaagaaaaatatgcttccagattacttttttttaaccattgaaaggtattatgaacatggttgaatttgtgtatatcatttgctttgatgatcatttcaatttggtttgtttttagtgtgaatatatttattattgtgtaaagttataatatatttttaatacactcgatcccaacaccaactataggtctcgggtatcgggtctgggttggagattggtgctgattttaaatccttggtaaatattataatataagttaatacgaactatttattatgtattaaatgatacaacatacattttattaaaaaatttagttgtaataattaatacaatatactgcttaattcaaacatagtgatatttattattttatacaatacaacccttttactcgaaattggaatataaactttcatattatgcactgatgatggatttgtattttttgtttaaactaaatataataattaattggctcaaaaaaaaaaatataataattaatttgttttaagtgaaatatttgttattataaattaaaacgacaagtcatttacaataatagtgtagataagcggagggatattctccaactagaaatgaacctcatcttcccctaacgcaagcttagtcaatccttggacaattatatttgttgtacgtttaacatgagtagcagttcattagagaaaaatgatataagactaaagatatttacaatcaaatcattaaaagaaaagattgaattgaagggaactcgcaaagtagaagaaaccataagtgcatctgtctccataagtctgtctccatttgtgcataagtgcatctgaaattgccaatccgaagcttagatagggctgcgacaacctggccattagagtcccgaataacaacaccaacaccaacaccaattacattttgcggaacgtccatagcagtgtctacattcatctttaaatcacccatttcaggaggtttccatggggtaggggcagcagcaggaggtggctgtagtggcaggtgttgttgtatggtatttgtccctagctgatctggaattgcctaaataggttgtggcaaaagaggcaaggtcttttgttgattttgctttttgactctgtacaacttgattccgtttagtccagattgactagattgtgcaaaaagtttgttccatttaaaacttggagtacattgaagataaatgaaacaaatagtcacatttacacatcgaggaagataaatgctaatcaaagatcatactcgagttacgccatactgctcgggcatatttacaactaaaaagtgcctgtccaacatattcccatacttgattacaaacagagcaagttgagtttgtgattacctttcttcaaactaaagaggtcgcaatcagaagagcattgtggatagccctccatgcaaaatttttaactttcgggggaaaatgcaaagactaaaagaactttcaacaagatgaagctaagtgtgaactttaactttgatcaatttcatcatgaactgatgttaagtgatagtcagtttaaactgtgtagaaaccagagttttgatgatgccaaattagggagtctatgctgttcaaaaaacatagcgaaatggttaaaattctgttcacaaccaagggagaaaaagttgttgtggtatgggaacattccattgtctttcatctgttatcaaattggcaacaacccaatcaatcggtccagtgtaatgaagacaaatgaaagtgatgtgtctcgagatccaagggtcaatgtcagacctaatctttctcccttcaccaattttccaacgcaagcctattgatagaagatccctatcccaatgaataccctgccaagttaaagagggggaacaacccaaagatgcttcaagaaaagagctatttggaaaatattgacactttagtacacgactgagaagagagtcaagtttctcaaggattcaccaagcttgttttgctaacaacgcttgattaaagtggacaaaagaacaaaaatccgtgcctccatctgctttagttttacaaagaagattccaagaatgctaatagattttcaaaccgttttcagtcataccccactaaaagttagtcatcattgacttaagttgtttacaaaaataatctagtagacgaaaataactcatggcatatgtaggaattgattggaccactgccttaagaaggacttcacgaccccctgttgaaaaaaatttctcattccaagtgtgcataagtgtaagggtaaaatttataattagatcttggctcaattgaataagcccatagctaatgaccactaggttgtttgtacaagtcactcccttcatgggctgcacaagaaaacccaagggcccaaattatagagtaggccttagttaaattgcaatgtatatggtatgtacaaccaaccatataagcccacttgattatgggttgcacaacacataacaattctttagacgtactgagaaaggagtggtaagtccaaatacatgagggcttatttaaattacgtggtcagtccacgaaagtaggctacacaacccattaaaagcaagtctagcctcataacggttatgcccacgattcatggactacactactctcaggcggttacaactgtttccactatcctaggtcatagatcggtatccacgggaaagtgagtgtacaacccataacgataggtgaatacatttgaataatggaatggaatgactattctaccctcctactgaactacgatggcatttgatcccttatataagggtacgtaggcaacttgagaggggatcatgaactctctacagagaatacaccctaaactcaagctcaatcccaaaatcctcactcactcaccacccaaaccaccgtctattgtctccacagccgaagggaaaaggttactcacggctgttggcggtctcgtcacatttttaccctcaacaactaaattttctctttaatgttgctaaacaattcctttttatctcttctagaataagattgcgacctaaaatatttttgatggcattcacaaataggcatgaagagatgccgatgaaagaaaatttgagcgactcaaattgtgtttggtgagaaagataacactgatttgtccaaatttagcacttggccagaagcacgatgataagtatctaggtccctcttgatggcaaggcaagagaatcaaacaacgtacaataatcatcattgttctagacaactaggcacgtctcaggccatttgggggctgactaaaaaaattaattgagttttttgatataattttttttagggataattttaaaaaaacaaaaaaataacaaaaaaaaaaattataaaaatatggttgtacataattttaaatatgaaaaatctcactaagcacaattctatatttttaaaaaaacattttgctttctccgaatactttggattaagttacaaaatacattaaatttagtttgcacttgaatttttattttgagtaatttgtggcgtaaatatataagtttaactctcgattgcagataaatcctttaattttttacggtaataatacataagttatattttggaacttccgtaagtacctgaccgttaagtatcaagtcattagccacatgccattttcttattggtatatttaaattaaattttaaataaaaataaaaatttaattacttggaccaaacaaagattgtcacgtggtaatttatttgacacttaacgatcaagtacttgcagaagcttcagaattataacttaagtattattattcttaaaaattaaacgtaaatatttatttacaattgcgaattaaatttaaatatttatgtcacaaattattttttaatttttaattaagtttattaattgtcattgaatgtcttaatgagaaaagttgacaaaatcaagtgaatggttacgattgattagagttccaaatcaatttttttcactcaaacttaacatccaacatctttcaaataggaaaatgtcaaatacaaattttcatgcccataaataaataatatatatttgtatatacatattacaaagggagtctcccacatagatattttctcacctattactattctctcttgatataaaaatattgaaaatactataagatatctagcaaattattcattacttagtggtggaagaattaatattttagaaaaaataattatgtataataatatattttttctaaaatctgtttgagcccatcacaattccatatttacaaattttcaaattaattttcgattttttttaagttatgtaaaaattttacaaagtgtatctataactaaaaatgccaaaaaatcgactattttgaattcttgaaagtcaaaaccaccaccactaacaccgtgggtctttgtacgcttgtcgctcttcttctggtagctcaacttatgtgcatggtagaaagagaaagagtaagatttgaggctcaagattcaaattagatttagtgttcttatttacatgtgaatgtgttggtttttctttggttgggtttataaagtttaagtttggttgttcaaaaaaaaaaaaaatattaaaggccttcttcaaaaaaattcctctagttgtggttgacatttaatttgaatagtgactattttgattaatatgtaataaatttaatttatttgaggatttcattttgttacaatgaaattggtttggtatagatttttaaatgatagtaatatacactttaacattaaattcaaaatttataaaccaaaatgttattttaacacttctattaactattttcttcaaacatgcataacttaatgataatacaccaatcttcacaaaataaaattatcaagttcgaattttccctactcactctacaaaaaatagttttttttttaaacatttttaacaaaaaatataaataaaagagtaatttacagcataaatatttaaatttaactcctgattgctgataaatacttaaatttaatttttgacaataataatacctagattatatttctgaaatttttgtaagtacctgatcgttaagtgtcgagtcgatgaccacatgacggttcctgattggtccagatcattcaatttttattttttatttatttaaatatactaattaaaaaataacacggataataacttgaaacttaacagtcaagtaactacagaaattctagaaatataacttaaatattattactgtaaaaaattaaatgtagatatttatctgcaaacttaattttagaccgtaaattactcttatgaaaataagtattaatatgcgattcgagatgctttgagtgttaataatccattaataaggagtggataagaaaaacaaaaatcatgctaaagaaaattataactaataataattatcattttttttatcaaaggcaagagtgagacaagaactacaacataacaattcaaatcatattattatgaaatgccattattatatcctattatttttaagtaagtatctctaaataaacacacacatatatacatatatgtatatatataaatatatttaatacattaataaatgccttattccaaatggcttaactaaactagaaaattgtccacctcattaccatgtttgaacttttcacaacataaaaacaacaacaaaagccggctatatatgaatatgtaaacacttttcatctcatgaatataatgccggctatgaatttttttatgttataataactcatttaacttaattacatacaaatgttatgtactatataaagataataatgcatcaatcataacacattcatatcaaatcatattatatcaaacatgatggagtttcacaaaacaattcttacccttgttctgtttttcataagattttcattgttgattggagctacttcaaacactaaggtaataaaaactcgagcttttatttgttttttctttttcggttgggttgcgccaggccaatgcaatagtgcaatgcataggcaacactcgaaattcctaatagcaagctacatacatgtcagatattgaactgataagaacagatactacacttggtcttagctaaaagaccgagaaatgtataatttgagcttttatttaagtctttaaccgatcataaagttgttgaatattttgttgtttcatttgcagcattacattgtttatgtgggtcatcattcccatcccaactcagaagctgtcattagagcaaaccatgagattcttgcttcagttgttggaaggcaaataaaccctttactatcatataaatatatttatacatatatatgtatagatacaaactcaaatgcatactaaaacttgcctttttgaatcatttttttcagtgttgagaaagcacaagctttatcacttcaccattacagtaagagtttccaaggtttctcggccaagcttacacccgagcaggctcaactacttgcaggtataatatacataatcgaaactgcaattaagagaagaaaacagaaatgaaaaattcagcaatagcatggcaggaaaatgcattgatattaagaatgtagttgttcatttggtatggttttcggttttgattttgtgtatgttgctgcagagaatgaggctgtggtttcagtttttgtgagcaagatgaagaagttggatacaacacattcatgggattttcttgctatagattctgtaaaccaatataaccacctatcaatggactcgaaatcaaacatcatcgttggtgttattgatggcggtatgt

SEQ ID NO: 14362 - DNA, 2182 bp, Cannabis sativa
  modified_base (2103)..(2107): a, c, t, g, unknown or other
attattattattacgagtaggccgaagtcgaatccgacgatgacattattagcgattgagatagcggcgagttctagatcgccgaggtggcctgcgaaggcttgggtgatgacgagcatagagtaagaggcgattcggctgaagattgcggggccaactatgtgccatagcttctttgattcaatcttaactctacaaggcagtgatagttcctcataatcatcattgttgttattatcttgagtttttaggtcttccaatagtggaaccttattactcgacatttgtttttttgttttaaccaaacgcctttcaataatactcaacactcggtactttttgtaaggactaaggagtgttagaagagagaaatgaaatagctattacttgatatagcagatgagatatgtatgtagggagaaatatgaatatgataatgagatatatggcttctaatttataggatttttatatctgaattgtgtgacgccacctatctaggagccactaggccactagtaacagtacaatttgtttattatttatgatttgaagaataaaagtcaggtttgtgttccttcttgatggaaaaaacaaactagtttttcttctccatcaagcaaaacttactctttttgtttggaactcagatttaaggtaaggaaaaagataaatatcaaagaatttcaattttattatctttggtttggaatataagaaaaaacaagaaagagtatatggtataatattatcagctttaagctaagtcctcacaaaattattttaagtcttattctcaaaatgtctcctactaaaaaaaatattgtccataccataatctttcttatttttaaccaatgtaggactttagttacacaccccaacatttacaaaaaagaaaaaagtgtcaaagccccaaacctacagaatcgttttggtcttcactactccattagtttttcaaaacgttatccagaagtgtacaagtagtaaattttattggtcaacatgatattaataatttgaatattaaaaaaataatttttttttaaaaagaaagaaaaataattaaaaataattatttttttcctatttttttcttttcctttgttcttattttttttcctttttcttcttctcttcttccttctaaaggctgagggtctctttttgcaaaaccctataccaaccggcaaccccatcctccttccacgttgcagagcctctccggtcaactgccaccatctatccttcatagccataatcgatggccatcaaaaccatataacactacactcgatgccattaaagctcctcctccgttttcgccattaaagatcaaatgatcatttcgacagactcgtggtgtttcaagacatgataagagatgaggtatttggagtttcaggagtctctaaatcttgtggtgagtgcaacaaggttttttgaggggatatgatcatgcttgaacaaggaagaagaagaagaagaagataggttagggttttttgggttggggtttcagaagaaaaaggggttcggcatgatgaggggatttcatgtgcctagacaatattattgtcttgaatatatgtgtgtttattatcttgaaaatatctagtccgacaagacaaatgcttctaactaacattctttaattgaacaaggacatatttttttttctctcctgtgaagttttgaatatcaagaaataagcttttgatactgagaattagtatggaaggattacagatttgagcttttgcttctatgatatgtattgtagttctcatgtatgttgatgtaaggtagctttgttcaacattattacaaaaaatcaatgcaaatgatttagttcatgtattgaatatatatattttttgaatttagatttgtttgaatttgatttgatttttgtttattattattaaatctcttttttgttatttgggtttaaaactaagctgttgcgggggtgttggtcggcagtggtggcttcggtgggtggtggtggcaatagtggtggttgtgttgtgatgttggtggtcgtgataatggtggttagaagaagaagaagaagaagcactacaaaaaatcttactnnnnntcacaacaaaacttgtgactaagagtaaaaaagttgtgactaattataaattatcattcctatgttgtgactaaa

SEQ ID NO: 14363 - DNA, 3753 bp, Cannabis sativa
  modified_base (3706)..(3710): a, c, t, g, unknown or other
gagtatcaagttgttcaagcaaatggaagctgatgagaaggctaagtgagctgtgaagtttattgaagaagtggaggtcaaagaaggcaaggtggctaaagaggaggacgaacccgaagttgtggaatctaaatctcctgaaaaggaggtttagttttatttattttacctatttttaatttactagccctagagatgagacagtttacttggaaatttcagccaaattttattttgtaatgacttttattcaactggtttatttttgtttgtaatttttttaacttatttatatatttccttcttatatatgcttgtaaaaaatgtgtttcttaccttgttggtaaaagaaacttggtaagtatgtcttatgaaaagagaatttctgaatcatttttctaagtatagacttagttgacttcaaatgattttgatatgcgaactgttatttttctcagatggcattagttttgtgttgttttcaaaattttgtttttaatctcatttcacaacatcttccatttctattcttgctttaaataagactttaaataagacaatgtattgcccttgcataatgcgcttcatattcgaccttattatttgaagctgggaattgaataatacatgatgaatcctaaaattttcaagcggtaccagaattacacttgcccccgtgccattgttatttgacgagtcgtcaacaaataatttccagacattttgatttgggatttcttctctattttctttgaaatttatccattcgatcaagtaagctgacaaggtctgtcctttgatggctacttgtgggtgatcggttatgtcaaattgtcccaattcagttgaccattttatcaattgtcctgacgtttcgagttttgataagacttgccttaatggttgattagtcaaaatatgaattaggtgtgcttgaaaataagattttagctttctcgagatatgaaatagacttagtgagagttttttgagaggcgggtatttggattatgtccccagtaaacgcttatttatgtaatatactgacaattagacttttttcctcttctcgctctaatactacgcttattgaattttctaaaactgacaagtacaaaaataggatctcaccagtcactggttttgaaagtaccagtggagttgatgttctttgatttcttgaaatgtcttcttgcattcttctgtctattcaaatattttattgcctcacaatacgttaaaaaatggtaggaacttatctgtaaattttgaaatgaatctatttagtgctgctatttttccggtcaatgattagacttcttttgattttctttggtaaaggcacgttgagtaaagctttttatcttttttggatttgcttcaaatcatcttacatttattatgaagtcaagaaattttctaaaaagagactccaaataaatatttttttggatattcaacttcgtcattttgtatttttttttttaaaactgaaaaacattttgtgagattgagtacatggttttgctgtttttttttttttcactaacatattgtccacagaaacttaccaatttggtgtaacaatatgtaatatataatcaattcattttccaacatatcaagcaacaaaatataatatagtaacctattaaacattataactattataatgtaactacacacatagctttatatagaggctggatattgtagattatgatgatcctagattgaaagtacacatatcataaatgatactatatataatatacttataatatatattgcactctactagggcatgcagtatatatagtacaaagtagttttctgattttattatgatgtatataatgtacagagagatatagcatttgtgttagatattgtgtcagaaaatgaatcttcatggaaccgaagaaagaccaatgtagtaaaagattggttgagtaaaaagtgaaacaacaattaaacctgcactgcatgctctttttgttatatttatataaatatcgtatctgaaaaagatcagattgttctgcaaattaattaattgatccaagcattcataataatccaccttatcaatattattatgagtacgtacttacgtacggtatataacattagctataactagctagtagctagttttgatttttgttattattcgtattaatatttatttgcagttcacactatatgcttgtggaagaagcaatgccctacattaatattattggtccaatataatttttgtgagtttattatattaatcataataattacaattaattaaatagtatatatatatatatattaattgtaccatatattatattactcttgttgttgagtgtctctctcacatcatgagctaaaataactcaacattttatacaattatataaaacgttttgaaagaattaaatcatttattaagatttatttatcgatgaaataccacacaaatagatgcacttcaaaaaaaaaaaaattaaaaatacaacttatatggatttttttttttttttaacaggaacaataaaatcaaaacagctaattctataataaccattggaggcacccttccatcttgaaaatcagaaattttacaactcaaaatattgttggctatacaatgagtcagttcattagtagaacgtgggtgaaaaaagagacccacaatatcaaactgtgacatatatagatcaaaagacaaatatcagcaatcaataaattaatcccattcaccataaatctcaggcggtctcccaattatatacgtactttaatctgaagcaatgatcatatacactgctccaacgataatagatcaaccaattcaatttcatgcatgtttaatagccaacaactcagcagcaacataagataaatgtgttaagaacatttatagccctaattaattcatgaaaatcaaacgatagaatatagattaaagagtattcaatggtttgatctttaattagtatgatcttcaaatttacattaaaaatctttctctgaaacttattctcttggtgatattacctcttatattaccaacagataaaactgttgctaataattattgactatttctatttggcccctcatcaaaatagaaattgtccttatggtatccacataattaaaatcatgacaagcatgctcttaagtcataaactttattttaaaatagatcatataaatttgacttatttatttgatgactcaacacattttatacatataattgtgagtatgattccaataaatttctaatattaaaaaaaatttaatagaaaatatccttaagaaaactctacccatgcatattaatattttgagtacgaaggtttccaccataatgctcatacgattaatttaatcctcatcaacgacaacgactatccttgaatattattaattgttgaatatatgttacaattaatgctaattaattaattacttcccatggtctaatcctcgaccaatatgataatatcaaccatgtttaattcctcaaataaatatcatatataattatatttcacatattttgtggtagttttggtgaatatattttatgagaatgtcacgtgtggatgatgtaaaagagatgaataataaaagaagggaatcaaaattttttttccctaaaccaaaaatttaaaacctaaaaaaactattcctttttttnnnnnaccccaaaaataccccctcacaatattctctctctctgcatca

SEQ ID NO: 14364 - DNA, 13285 bp, Cannabis sativa
attaattatttttttctttaatcggtttttatatatatgttaaaatatggatctatatatatatatatttatgagaaattcatgcactctaataatagatgtatcgatacatttattttgtattttccaatgtacaatataattattttagatattttgtaaattttaaaaaattcaaaaaaggtataacatattgaaaataagattaaaataggaatgttacaaacaaaaataaatatttttatatttttaaattattgaatttaataacgcgcaaaaaaatgagattcaaatagcttattaaaaaataaataattagcaaattaatgaagctaataatgacagcgatgaaagcgagaacattgtagagcgtgacttaaaatttgaatatttattagtaaatatttaaattttaatatttttttatataattatctataaaatattgttaaaacattatataaaacttttagaattataaaaacaatacatatagtttagcaattatctatcttttttagaattaattatagaattttattaatgacaatcaacaaaaataatagcctacaatccaatatcttctctgttagagacatgatcagaaatagaattaaaaaatgagtcagataattaaccgcctaattttcgatcgtttgacaaaaaatctataataaaatcaaaagaaaaaaattacaacatcacaattaaccttaagaatacctatattctgtttcatctatcgcttaaaagatacaacagtagaaattgttgcagcaggttcattcaacctcgtaacttgagctctcaactattgtgtaaggtatgtaattacacttctaacaactccttcagtcgcagagaacttgttattaccatccacaaacaatgattttatacgatcaacaattatcttattaattgtaaaaaagaatagaaaattagagcatgaatttaagcttgtatgaaaaaatggattcatctatttaagaaaaacaacaaccagggttaaacatgacacaagtatttagcctagatctaccatttaaaaatattggcatggtacacgacccatattttgaaaatcacataagaacacggcccatattttaacttctctctaggttcactcttatgtttgtttgagaagaaaaatgaggaaagaacaagcaagaaatgtattgtttgtaaagagagtggaagagggcagggaaaagtaaaaggtacattctattaaatcttaatacatacaatcaaatttacttataaaacttcaaatcaaaaggcaaccactaatttgaccttaatttccaaataaaattatgcaaaataatcacagtattgtatttctcaagtttctttaaagagtagtctgagataatcattcttatattagatattggcaaagttataaaggctttacgaggaagtagaaatgcttaaattgatttgaaacaaggctacaaatatctgaaaaaataaaatgacaaataaccaaaagtagatagaacaaggatttttctttccttttctccttttccacattttgatcaataattcttttctagaaaagactttattttgatatgaaacaaggctacaatatcaagctatgcacaccaattatttaaaacttattttacattatatgtatcctatctacatggtatttcttataaaagacagtggtagtagaacaagatgtaaatcataaatggtcattcagaagatataagacttaagaagcctgacgaaaagaaagcctacttggtgaatcaattctcactataaattcatcctcagcaccagattcatcacttgaatcttcagcatgactgtcttttggagctgtacttattcgcggtggtgccaaagtagtttctccagtgagatttctcccttctaagttatttctcacggtcccttctgatctgacagaaacaagtggacggtcctggtgtgagggaattgtaggatatgatatgctgtgtgacggcttagccacactaattcctggataactacgaaagtatttgcggatgttaacctggtgacaagaaaaaagatggaatgagtttcacaaagatgagactaaaagaaacttatccacataacttcaaattataacggttaataccatgctgccataaatgcttatctgcattgctctagccgacaagctgttagcttcttggccaatcccttcaaagtccctatgttgtttttgtttgtagaaatgttcaggccaactcataagaccgccatgttctcgaccaagaggtctatgaggatgatgatctacagaacgtggaacaaatgaggaagaccttctctcaagcttactttctgatccaaatgcagatatatcaaaaataattactcgtgctctcgtttcaactaaatagcaggatgctttatgggaaaagctggctcctttgatggctgttatcataaaaagataaagaagattattttggagaccaacagatattacaaagtaggtcgatggagaagtgagcatgaagccttaaactacctgttgtgtcaagattttgaaagctttgatgcacatgcgaaggtaagagagctgcaggtgatgtaatcaattcttgggtgccttgggttttgacaaatccttctaataaaaaacccatggagtggtggggaatttctatagtttcccccctaatgtatatagtcatgattgacctttcagcaacaagagcccttaaatcttgcattgccattttctcgaatatttgagggaccaagagtttgacaagaattatagcactttcctgtaaaattataaagcaatgaaccaagtcagaaaaggtagcatgccattcatttcaaatattttatatataaaataaaaggtataatgtaatctttagaaagtatcattttctggacaagctgcactgaaagaatacaattgatgggggaaactaagttggcacaatattaaacttagtatacctgccaaaggaagtcttctactgaaggatcagatcttagaacagacagtatcttatctgtttcaacaaagaaacagagaaccacagaatccgctactatgtcacatatgtatgattttccagttagcacttcatataagcccaaagtactcccatgagtaaaagttggatgtatcgaatgtttgttttgtaagctcttactcgtccactgcaaagcagaacatctattagcaaactctctctaaacaaacttcataaaattgtacaatcatattttctattaccttgactaccccattggaaacaagccatattccattaggcttcgatccttccctgtaaagtgtcacaccacgtaatttcatcatttccttggttgaactttcaagtggtttacaaatagaaggaggaagagctcccatgaagggatgggcactgatcacatctctcatttttggaatttttactagtggaggatttcttagaagctttttcaagtcggtctgcaaagaagctttcagaaattaaaatcaagcattaaacagttgggaacataatgaataaaagaaagcaaaaagattatgaccacttacctgaacatcatcatgaagatgaagcatctcctttttctccaataggccaaccttttcaaggttttggacgtagtcgatcaaacggttcagaactgagtatgttacttgtctggttttcacaacacgcagaacctaaaaaggtttcaaagatactctcattcatcaacattatttaaattagatattctcttgccatcatgtcttttaagcaagaaaagagatgataaatgatgattaaaattgtcagtatgcatctaatatagaagggctcaaaagataaaattgggaagggatttaggtaaaaacctgaggaaatgttactcggacatcttctagaaattttcttgcttcttctccttctgcctcactttcattgatgacagtagaagcaacttcactttcacctaaaaagatgcgtatgaatataagacataataaaacactctcagagtaactacctaaaattccttttaatcaaggaggtgaatatatgtatatcaataaagcaaagataataatatactttcacgaacccatacaaaataatttatctataaaacataacactaggaaagaaggccagttaatgaacatacacgttatgtatacaaaaaaaatgtcatggaaagtgatgatgattatcactattttattaacaccagtcagaacttttccctttacctgtgcaggcacttgtgtttttagagttaactagttaaaagtcatgagtttaatacatttttccataagactatgcgctaaggctaattcaggagttcacaagcagtcaatgtattaaagattaaaggtgaggaaaaacaagggttatacgtagctaccgtatctcacatataagtatatagctaaataactatggattatgtgcgtgtgggtgggtgggtgtatttggagagagaaataagccacgaggaaagtgtgttacctatgaaatcatgcagttgctgtcttccaattctatgtgctcgaagaaaggcagcacaaatgtaacatgcagattctaacctttccacagtgaaataagttaccaacttttgtggacaaatacttctttgaagaaacctgtaataatttggaaaattaacttgggattttaatcccttccagtcacataaaggctcactcgaaacaaagtcaagtgcctcatccaccgattgcatcaaaatatttgcagtagattgagtaatccttccctcatcaagcatcccccagtaagcagcttggacacctaatcataatatttattgtcacagtcaaatatttagagcttttagtagttttacaacatgatcaaagccgaagaagagtcattgtccttccaaaaaatctgtcttggcaatcactaacattatgattattattttttattagcaaagatgcaaagcaaaaaacataatcacccttaataaactataaagcatccctcaaaataaagtgaaatacaggaagggtgtacgttgaaactaaactactttaaataagagatctatcagagaagtataacacttgatcctactgcgaagacagctaagttgtgaaatctgtcttaaaatttctcctcctttcaaacataaagatcagaagtgccacacacaacatagttccacagtatctatcctcctctagagccacagtatctatacgagtatgtgaactggctacactaggtatggaattaaaacacaaacaatgctgaatacatcaattatattttcttttaagaaaatgcccatactctgaagacaattgaggtcacaatattaatctccagatttcacctctcacttaacatgaaacccatataagttccaaaactgcacacctccacaatagtcttcatctcctactaccattaaattctttatcacttgttatcaaactgacgatattcatttaatcagttatgctactgagccgtcatgcatggagaacattacaaatttataacaacatttaattggacagaactatatactctagaactaaaaatgtaaatgtaatactttatgctgcataccatgggctgatatatctaatgaacttcaacaacccacagaaacttgaaagtagagcaaaaatatatccagaaaactgaagtaaataataacaatataatttaccttcgtgaagaacactgctagtagtgaaatgtcagaaataaagaaatgggactgaaagtaatcttaattaaaattaccattcaaaaagcgttcacgtatatcattcaaattcattgggtccaatttattatcactttcatgtgcatcatgaggatgcactcgttctccttcaatgttatttaagcttgcaatatatcgtttaactgtaggccagtcagcaggtcccagttcctcatcttccccaagatcgccaaaagtctctagtgctttgttcaacatttcattcttcgtataatccaatatacgcctctgccacgtaaaatatatgcgttgaaaaccaaatacaaaaggaaaatagtaacatcgcataaccaacagaactattatttatgagaaaataaaaagacaaaaaaaactcaatttaggttctatgcaacatgtaattagtattaccccaaaaaacttcatactcctcccaagatgtatagtaactcagtcaaaaacataataatacctttcatatgcatacattgaagcaaacttccccttttcacattagatagatttctcctctttactcagtacaagaatgctagccattatggggaagaaagcatctgctgctattgttttcagcaaaaagaaagataaaattgttttgcctgttcatttcacttccaatggaaaaaccaataattctaatcgtttcatgtcatttatctttgctctaagcattttctcataaagtaggtgggttcaaatgataacatgattatagtacatagaagtttcattttaaagcaatgggaccaatgtcatgacataagcattgtagtgctccatctaacaacatttttcagtgtacagtaacatcctcacctttgctgcagatagcttatccatgtttagaaggtgtaaaatgaattgtgtggttgaaccatttacaataagagtcaagaaaacaattccaccagtgaagaaaacaaactgcaaagaaaatggtaattttgtaataactgccaagactcatgactgatctattttacaaaacaaagacatatagtcaaaatatgtataagttgtacataccaaagttcctgtttgacgactgaggagtggtgaagtgtcactagaacgctaatagagaaacagtagacatacagcagacaaattagaagcaggtgatactcaaaggacaaaagggcaagaaatgaaatgaatagtacaatcatataaagcccacttgttacaaaagcaaattgcctctgttaggaaatatgataacacatattaggagtttcaacttgcaatcatataaagtccttatttgaaagcttgggcctgaagttagttttccactgacaaaggacatatagtttccaaagaaatggaagtctagtatgttaaagctcctagtattacaagtgacttggtctttttcttctcccttgtcccttgaaatgataacaaattttctcaattagtcctttgcagtctcaaaaacccactccttttttgcccaaatatatccttaatttccagtatattctagcctttagatattcttatactaatttcttatgagtgtgagtttaggaatttcagatcctatctggcatcaaatataattttatccattctgaagctaaaattcgtcaagcttaagcctttagaccacaattaaataatcctgaaatcctccacaagagaaaacaatgattacatactcaatctgtcctacctcatcaattttatggacaaaatagaaaaacttataccctactggtggatagttacactcacgccacagctttcattatcaggattttatgaataatgatgcacggtaatcgacctagctcatatcttacaccagttgtcaaaaatcaacttggcaggtttagatgtttaaaaagaacaacagagaaaagcagcactacatgaattaggatatcaaaatcagtaaaaacattaactctcatttaacaaagacttgccttgacagacaaggaaagtgacaatgcaacagcccctcgcaaacctgaccatatgagaataatagcctctttccattccaaaccatatccaagatacctcagaaaggggaacaatactattacaaccattgcacgggaaacttgtacataaacatagagaagaactaggtacaaccatgaatgtcctgaaacataattattaatagttataagtgtacttataaccaaacataatagagaaacatcataccattataatgtaggcaataaaaataaaagaagaatttaagaccactctcatgctctactctatccttgaaaatggatcaccaaaacattactttctctactttacctctgacttttacattataccatacatcaccttctctattttttctctataatatctaaatattatatttttaatcacttcaaattaaatagagataaacatgagaaataaaaaaagatagattgatagaaaaattaataaaataatagtttaaagcatgaatagcatgagctaaatgtagctaagctacagtagaatgctttaagaattttctaaaattgctcatctattggagctctcttttattaccttttagctaaatttttaaagtagctattgggagtgctagcatatcaaaattctcattctttgctaataaaaacagatagcactgattaatagtcaattgcaaaatggtaatgtagttcctttctcctttcgtttcaattaacaaaattaattggaaatatgggcaagctaccagaaggaaaaatctttctacaggtggttttcaataattataataatataaaaaaaaaggttatctgatattctcatatttcaggttcaaagaattccctgctattctagagtccattttgtgatgcacatttccattttttttctcatttacactgcaattgcagccatcatatgcaaaaaagactgaagattatgacaacattcagatttcactgatgtctgaactttagagtttaggatactagtgaagagaatacaaagaatttttctttttaccatctcgaaagacatgatcatcaagaagaacaccttcagctataaccactccactgcaaagcaaaacagaatcatgagaaccctgacacaagtagttgaaggcacctttctctatgcatttcaacaatgaaatgaaatcaactagaatagaaaaagtatttttagttagagattaattctacactgctattaatttttaattaaaaattcctttgtccacatgatttcataagattcgtacaactttcaaactgcaatctgattccaaagtagtcgagcaaagctaggcatgaacaagcaagctcaaactcaattaccttaagatgaaaactagtgtgttagcaatataagaaaccatttccctgaaaggaaaaaagaagtgagaatttaatatattaatatcttattaataaaaataagcaatatgcatcacaaagaagagagcaaagagtggaaagtacagcatatacatactcaaggaggtatttgatatcaaagtctaataaaatcaaaatctatttatatttctggtggccaatgtagtgtatattaaggagcaacataatatcaactacttgaaaaatcatttaatcaatatatgatctgaaacctgcaggagttggaccaataaaacatgcatccagctacatctgctgtacacataactaaataagccattttttcttcaaatcacaaaatggacataccaaaaatgatgcaagctttgctgaccatcacccttgaaagctgttcttgcagctgcagcaaaaaacctgatccaatttttcaaattaaaaaatatatatgtattctctaagaacaatttcattatttcataagatctgaatgagaactgatgaggcaattcaaattacattcccaatgtcatcactgtcaaaactccggacacctcagccccctcttgtgcctggtaagaaattcaattttccatgaacaaatgtgagtaagtcactaaactaaattaacattaatcattttattgctccacaatcataccattatcaaattgcaaggaaatgataaaaataaagtgctaatatgttgagccaaaatacaatggccttgaaaatcaaatagcatactgtgaaatggtaatgtaagatatctccctttttccaaaaggaaaactatgactactggcatcagattacataacagaacaccaatctctaacaagaacatacataggtaaagccaaaatcaataataacgagtactttcagctcatatgaaaaggaatatacaaaatcaatcagctataccactattacttacacaaaaaaagcaccaaaaacttgtcttatacaaactcaaatatgaaattacagaaaaaatctacttgaaaatttattaatataagttaattgacccagtcaaatgtaagtgtacgcagctcttttgaaaaatgtcaaaactctaaaaaccttttacacacaaaatctttcagtcacaggttgcataagttaaaaaaacacttgaatacttttttatttatttattttgaggaagtactgtgtcagcaaagacaagtatccttgttgatagaagaaatctaatctataaccatctgaaggctgaaggaggcatatcatatcataggtccaagtactgaggtatcttttgttggatttcatttgaatacattgaaaaactaagcacctacagcaattaaaaatgagtaactggagaatctagacagttaagtgttccaagtgtgaagaggaacatacggtgaaataggcaatgtagctcacagcaagtgtgagagaaatttctatcactgtatcattaaatataaacccaagccaaagaacagaagctattccgaaagcaagaccaatacctacactgaaacaacatacgccacataatcagaagatatctatcactattattctgcaacaaaacaattctcaataaaacaatacgtacgctccaagcgagacttttgctaagaattcaattatagcctcccagttaaagctctttcctagaaccatttggaaaaatagctgataaaccactattgctgtcctgaaatgaatttcaattcatccaaacaaatacaataatggaaaaaagtgtaataaaacaaaaccaattaagcaacagcagcagcaaaaaaacattgataaacagatctattcatcaacatgatggtttcacttgctcaatttatcaaatatctaagtaaaggtaagcaagcaaactgctttggaaagaaatacccatcattcatcaatgattctccttcaataattgtactcaatttcttgcccgcgccaagctcttttaaaagtgcaacaacagctacaggatcagtagcgcttagaagcccaccaagcaacaaggatgttttccaactccagtcgtaaggaaaagtgagctgcagcatgatttcgtgtatgaatatatagccatactttgtagctaaatgtataagcttgcaataccttcaaagcaattccgaggcagaatgttgatatcagaacacctggaccagctagtataatcatttgtgctatgcatctctgcacataaagataaacattgctagtaattcatttcaaatccataatcccagattattcccaaaagacttgcatgaagctacaataagcatttgtgtcattacaaaatttcatgatatcaaaattataatcatttataaattgtgaatagtgaagagtcactgatgttcatttgttgccatgataaccataacaataacagtcgaattaatattataataataaagtaaaaataattgttaaataatgatttgaagataaggttattagattatagcttggtattatctgcagcaccagcacgtcctcaaattcattgcattttcaatttttgtttctatatttatttatgctactcgtggtagccggtttgagccctccgataaaacctatctttatcaagtatctacacatcaaataatttcaatttttaacctttgatgatttgtttatgtgaaaactcattttacaagaaaacataaaataaataaacctacgaggagtaggtaaagtgcccaaactcatggtataaaaagaatcaattaaatgagaatctaccttaatttggtgtacttccattgaaaaagcactttcaaatagaagggcaggaagaaaaacagccaatagaagttcaggatcaatatttgcccctgcaaattcaacaagggtatccatttattagctcataacagacctagagaagataagcttactacataataaagaaactctactgagtattcataataaaaactatagcttaagcttacatatacgaatgccatcgccaatctttcccagtcgatgatgtgtaccatattctgcaacataatgaatacttcagccactaagtcatcattaactaaacgaacaaaacagattcatcacttttcccgaagtaaaactttcaatttgtttcaaaactctccttttaggggtcagttaatcggtggaacatgtcttcttttatccaatttgagaaaatgagaatgatcattctctaaacaaattacaagttcaaccgaacttgtaaaaatctcacaaagttgatatgacctacagatttcagaactaaaaacaaacaaaaagttttggagaaagaaagtcacgtattgtccaaacaaagcaagtttcacaaacaaaaaccaatacatcatcatcaagaaaaacctcagcacagtcaaaccagtttgtgaatttaaaaaaaaaaagattgagaagagaaagaaacctatagatccaagagcaatgccgagaacgagcaagccgacggtataaggaactctggtaccacgcaggaggtggcggcaggcaattccgagcaccaaagagatgccgacgaagatgacagcatctgagggattggaagatagagaagaagaggattcttcgtctagtattcggtaggagagcataggatcctcaacgacggaagccattgaagaaggagggaaagagagagagagagagagaaaattaaggttttattgattgaaagaaatgagagaagcgaaaatggagtagtgagaaagattctgctcttgctgtgctgagctactactctctctctctctcattttggagccaaaacattatatataccaaataaagagtataaacattacacatattaattacaatcacttgccttttacaaaaaaaaaaagtgaaaaaaatgactttaccacatttatcatgataaacatttatgagtagagttactagttagttagctatggtttttattttagtgtttttttttttctttttgtagctaaaagaaattttttcctttgttattaggtgcactaatataaacgtgtcacgtatgtaaaagtgtacatatagatagtcaatgttggtcgttagctgcgataaataaatgacactttaaatttgttaatagctcatttttttttttttgatttaagcgtttatatattacaacataatttacctgggactcgaac

SEQ ID NO: 14365 - DNA, 3112 bp, Cannabis sativa
aaattcttcacccaatgtgtgctaataatgcttgaagaaaagggctgagacaacaacaatgtagctctttataattacttagctgcttttttttatattatttattaaatcaaaatgtgtgagactcaataatgaaatgcacgaattacaatatatcaccttttacaatgcttagcatttcttatgaacatatagttttaatctcatttgttttattttaacaacaaaatatcatttatctaattattaaaatttattacgggtttatggccatatgacaatatatatagtaatttaagatattttgtaaataattatttaaaacatttacctttaaaaagatatttatattttgtaaatagtaatttgaaatattttgtaaattttttaaaaaaatttaaaatatttaaattgtaaagcatatggtctctgggacacaaaaatccctttatttgatcttgcaacttcaagacctaaaaaatactacaactagcccaaatcttttaatttaaatccagtgttcaatataatctttagggcctttagttcctgtaagttgttgttggtcaggataacatcatctatataaactaaaaggaaataaaactaccaataaaatattacatgaacaaagaatggtcagtaggagagtgacaaaaatcttcttcaaataggcacttaaaatttagcaaactattatcttgaagcttgtttcaagccatacaatgattttcataactggcaaattggatttggtggtaactcccccttgggtcaatcccttgaggtagagacataaatgttggaattgattaaatacttaaggtttatcaaataagattagtatagactaatcaatcagacttgtacaaactaacaatgtaagttaaaagattaaaacacattaagaggatgtgtactttaaagttgtatttgtataatgcgttagaaactattcaagatcttaaaacttagttttgagtaaacttatcgcctgaaaagttctgggtcattcaaaagtgtcaaatgcaattttcgaaggaaaatgcacaatattgggcaacatgtcgtgtggaacattttcgaaaatatgcaaaataaccatcaacaatgtcccgagagatatgttgcctaaggtgaaagtgacatgtcgcccagtgataggcaacatgttgcctggtgttatagattttccaacgcgtaagtatacatatcgtttacaagtaataaatttacaagagtgagatcgaccccacaaggaatgtagttaattaccaagcaattaaattcctaattctatttagtggcaataaaattaagaaaaaatatttaatttctactaaaaaaacaaaaaataaataattaagatgaaattaataatgattaaagcttagagtgattatttcagttgcatctactttatttagtttaatatactttaattcttaattttaattttcatgtgatagtggatttactaaagaaacttatattcaagctaggacatataaatctcaatctgtatacaaatttgctactcttgttcaaaatttaaatacataagaggtattaagcataaaaatcctaaatgctacataaaccaaatgagtactctcattctatatcgaaatatatgtctattttactagagcataaacaatactcacttctcaaattttctactaaaatcataaaacagttaattggtgagcaggtaattaaaagtaattaagtacagatgaaatagatacacataaaaattgagaaagaactaaatcatattaaaactaaaataaagtgtcaaacaatctccattgatacccttataaacaatctagctactcatattcattataaataattgacaacaattaactaagaacataagaaaaaagtagaaggaaataacttgtcgaaaaatattgataaaaatctccaaagcctctttctgcttcaatttttgtccttaatgattgttgttttacaaagtgtcaaaagggtccattataaaaccctaatctttgtcatttaaaacaggcgggccgcgacactaccttgtagtcttgcggtgcttgaagcacgatttttgacagcgagtttcctgctgcgttgactgataatattttggccataactattttaatattgctcaaaattggatgattcaagatgttttggaaagttgaaagagagatctaaaacttttattcacaatatttttcctcaaagtgaattcatcatagttaaaaatttgcttgaagcttcagacttgatttttgatcacaaacagagcgtgttgatcatcaaaaacttagaatatttcaccacttatatcctagaactctaaattccatgataattcatcatattcatctaatttaacatgtttcttctcattttcaattcacattatgaattttaccatttaaacctgaaacaaatagaaaacaatcgtaattctacacaaaattaaataactaaacacgacacaacataactgaatcaagttaatcaaataaagaattgagtaacaatgtttcaaataagtcaagtaacatggtttttataaattttttaataatatgctctaatccaaaatttcatctcaattacatcattaactcacatcaattctttcgtttagctcataaaaccacaatcaatacttaactaacattcaaaacaatttatacatactaaatacaaccatcaaccattaatcgaatttattccttttgcattgctcactattctctactaatacacataaatgcataatcaagaatcaaaaggtctttgtaggcttgtaatgaaaggcttagatacgggtggatgaaatagtcatttaagctcaatgtaccataagcatataaaaccaatcttgatattcacatcctaatttaacacaccccaagtttccttttatttctaaggattgagaaaatttaacactagagagatttttttttcaaaaactatcattcctccaaacttatacctttaacaataagagaaatattgttgttgttataaatattaataattatatggatgtccaaatcttttatttattaccatgaattgtaatgaacattcctcttttccttagttt

SEQ ID NO: 14366 - DNA, 7156 bp, Cannabis sativa
taaacgtgattaactgctaatttctaaattaaactaagcggtcttaacaccatatatggtttgaaacaggcccctcgggcttggtttgatcagctcaaatcataccttcagcaacttggtttcaaaaattcgaaggctgatactagcctattttacagcaacaattgtggccaactaatgctcattctagtttatgtcgacgacattctaataactggtacagatcaacaacaaattcaacacttcattcaccagttacataaccaatttgatctaaagaaacttggatcagtccattattttctcgggtttgaagctttcagacaaggcagcacatattatctcactcaacagaaatacacaagagatttactcaatagaacaaacatgctagaggctaaacctcaatctacagcgatgtgtgccacttcaaagttatcaatcaattctggccaacttcttgaagatcctaaacaataccgaagtgtcataggagctttgcagtacttaaccatgacacggcctgatatctcctttgctgtcaacaagctcagccaattcctcaaagctcccaccattgatcattggggagcttgcaaacgtgtgctgagatatttagcaagcactacacatctcggtttgtacttttctctagcccctcatttggatcttcaaggttataccgatgcagattgggcaggttcctatgatgatcgcaaatctacatccggctactgtgtgtttttaggccaaaatttgatcagctggtgctccaaaaagcaaagtgttgttgcccggtctagcaccgaatctgaatacagagcccttgctctggccacatctgaaattacatggattcaatctctcctcactaaactatctatctctcttcctcaatgtcctattctttggtgcgacaatcttggagctggatcccttgcctcgaatcctgtctatcatgcccgcacaaagcatatagagatagatctccactttgtccgtgacaacaaagtccttgaaaacaaacttgatgtacgatatgttgacactgcctatcaacttgcagatgtcctcacgaagcctcttcctgtagctcagtttgaatattttagggacaagttaacacttcaatgccccagtgtaacttgaggggaagtattaggataagctagttattatagtctgttatattagttaacttttttgttttctattataatagtcttgctttcttgtgctaagctgtggccagccttcgtaactactcatcttaatattgaattcaatataaataggaactgggctctctgattttcatttagagccattttaccatttctcctctgttttcatcattcttctacttttcccacaatctatattagaattactacatgtctgtaaattgtaatgtttatctctattagaattacaacatgtttgtccttgagtaatgtgatttttatgaggagaacaagaaaatagaacatacatagctaaagggatattaatggcaaaaatgctcaaaattttcaattgttaccggtaagacaagaaaacaatttacattacactttttgttatatttctgcaacgtatgaggtaagaaatcaatttacattatagtcctagtcctttgactatatttacaagttatttacacaaattaacaaaatctaaattttaatggaattatggaaggaatacttacttcaaagctttccctcttagtccaatctcatcattattatttaacagcatggatttccgttcatattttcccttgtcaagcttcttgattttcgaaggatcattgtttttcttcaacttttccaacttctgtcttcttccctcaatatcagcttcgataactttagctcgtttttcatcagatagcatagccaaccgtgaaaacttcttcggcctcactagtccgagcctctcacttatctccttgtatgcaggaacaagaccacgccgaagaaaacatccgtcaattaactgcattgagttagattcggggagagatggaacatcctttagctcaaggtccagacagaatggcgagtctttaagccacattctgagggagtgagccttggctataaggaggccagttcttgttctacaaggaaggaaaggggatcccatctcccataggcaggcctttagtgtgctattaagagaaatagagttgtactctgatgttcccgttatcaaaacaactgattttggtgattcgggatatccctgcagtgatgcatcctgcataagatatgtcagattcacaagtgcttaaccatgtgattaattagaaaaccgaaaacatcttataagagttgatctatttccgagttgtagaaaattaggaatgagatatcaatgaatatagtgcaggaatagtctttcactgtcaacagttgttataagagaaatgcaaaggaatgaatagtgttctataaatgtagagaattactattcactataacaataatgtcaaaatgttatgtatttttcaacagttgtttataagaaaactctacaaaaagtcattgggagtgatctagatgcttaattaaaaaaagtcaacgaacagtttccgagttgttagaaaattgggaatgagagattgatgaatatggtgcatcgataatcacttactcccatcagttgttataagtaacttacctctgaagagtaaaaggctaaaattaatatcagaataaatggctgcgcctcaaattataacataaaaacggattcacttccacagaaaacagagagaaacagaactgaaattacctgcatatgatcaagccataatgtaagaccaacaagagcagcaccagcagacagctttctaaaatcagcaccccaatccttgtccgcaaccctgtattcagaagactgcaataaggaattcatcgaacgatgtagaagttctacccggtaaggaaatgaaccacatatttattttctactctttttctattgtaatattggcatgaaaagatgtgcacttaccagtttaccaagaaaaataaaagaaaaaactaccacagacaagttattcagttctacagtcatttaccaaagttctaaagtttcaagtttgtttggtaaaaaccacaccatagccttgattaaaattaatgatcataaatagtcacatacctgaaaagatcatgcctatagattcctctcttgattgccaaatggaaaacccatgaagcagttgctcggagttcaaatgcccataaaagatcctctaaagcattgacaaagttaaaagccgcatcgtcttctagggaccctagcatctctaggcactggtccacctctgaaattagtgatcctgatttttctgtcaaaatcctaccaaaaagaaaataaaaagaatgaaggcttataaaaggattattcatggggaaaatatggagtaaacacaagttattcagtttgataccttattggaagatcaaatccagtatcatttagtgcattcaagagaataatagcttcacttgtgctctgagacaaactagcagctctgataaaacaagtccatattctatggtctggtgtcaaaccctctttttccatctctttgagcttttgaattccaatattataatctccattctttagataagcatcaataacagaactatatggtagtgtgtcaacattcaaaccagtgactttcaaattttcaaacactttctcagcttcctgaggctgtccagagccaccataagaaaccataagcaagtgcattgtcgctgcattgggttcgacaccagcctgtttcatcatgcccactagcatttctgctttggcgggatttttggaattcctaaatacctttatcattgtatgataaaatgaacgatccaatttacgcccgtttgatcttaactcttcaaaaagttcctcagcttggtcaaagagttgttgtttactaaatgctgaaatcaaacttttgtaggtgtctaatttaggttccaagctctggcttttcatttcacacataagagataaaccttcttctggtctactatctctgcagtacataatgatcaaaatattgtaggtatactcatctgggttgaggccagcttctttaatctgttgacatacctccactgtttttctgaagtcctcaatggatgagtacaactttaacaatgaattccatatcgagatatcaggtttaaacccggcttcctccatctcagatatcatggcctcaacatcccttactcgttttactttgcacatcaacttgatcataatcctgtagagattcatattaggaaaataacctgcagctttcattccgtcgtatattttcattacctcaaagacattaccagctctagcaaatgcatcaagcatcaataggattgaacttttgcttattttgaaacccatatcttgcagctcctggattactacataaagttcctccaatctcccatcaacaattaaagcttgcaataaaccgttcatggaatctacagttggcgtaggaccatccctcatcattgtattgaaaattgctctggctcgctcatagcagccgctttctgcataagcttgtatcaaagcattccataccttcctatccacctctgaattgttttgtctaagatgtcccaccaaactctctgctttctgccaaagcttcaattttccatatgcttcaataatactaacataaacgaagagactgccagatgcaaaaccttttgcttctgcctgatccattaaagaatgtgctgtctcagggaaaccaatattgcagtaaacaagagccatagtctggtaaagaggtccagaaggttcaacaccaaagaatctcatgtcagagaaaacctgtgaggcattgccaaataactctttctctttacagccttcaatcagggattcatacatggtagagcttctactaaatgaatggaatccctttgtattactgtattcctcaaaagcagaatcaaattggtgagccttgcaaagtatgacaaccaatgcttcgtttattagttgcttggaggcaggagcttgttctctcaagaattcgagcaattcacgtgcttctgagtgcctcccagatgaactatatgaactgagaatagttaacatattttcacggtctaattcatatccagtggttatggccaatctcaacatcttagcagcatggtcataacattcccccttgacaagaattgaagaaatgatttgtggattcatgccgaaaactaattccatatctctgatgactttctcaacagcttctaatttattttccttcacaaacactcgaatcatgacttcataaaggccattatctggcatgaaaccatcacgaaccatttctcgatacaaagccattgcctttttcgtgtcatttgacctcaaaaaaatgtccaacattacagagtacgctagattatcaggtctaatgccagacttaaccatttgatcatatgtttccagagcctttacttgcataccagcttttgcatatccacaaatcaaagcactataggttcgcaaagtaggtttcactccagctgccaacatctcagacatcacattcgccgcctcagtcatcttattcgctttcccaagagaatcaattaaaacagtaaaagtaatggcatcaggatcccggccgatcgtatttttcatgtccctgtaaagctggaatgctaaatcatgtttcccttgcttcccatgcatatggattattgtattgtaggtcatctcatctttaccaaaaccattttgaaccatttcttcacctatctcctttactctctctatattcccttctctagcaaaagcatacaacaaagaattatatgtcactgcatcaggaagaaaccctttagactccaactccttaaagagcttatcagctttacttggaagtccacatctcccgtacaccgaaatcatagcattataagtccaaagatcaggttggcaaccatgctctaccatatcattataaaccttcatagcttcctccaaatttgattcccgtgaacatccactaagaagagtgttataagtaataatatctggtctaaggcctgatctcctaacctcatctaaaagttcaacagccaaattaggtaccaaagcagcagacttcaaacgggcattaatcaatgtattgaaactcacaaggtctggctcagaccctctttcacgcattacatcaatcagttggtggaccttattaaatctaccgtttctagcataaacgcccatcatcgcattgtaaacttgaacagtattacctatagaaggctctgcacgttcaaaaatctccatggctaaagcttcctggttggcttttccaagaactgacaaaacagtggcaagcatccgagcatttggggagaaccattgtctcatattcagccattcgtacacctccatagccctttgccagctcgactgaccaacccatttaaccacaaagcaaaaatcagtaggtgtcatttgaaccttacgttcgtccaacacatcggccacgaactcatcagatttcaactccaatatcctatcactcaaatacttcactctttccctccaatctttggctctcttcagagccaatttgttcattttcttagctgtgttcttgctaggcctccccaaaccttgttgggtttcatcgtttacatccacaggctctatgtatctcttggaattacgaggctttttcggcaaaacgacgtcgtttacaacatgggtaggcggaggagaagcaactgcgacatgggtttcggcgagtttcaggtgaggccatctcacggatggtgaagctcgactgtatgtgaaacttcggggtttggtattggtactgtcactgtcgtttgggtggtgagaattagagttggaagtagtagacgcagtagaagaagaagaagtgggattagaagagcaagaaaaagaattggacttttgtagcttagaagaggaaggtgaagagaatgtgtcggagtgaataatgggtgaagaagaagatgaggccagaactcctacgaacgccatggctgcagaccatgaggagtgaagtccaaagatgctaatactaacggataaaattatttttcactagttcatctttggc

SEQ ID NO: 14367 - DNA, 3080 bp, Cannabis sativa
gaacagttttaaaagccccagctgttcgtcaagatcaggaacatgaccataagacatacaatctatctttaggccatggaaaatctgatttcgagtccccattatcccataaaagtgagaaatgaaatggttcacctcctggtaattctcaacaatttctccatgttcattagtaaaactagtaatgttattttcaagtcttttttctttaaacaagcatgaaaaaaagaagagttttcatcacctttatggatccaagtgaccttgcttctttgacgaagaaaactgaagtacattttttcctgaacaaggaaattagctgtagctaccttttcaatatcaaggaacacgggttcactgtgagcttgggcttgcaatcttgcttctaagaaatcagacttagcctcttgatacttcttcccaatatcgccaatgagatcatgattaaactttctaagacaatgctttaatcgcatcatcttgagataagttgcatgcatgccctgagctttgatcggcttcctccaattagttagcacaatatccttgaactcaggatgatcactccaaaaattatagtatctaaaaggtttgaagcctatcttatctgatatcccactctttattatgcaagagcaatgatcaatattgtttcccatttgaacaaggctttcgtgttaaggaacacgttaggccaatcctcattagcaaaaacatggtcaatcttataatagattctattgtaccatcttgattgttcgtccaagtataagtagaacctattctaggaatgacttcaagattggcagcaaccagccacattgaagcatcttgagtgtcatggaaagtgattgagtttcccccaactctgtcaacaatattgaacacagcattaaaatctcctaggactatccaaggcttcacattcagcttgatctttaaaaaatcttcccacaacttcttcctttcatctatggtattgaaaccatacacaaaattaacacaataacctgtctcacagccagccattttcacaaaacaatgcacaaattggggagatttagcagtaacaattactctagcaaaattcttcctccagtaaatcaaaattctaccttcaatcacatcacttgtataatagttccaattagacattttagaatcaaacatctcttgaatcttattccctcttagcttagtttccaacatagcaccaacaccaatcttattaacttgacaaaattcagtaacagtagcttgcttatctttattgttaatacccctaacattctaactagatgaattgcaattatccataagttaaaaagagggatcctgaaccttttctttctgatctttaaggatctgaattgggcatcctccttctacttgcctttgcgaagctttgaaattgttcccagtagcaatatccacctgctgctccttttttttgcttttcattcttccatgggcagcttttttacgggtttgccaagtacccttgttgattgaaatatcattttttggatccttgattgttgcagcctgctgcttcacttccccactgttagatgcagcaacctgctgtttcccagtagcactaacctgctgctgaatgttcttaatagcagcagtctcttgcatttccactgccttaatctattgctgaatttttgtagcagctgcaacattctgaaccaaaaccttgcttgttgtctcatgttggtctcgttttgtattatccttgttctcaactttatccttcattttgtcattcctacaatcagctgcaatatggccaaaaccagcacagtttttgtatttgactggtagccattcataatcaattgcctgctctataaactgccgatattcgttaacatattgaaaggtttctgggggattgtccgatatatccatttcaactagaatttgagcaaattgaaccctagtgcgttctttagtgtgttggtctacaatgattcgttttccaacaatactaacgcattgaggcttttattaccccaatattgcaatcctaggtcaaataatcgaatctagagaggcatgaatcttaccaatttaacagagtttaaatctattgtccatggtcgagtaataatcggcttcctatcaaactgcactactccagcctccacttcgtttcttgtagcttcatcattgaaacgaaccataaccatccccctagccattctagctatttggacgattccaaggtgtccccaagtcatcttaatgaatccttcaaacacagtcatgggagggttaactcccaatatcatacagattatagcagcattccacgatttagcttgctcttcaacttcctctagatccacttgagcaattttttgaccgttcttgatcataatattattttttgatattaatatatttgtacttaataattagacataatattattgcattgttacatttatgtcattacaataaaattattctaaacatttttcttagagctaaaaaaacaaaattataaggtataattagaatttatttaacaatttaaataattatatatatggtaattgaaattattttatttatatgttttttttacaatattttttttattattattattagtttagtctaaaacacatcatttatgttttgtttcaatgtaaaaagaaataaatcaatataattataaattgtacactaaataaattagaaaatacaaaaaaaaaacaaaaacaaaaagagaaaaatattaattgtttgttaaatttataatatttaacctgataaatttttttatttacttagataaagtaaatagatagaaacagaaaaatataattattagataaactaaacagataaaaatagaaaaaaaaaatataataataaaattatgacaatagataaacatccaattgttaatgttttagatttttttaggaaaaacaatataaatagaggacaataaataaaacaaaaagataaataaatttaaaaactacaaaatagatcaaaatgagattttgaaaaatgtaataatatttatgtggtatttatatatttaaaaaaatata

SEQ ID NO: 14368 - DNA, 8319 bp, Cannabis sativa
  modified_base (41)..(46): a, c, t, g, unknown or other
attttatttttaataataaattattttatttttaatataannnnnnagtcacccatgaatttctcatagatatatatttatatatatttgtaagaaatgttactcttaaatttaattccctcgtatattccaaataatctctcaaacttaaacatcggaagtgtttatgcaagtaaactctagtgtttcaacaacattcaaagcgatttgaaggatgttgaagaacaaagatgaattcaactaatatttctatggttgaattgctattgttgacaattaaactaaaagattattttagatgacaaaacaggttacatcggtgcagctctattaaagagttcattataaaatttttcaaaatttatcaagaaatttttatatcacatactgaaatgttttatttttttttaatgtagggtagaatttttttcaaaaatactatgtattttttacattgtgtactgtgttaaattttttctgtagttctactgttattttttaattgttcatctgttcttttagttaatctattttgtgttagtatttttaaaaaaatttctatttaacagtattttcttaaaagttaccctaaattttagtattttttgtaaatttctcttaaagaaatactaatgggccggctaagacagtggcccaataaaggcccatagagcaacactgagagagagatattcaatttccttccatttgtatgtacggacgtagtattagtagtgtgagaatgagagtgggacccacacaaaatcaaccaatgaccaaacgccttttcgtatggcaacttccataaccgctttcatcacgaactcatacacaccgcttcaccactctccccctattttctctgttccatttctcactcccacactaaactccataacactataaatatctcaatctaattaatctcaaaccgaattcgaaaccactttctctctctctaatttcgaaactcacctcaatcaaaaccagcagcagcagatctagtaagatgcaatcggtgaagaagaagcttcgatcggaactccctcgtcgaagaagaactcttatatctcctgttgtaatctggaatcgaagtaagaattctggtttttttgctaattcgttttcagtggattccagttcttgctcttactttggtaatggtgatggtgaggtttcctgtcaatccagtcgagtttcggttggatcggagagtaataagaggaagtcgattcttcagaaacgagagtttgatgagcttgcggtgaaatcgtgttgtggtgttgaagcttcagaggtctctgaattctcctgtgttgagtcgaatcggaattgtggtgctgaaaatgaaggtttggaagatagaaggttgaggttgaagagtaagagagggaaggggaatgaaattgtggaggaatttgatggaagaagagaagatgaggaggaagaagaagattctaaggctgtcatttcagtttcttgtatcaaacaagtttctggcgatggaaatggtattgtttcaaaggaaaatgaagttgtttcgtgcatttcagcttcggaatcgtgtttcggagttaatttaggtgagaagacgaagcaagatatcaacaatgcacaggaattagagttatgttgcgtttccagaaattgtttggataacaattttacagtttcgaactctgaatctaccatagaccagaggccggagatcagcttcggcattagctcagaccttgcttgtgctgagaattactccgatactgaagtttcgtctactcacgaaactgcatgctccgagcttcaatcggagattttcctcgacacttccgacttcgatttctctgattacactccgacgaatttcgattctggaagcgaattctctgagaaatcagaaggcgattcagcttcttcgcttactttcgcattgctcattcagtacagaggtggatttttcagatcaacatctgctcaagatactgaactcgattcgacctacctagaagaggacatagaccagtctgaagtaaggatttccaatttaattaattaattaacaattgattttatatttcgttttctattatttaattattaattaattgtattttttaattagtacatgagattcgaagacgaggccgaagaggagagctaccagatgttgagaaatagagaaaggaggcgcgtggttttgcgtgactacatagaggaatattcctctacgacggagtacggcagtcttatcctccaccagcggcgtaaaatgatccagtggattatcagggtgagttttttttttttttacaatctcttgaaacgcgttttcatttcattacttcaatttagttgtaattatagggaaccgaaaaatcaccatgacgtgacgtagtgcccaaaactgttgggagagctgagcatatgtattatgttggtttatggggggaagtaagagtagagctgtaattggttggagcgataaatatactctacagtgacgtttttctacaagtaccgtagtgtccaataagaaaatgccacgtaagtatttgtcatgaacaatgttgggcttacacgaaactgaaaggggtcatatatatgcacgtagacggagtattgtaaatctcgtagtagacactagacactaaacaccttcactgttcaacgtgactcgtgcgtgagtgagtcgttcgttactagctcaattttaatttttctgttataagcaaatgtatagaaaatagataataaagcactttaaatattaataatggctaaatatcacgttgtccgtggctttcgtgtcgtgagagagtcatcatcgctcttaaaaaaagtcactagtgcagtcctcatgtcgagagaagagtgtggattaattgtatgcgttttttttaagggtacacatttaacttaaaaattccaataaatacaccgaaaagtgtgctattaattattatctttaggaccacaatgatataatttgaacagaccttatgagaagaaaaaagaaaaattcgatccacgaaacagtcgaatattaattcaacatttattaaaatttagaaaatatttgttatgttagtttggcccatttatttatttgaactaaactattatatacttcgtatttgatttaattcataattttgttctaattcagaattatttttgtaaatttttttgttaaaccagcgctgccaggaaacagagcttcagcaagagacagcgtttttaggagtttgcttgctcgatcgatttctaagcaaagggttctttaaaaacagaaggatccttcagatagttggtatagcttgtcttgctctggcaaccagaatggaagaaaatcagccctataacaggtattaatcctctcttttcttctctttaatttcgcaatgatcctttgcttagactatttcatagagaaagaagataaactcagtataaaacattactttacaaaaggtaatttctctattcgataccctttaaagtaaatgacgatagcttctgtattgtgtatcactaactaggatctagcaaccatacaattctcaatccgaattttatcaataatttactcaggcttatgattgcattgataggttgaaacttaataactacctatatcatgaatagcttcccgtttaattttgtttttgatcggagtttttttgcccctattctccaacacaaagctatctgtaatgaaaatgtgtgcctaatctgatgtgagaaacaccatcttatgttttctctattgaattgaacatttcagcgttcggcaaaaaagtatctcatttggaaaagatacatacagcagatgcgaagttgttgccatggaatggctagttcaggaggttctcgacttccggtgtttcctccccaccatctacaatttcttatggtacaattgacactaatacatatataataccatttcaaagagttttcctaatgtactttatactgaaactgttttgaaactattacaggttctacttaaaagctgcaacagctgatgaagaggtggagaagaaggccaaatacttggcatccctattgctaccagaccgtatgcaaatgtactttatgccctcaacagttgcagctgcagtagtaatcctggtctgtttaaaaaacagattagcattacccgttaaacgtgtgatagaggtaaatttaattactggtcttccattggtgctcttaatggtctaatttgctgatttaatattttgtaatttactttgcagactcatatcagaacaaaaaaatgcaacgatttacatgaatgcgttgaggtatgaacaaatcaaacatcatacttacctttcaaaagaaaaatgattttgaggggtctaatgactaatatttgtgttaaaataatttaacagagcctcgagtatttgtggaagtatatatgattgatcagcttctattacaagctaaaaggaaatcattcaatcaaaacaatcaattaccataccattctgttcgcttacacactcattcatcataaagacaaggttgaaaggtgaccaaattgacctttctttctacaagagaataccatcatcatataataggtaacaaaataatttcgattcattttctcactgtaaaaagaaagtatagattgaatacttcttataaactttgaaaaaaccatacatattcatattatcagcccttattttttaaccaataccataaattttgattcattcaaccccttttttgtaactacattactacgtagtatgtagcaatgagaagcttatgtagaaaaagcaatttttttttacctcataagcatgcgtggttatattttaagctttagtgcaattattttccatcaagatcacacatgccaactaatcaaatcaaatcaaatgttttcacatcatttcaaagaccttttttgtatcaacaaattgagatgaatgaaccaatttagtacatttataacataattaaagcgggaaataataacaagaaatgaactggactacatcctcatctaccaaccatattttaaaagtaatataattttaaaaatgctaaaagcttatttatacaattccagaactctcgtactatagctagtactgatccttatcaacaatattacatgaattctccaggtaacgttgcaatagccagacaagagggattcgaacaaaaaatttgatgacacaaatcttgtattaacacccacaaacaattccacattgcaaaaaaataaaatgaaaaaatcgatgacgaattcatttgtatcatataattccaagcttttggtcatcaactgaattaactggtacagttggaggttctcttgccgaggcatcgtcaagctggaaatgagcaaagtcactgatgattgctgttctttctctgtaaatggtctctttcttttcctcttcggctttttcgactttctccttagtcaatatggttacgtcttcagctgcctttgcaaatgcactaaatgcacttgaaacccaagaagctccagttaatacataagggttgttcataatagcagatcctgcactgcttgccttttgctcagcaactgccaaggcggattttgtcttttcggatacttggtatcgttcgtccatctctctcaccttgtcattcaccactgcctttccgatgcttagtttttcgcttagaccaatcttgttgtcaatggaagcgactgtggccgaagcatttgatatcaagtgatgtttttcatccaaggcttttgctttgttaacagcatcttttcctaatataaaaccctttgcaagcatactgctcacaacatcttcagccttcttaactgcagggctgctaagagctaggtctttttccttcacaatgaaaacaaatatacatatgtaattaagtggaatttcaattaaaagaaaatgagagaaataaatagagtgttttctttaaactcaaatataagatttatgaagtattgccattttgatagaataactatttattgaatatgagaaatgaccattctaatgagagacgaaaaaaaaaacattataaattctttaatttcatattaagtttcctcccaatcaaacgtatcttatatttccattcctccaagccaaacgtaatctatatttcctaaatatggtctataatagaaccagtagaacttactgaagttgataaaagagcttcaggtggcagttgataattctcagcaggtgttatgttaacagcaagactatctataacagctccctgagaaagaaaagaaaaaaaaatgatggcaaaagactagttcgatcaaacacaatcaaaacagaagaaaagctttcaagaagcaaagtttcataaagtttatcttattttgtataatgtgatatgaaacacaagaggttgctagttcagatatctttagtttgaagatatatatccattattattggtaaataaccataccgacaaaagaatggctgtatctgctccttgtgaatccctgtatgtaacataggcaagttgggttgtttctgattccctgaaaaatataacttaaatttctttagatgaatttccaataacatgtgactcaatcacaaccagttcaaacaaaaaacaactgacctttggatttcaacatattgaagatcaccagagaaagaaaagaactctctgatatctctctcagatacagctagagaaatgttgctaaccttaactgtccttatctgtgaaaaaaagtaataaaatgatataaatttctgtttaatccaatcccataaagaatcaagaagtagtactaaattaatgcctctttgatctgaccataattgctgatcttggattcaaactgaaattctgaaaaaacagtcttttattcataacaagaccttatatgaaacaccatattagttattactttcactttttctagttcaagaattggtattttgtgaaatttttgcctaaaaaagtcacaacttagattctaataagaaaaagattgttctgttctcacatctgaaacatgaatagtccaatttggtggagtagttgactgaagaagtgctccactcccttgatctgtatggtccaccagagcctacacatgaaaattttaatgaatttcttttcatgatagaagaaaaaaagagaagttaagacaaacttgaaacgacaaacaacataactattaaccaataaatacttcttttgcttaaatgaagagcaatggtggccagagaagaatatgatgaaaaagaaaaagagtatcaataactaacaacaacaacaaaagatgtgccaattatattcctttagagggccaaaacaagagaaatatgctctgatctcatatacagatgccaacaatgtcagtactctaatatcccattatataatatatatgtatatgtatatatatttacagtaacacgcactttggggcaccataactgttagtgttgttacccacatcacatgttaccatctgcagagagacatgagattttattggtgggtcactgagaagcagtttctctctctgtaaagctcattaaagaccattctgttcaggagtggaatcaaaggccctcccccaagaaaaaagtttaattatataaaagcagtctcatcatgacatgaatacaaaatcttaaatcaaatttgtgaaactcaagtatacatattgggtaagttaagttaggggggcatttaaataaaaacctaatgtgaacaattcacaattcacaattcacaatccaatggtcaatatctgcaacttaattttcaaaattgtattaatgggtccagaaaattttccatctttttccctttaaccgcattttctcaggaaccaaacagagtggacagaaagtacattggcccaaaaaagaccgataaaaagacaatggatcttatctaaagcagcagaaatgaataataaataatccaaaaaagaattaaaagtagtaagcttaccgacattaaatcaaacccgatagattatccacaacaatgaagaatgaaatgagagaagaatggaaatgggtttaagatttagatctaaagatttgttctttggagtagaaaatgggaaaattggaggtgaaaagaaaagggtctttctaagttttgcattgaaaagaaaaaggagagaagatatgagaattttgtctgaatgtatgtgattgattaatgaataattaataataataattagcgggaatattggcggttgggcgttgattatagggtagccaatgtcctttacttttctaattgtaataagacgcgttctttttttttttttttttt

SEQ ID NO: 14369 - DNA, 4853 bp, Cannabis sativa
  modified_base (265)..(269): a, c, t, g, unknown or other
atttatttatttttttcaaaaatttcttatagattattgcaaccagataaaataaaaaattaaattatttgatatttaactatagtcctgtgaaaacaataccctacttctactattattacttgtaagtacacttgcacattagaatttccacaaccgaacactatactaaaccactcacttgtttaaaactcaataacttgactaaacactcatgggcaaccctctttcatgaacaacactatttttcttttcttttcttttnnnnntttttttttttttttgaatgttttcctttaatcagtttaccatattatatttatttctcactttgtaaattgggtggagctacttctacaactatgttgtcacttatgtggcataaaaagagtgcacactggtagccataaagggtcaggattatgcccaggaaggtagccacactggtagctctctcccatttttcataagaaaaagaagtaaaacaacaaaagcaagtgaagaaaaagagcaaatttgacgtaaagcaaaaagcttatcctaaggtctgcagcacctcacacaatagaggttttaaatatttgtaatgggcaatagttggaccagcaaacatctatgaggatatcaaaacccaccaaatcatatgtcccccccttcgtacattctttcaatttgtgttctattgggttcacttacaccaaggcttaaatgcattcaacttaatctgcatccatttcttccaaagccgctttagccgctgatttcgcctcttctaaaagatcttctggaacctgaaacaacacaaaattcaatgttgattacccaagttacaaataaataaatatcaaccaatgttgaatcgcacatatttatgtttgattcccgaccgagaaaaacagatcagaataagatgttttagagcctcaaatacatgaagatcacacatttggtttaacaagacagaatgtgactagactattaatggatgaattgcttatatcttcattgtaaaccttgatttctttgttcaaatgagacatattacataatttgactgagagtatcaaatgcaagatgaattattaagtaaaataatctattgaatataaaatacatcaactcttagaagtaataaaattccttgattgataaattttatataaattaatgatatgaaatgggaaaaacaaaaactaaatgtagatgaagaaataagtcagcaaaaaataacaatgatgtaataagataaaataaaaaatgagttaccttctgatgttgtcggtttgattcttcacagacccagctcatttctagttcaaagcccttgtctttggcctcgtcatgtattccataaatactgctcagcatgaaaaagatgtcatcactaccgatagtcgaaataaaacaccttattctatattcacttcatgtcgcataactaggacataacatatccaaatatcatacaacacaaacaaactaaccttagaggacacaaaatgaaaatagaagcacaaagtatgcaaagttaaaagtttagatatgaatctgctcttctaattcaacagctttattattgcagcttttctaattttcaaaagcattcacgaatctccaataattaaagcaaggagaactatggtagaaccgttcaaatgtcaaagctgaagatgctaaatatcccaacaaaaatatatttacttaatcggaacttaaagtattcattcttgcaaatgtactacttccttatctatcaccatttcacatgaatcaaatttctacacaaacatcagtgtttcacagcatttacaacgccaataacgattctatagtacacatttgacacacaaaaacacgaactgcagtaaagagtattcaaccttaagaaaacatttcaaatgcataaagattggcactcacattttcgctacttcaacaatcccttgtcgacaagtcatttcagaaagattcaacttttcaatctctctgccacatgaaaaaagagaaaaataataaccaacataagtttacattgatgaaaacattcaacataagaaatatgtttcttataaaataagaacatcaagaatatgtccacaccaaatgtattaacagatggtacaatacatcaacaaaaacaatttactaaacaatgatcctatatagcagggcatataaagagcaattatgttgtcaaatgctcatcattcaaatatttttttgaactttgaatgacaatcactcaaaaaaaaaaaactaaggaaaataaccaatgaataaatagataattcataaacaaatatgctccgttttgcagtaaacaaagggaaattattaatctttgacaagaaaaacagtagcattatgtattaagacgcacgtgtttctttttctgcctcttatgcaaaaatggaacacagaagaaaatagccttgtatagcatttgatttacatttgcttttggcaacagaggaagttcagaaaaatggatttgaattctgactaagtatgaaatattgtagctgctaattagtgttatacacatttgagatttgtaaaagtaagaaaaaaatatatggactgccacacacatcacatgaaagaaagacaaagttgtattgtttatatcattcttaagaagtctattacatctaacattgaaaaactttcaaaacagcatatgtcagtttaagaacaatccccatgttgccatatgcaatgatagacctataacagaaaagagcactacaaagatacatctgcagaaatttgcatttctgaacgaagttgcatcttagaatttccatgagttgaagtatggagagcataagaattaagaactttatgactagggactagatgatcaaattttgcaacctaatgctgtgggctaaaatagaagagtctgcaagcaaaaatcttacgttttagcagcctgcctgcccttcccaatcgcagctccaaagtacctctgaaaaagattccaaaaccaatttatttgagaacacacaacaaaacatcaaaataatagaaaaagagtataccactagcctcaataacagcaaaacatcaaaaataaactcacataagaaactccagatggttcaatcatgtataattgaggtccatctctgtcatagccaccaaggattattccacacccaaaaggtctgtagcaaaataaaaacactcagaatacaaaaggtgggctgagttgacaacactatttaatgagtcattatcaacttataatctaacctgagccaccaatatagtgtacaaagatgcacatagctggcaacacgttcagccagttccttaacagggatggcctcaccatacaaactgcaaaagtagccaatcaacggtcatggcaaaggaaaaatcataaacagcaatagctaaacatctacttcaattccgttaactttcttcacattcaaagccaagctaatgaactgtttccattcattcagtttgcttcagacaccaattgaatcaaattataaatggcccctttagaagaaaagcaccaaccgaacacaaatctaatgatatttaaatcagaataacttacctttcttaacctagcccaaaactgattaaccaaaaaaaaggaaaaagctttgaaaaaaaaaatacacatatatatcattttgatctttaacttgtacttgtaagtgcatattttcctagtaaaaattgatctttcaactgttcttcattttgacaggaactgaactacttccattcattcattttgctcagacaccaaatgcatccaactgcatagtgctttgcaaagaaaaacaccgaccaaacacaacatccagtaattttaaactcagataaacttatatatgataacctagcccttaacttattaacccatgaaagggggaaaaaatgttcgtttgatttttaaaatgtaattcatactttttactgtagaaattcagcttttctaaatgcactgtcttcacaaatactcataatcacgaaaatctttagaacaaaacaaacctttcatagttagtagcttcagacttggcccgggcaacaatttgcctgccatcagctgctaagcctgcaacagcctatagttgaaaaaccattattagcaaatgacttattaagcagaactttatttttagtagtaatctttagaaaatgatgaagcacttttccaagatcatacaaacatacacaaacatttataaaattaaagaaacaatcaatatctgattttgaagcagagaaaagagatggtaccatgccagagtgtcgatgaaccgaatgtattcttctattggaaccaggcaacatcatttttgacgctacgagcttctccacaccctaaatttccaaaaaaaaaaaaaaaaaaatccaagtttccgtaactcaagcttccaattttttttacaaaatggaatataaatcaaaaaaacaacggaattataccataacgacgccatctttgcatttgattccaataacagtcctgcaaaaacaccgtttttaattttcagatttcccaaatcgaagaaaagaaatcaaaaatgaaaaacctaaaaagtaatacaacaaaacaacgattctcgtcctcgcattttctcgggaaccaaacaaaagagaaaaagaaagagaggaacatacccactgttgtcaacagctttggcggcgtactcgatctgaaaaacgcggccatcaggagagaatgtagtgacggaaagatcgtaacctgtgcctatgctgctcatgtttaccgtttggattggtgagttaagtcggtcgagtttgttggattgaagaagaggttgaaatagaggaagagaaagctgaagcagcaactc

SEQ ID NO: 14370 - DNA, 9365 bp, Cannabis sativa
aatacaatacgacctaatattccaaacgagcccatagtgtttatcattatacacttgatagaaggttaaattttttaattatcaatcaactagaatggttaatattcacagaatttcccattgaaaaatggaaatgttgcaggaaagaaccataatagttgagagtgccattgaaaatattgttcgatcacttggacgtcgtcctgaggaacggaaattagcagtagcattgctattggaattatctaaatgcaattcagcaagagaatgcattggaaaggttcaaggttgcatactcctactagtgaccatgtcaaatggcgatgataatcaatctgctagagacgcagaggagctactggcaattctatcattctgtgatcagaatgtcattcaaatggcaaaggctaattatttcaaacactttcttgatcgtctttctacaggttcatatatgttttcatgttatcttggcaggctacccagtgcttattgatgaagcaatttttttttttaaaatgacctataaatatttgtatcgcaggacctgaagatgtgaaaaagaaaatggcaatgaatttggcagagatggaattgactgagcacaataaagagtctctgtttgaaggaggagtgctacatcctcttcttggcttggtcttgcatgatgacattgatatgaaaagggtggctattagggctcttcgaaacctctcaagcttaccaaaaaatggtttacagatgatcagagaacatgcagagcgacctttacttggccttctttttagtcgcaacatgtcacactcaagtttacaagaacttatagcagccaccattatgaatctagctacctcaactgtgtctcaagactctaatcagccacctgtttcattcttggaatctgatgaagatatttccacactcttctctttagttagcttcacaggacctaatgtccagatagacattatcaggaccttccacattctgtgtcaatcccgctcatccacaaatattaaagccaaattaatagaggtatctattctctagaaactatgatccgattgctgtgtttttagaaattccaccatactttgagtgcttataagatggtttggattgattttatttaagtttaatttttctgtgcatcactgaattattttcataattaaaaggtgcataaaaggcatgactcattattagtttgtattattattgatcaatttttccgaagagttgttcctgaaaatcttgaactacatgattcttaatgcgttctaacttttttctaaaaaaaaaaaacctttaatatataaatgatacagagagagaagagagaagatttgtgtgactaccttttctcttgttaactatttgtgtcaacttcctgtatagcttgttttcaaatattaactggtttatcaacatttgcagttctcagctttgccagtgttggtccaactgtgtgagaataataacctaaagttacgagcaaactccatcaacctgttctgttgcttggcagacggcgtagatgaagctattatcttggagcatgtaaatcagaaattcatagagactgtaatacagatcatcaaatcttcggatgacaatgatgagattgcatcagcaataggcattatctctacccttccggaaatccctgggatcaatcaatggatttttgatgcaggagcacttccactcatcatccgcaaactcaaaaatggccagcagaatggtccattcaagaaccagttgatagagaatgctgttggagccatttgccgtttcactgtttcaacaaggttggaatggcaacagcgaacagctgaagctggcattattactgaattggtgcacttgcttgagtctggaactggattgaccaaacagcgtgcagctatagctctttctcgtttttcagagagttcgtcaaggctaagcaggccattaccaaagagtaaagggatctggtgctttgcacctcctcctgaaactggatgtcccgttcatagagggatctgtggtgttgtgtcaacattctgccttgtggaggctgatgcagttattccacttgtgaggatactttcggaacctgatcctggagcttgtgaggcttctttagatgcacttttaactttaattgaaggtgaaaaactccaaaatggtagtaaggtgcttgacaatttaaatgccatacaacccattataaaacttcttagctccccttctcctagattgcaggagaagactctaagcgctctggaaaggatattccggcaaatagagttcaaacaaaagtatggtggctttgctcagatgcctttagttgacttaactcagcgcggaaatggtagtgtcaaatcactagcagcaagaatacttgctcatctgaatgtgcttcatgatcaatcttcatatttctgaaggaaacttgttgcttctggtcaattacaaagctcattttgatgctttggctccataagattcttcgggaaaaagaccaaaaaaaaaaagaaacagatgctgaaggaagcacatttcaagggggaagaagcccttgcatttcccaaagaaggcagatcatatctctcttattcatttgtaaaaaagaaagaaaatttagattactttccttcttcctgagtttaccaacctgtctgatttgagagcatgtagtttggttactctcctaggaatcaaaagtgatctaattcaatttgttaaagctggctgtatagataattatgatgagaccgttattggacaggaaggaaacatataatgtagctcatattaaatgctacagatgtgttctaaagcttcattgatttgatgatgttaatgctaaagaaagtagaagcaacactggtggactggttgccaagcttagcttcttcactttctttgacagaatacaattctttgacaaggtagatcctgttcttctggatttgagaagagggagttcaagctttgactacagggtcttttgtgttgaatttattaagcattttattccaagtttatgttgtttttagttaattagttagttattgtttttttgtgtagtaatgtgaatgtatatttgattataataatttctcttgtaaaatttctatcttcttccactaagcttgtaatgcccttctttcaataacaaaaatacttttgcatctctgtggaaattttttaaaactcttatgcaggcagatgtcatgtttcatggaagttcgtatttgtctggtgtttactaagtaatttccatttacttatttacacagtaatacatttgtgataacggagtcacggaccttgttctttttcaaaaattaaaaaaaaaaaaaatggtgtaataacattaaggtgtgttcaaaaaagatatacaacctttgttcaaaatatatatatatacacaaatttgatgggtttttatgctttttaagtaaaaatatatattttacaagaaaattgaacaaaaaaattaaaaaaaaatatgtaaaaaatcaagtaaaagtaaccgaatactaatcactaatcaattactataaggagataacagtgccttgtgttattcttttttaatattttttacttttctttaataaaattcaataaaatattttttttgaaagaaatatatatttttacaaatttattctttaaaaatcataaaaaggaatttttttttttttttaaaaaaaaagctaatatttgcagaaataatagtagtgtctaaaaaaggaaaagaacccgttttatctttatcagctacactatttacaagtaaagctggttaagaaaaaaaaaatccataaagttgttcactatttcacctattatgtaaagaaaaatgaggtgagaaaggttggcacgtaattatatgatattttgactttgactattaaagtaaaggttgtgttgtgtgggatttgcatgtaaatagtatagtagtactagattacgactcactcactcaccgctcacgaccaccaactgaccaagagacaagagtagtccgcaactcccaacagcgactgcacagtaatggttcatcaatggaacgagttcttgaaacgatggttcatgtcgttttcgtattcgagaaattttggactctctcttcttttctaaacttatgattacaatatacgacttgtgttgttgttgttgttatgaaccaccttaagcagattcatgcttacacccttagaaatggcatagactacaccaacaatctcatactgaagctgcttgaaatcccagatattccatatgcccataaactgttcgaccttattcctaagccaacagtctttctctacaacaagctcatgaaggcctactcttctcatggtcaacacagccagtgcttgtctctctacagccgcatgtgcttccttccaaatgaacattctttcaccttgttgttctcggcctgcgcttccctttcgtcccatcacttaggggagatgattcattcccgtttcgtcaaatcggtgttttccttagacgtgtttgctgaaacggctttgcttgacatgtatgccaaaatgggaatgatggcttctgctcgccaacaatttgatgaaatgagagttagagaaatagttacatggaatgttatgatagcaggctatgctaggtccggagacatggaaagagcagtggacttgtttggcttgatgcctgaaaggaatgtggtttcttggacgacgatgatatctgggtactcgcaaaatggtcagtatgccaaggcgttggagatgtttatgcatatggaaaaagataaagatgcaaagccgaatgaagtcactatagctagtgttcttccagcttgtgctaatcttggtgcacttaatattggagagaagattgaagagtatgcaagaagaagaggcttcttcaaggatttgcatgtaactaatggtatactggaaatgtatgcaaggtgtggtaaaattgatatagctaagcaagtgttcgatgagattgggagcaggagaaacttgtgctcttggaactcaatgatcatggctttggcagtccatggaaaatgcacagaagctttgattcttttcgaaaaaatgctggtaagaagtcaagtattttccttcatgaatgttaactcattgcaattgatttctaattggttagtatcttgtttatctggctggaaacaggctgtagaaattagacctgatgatgttacatttgtgggacttatattgtcatgtactcatggcggaatggttaccaaaggccgccaaatcttccaatcaatggagccaaactttggtattgctcctaaattggaacactatggatgcatggttgatcttctaggcagagctggtgaattggaagaagcttatgaactgatacaagaaatgccaatgaaacctgacaatgtcatatggggtgctcttttgggagcttgcagttttcatggtaatgtcaaatttgccgaaagagcagcagagtccctcttccggcttgagccatggaatccagcaaactatgtcattctttccaacatatatgcatctgcaggcgaatgggacggtgttgctaggctgaggaaggtgatgaagggaggcaaaattagcaaggcagcagggtatagtttcattgaagagagaggtcaacttcaaaaattcattgtggccgataagtcacatcctagaaatgatgaaatatatgctttgttggatgatttctatgatgaagtgaagctttatagagacgtaaattatttcttaactaaacttgaagaaatacaattttgaataaaccaaaatgtgtctttctttccccctttttttcaattcaaaaagaaaaaaaaaacaaaacaattataataatatagcaagaatcccattacacaattaattggtcccctgtttcatggaccaatttttaaactaaagtgaaaaagttctcagctgtaatatcaaatatggacatacaagactttttgaaaagaaaatgtaaagggagacatacaacgttaaagtgaatattcaaactttgaaaataaatcataattgttgatatacgggctttaaaagatgtatattctaccatcattgaaaatagtgaaaaaacaaatttacgagcttgaaaagctcaatgttatcaatcttcaattcttcaccatcaaaatcaaatacagtgaaaaagaaaaatgaacgttggaagtgaaacgacaacaataggacaaaaagagtatgacaaaatcataatacacagaaataattctcttgtaattatagcttcattaggagtcagcctctttcttattacaaaaaaaaaaaaaaagaaaaatgaaacttatagttaggaaaagatcagtaaacaggtgattcctaatatttcatttgtatttcttaaaggaacatatagatcttgtgcatttcctttcaatataggacaaatgtagttcgtgaagaacaataaaactatcaaagaatattaagtaggaactaacaacctgatttttaataatgcatcaccaaaaattgtttttaaaaaagtccattttatgtcaaaggcctgatttttttctttcctcatgctatcttctccttctttcgcttccttcgactccttccaacaaatttgagtacttcatcgattagtatcaccggtgcagacatcaaaatgaccagaaaccactcatttgagttgagtggaacaattccaaagacatttgctagaaaaggaacatagagtatgaggcaatggagtccaaatgacactgtcatggccaccaaaagccaagggttcctccaaggaggcattctgattaagctgatatcttccgaaagggcattcagggagttgaacatctcaattgccaccaggacagacaacgacaatgtcatcgcctttactttcccaacagaaaaataatcacaaggatctgaaaatgtgatcatttgacccccagccacactatatggagcagctgtgaagtttgaccatgaagcacactcaccccaattgcgaagctgagataactcaaccagtgtatgtccatcactagcaagattgatacccaaaaaggatgcctgagtgtaccacaagataaagacaccaactgtggcaatgcctacatatgagccaataacctgccatggtggaaggtaagagagccatttaagagaatgaagcataaaaacatgtctgcttagcattattgaactaaaaagtttttaagtgtttttatccaactaaccaagtaacggaaaagaacccaagtatttatgagagcatcattgcttttcctgggtggttttcgcataatgtcagcatcagcagggttaaagcccagagctgttgcagggggaccatcagtaaccagattcacccaaagaagctgcactggtatcatacattcaggtattcccaatgctgcagtcaagaatatggatataacctctccaacatttgacgatatcatgtacctgaaaattgacaatatgaacagaactatataagttgctcaccaatgagatatttcatataagaaagggtatatatgcagagctaagagtgttttacctaataaaagctttcatgttactataaatggaacgaccctcagcaatagctgagacaatggtactgaagttatcatctgctaaaaccatatctgaagcttcttttgcaacctgagaatatgcaatgtataagacattttatcaaataacagtctttatcttattatgaaggagtgattggctagattacctcagttccagtaattcccatggctattccaatatcagctagcttaagtgccggggcatcattgacaccatctcctgtcattgcaacaatctcacccatctccttcaaaatcctaacgatttcttgcttatgccttggctcagcacgagagaagacttttcctcctggtttcgataatatctcaacttgttctgaaggtgaaagagccatgaactctttaccaacaaaacttctcccccttagatcctcacctttcgaaaacaatgagatttccttacaaatggcctcagctgtggacttattatctccagttatgaccataaccataatcccagcttctttacaatcctcaattgctttgtgaacttcctcacgagtagggtcctgtccaaagtagtcgttaaaaaacattttcaaataggagcctaactcaaaacacaatagcataataagattatgtatactcactctcagaccaacaatccctacaaaaactaagtcactttcaatgctggaatagttagctggatcaagcaacagtttgtgagcaggatgactgtcagagtaataatctgaaagctctccaagtccgtccttatacgccaggcccaagcaacgtaatcccttggagctcatctctgaaagtttcataagcaaagattgcctgcatggctcatctattggtataagggatccatcagcaagttgaacatgtgaggttcgctccagcaaactctcaacagcaccctgcagataaaagaatcaaacagaaaataaataaataaactatgataatttgacaaaccagaagcctaatctaagttgaatacatatagttgtaaatgatcaatctgtttgtttttaaggcggttcattggttgttcaagtaaaaaatcttgttttttgaagtgactttgataggcttaagctctcaatgcttcaaattgtgttacctctcagttgtaaggctttcttttgtccaatttaacaaactgttgcttttctttttaagtacctaaaacattagtttgtacttctcaatctatagtgattaaattagcttttaaccaaaaaagaagaagaggcctaatccaagttaaacagcacttgtaacatcagtcaccttgacaagaagtcggttatgtccattaggctcccgggcaataacactcattgacttcctaacacgatcaaactccaaagtagcaaccttttttgatctctttgtccaccactcacaacaacctgagctcagtataacaataatgaccaatgaattaaaactctagactactacaaacacataataaatatagaaactaagctctatactcacccagtttgactgtgctattatcaatcaaatagcttgcagcaagctgagtttcacgaatcttgttcctagctttgctatctggaactcccatcttctcaaccaaaaccttaagagctgcttcagtgggcaacccagtagccctgtaaaggttcccatcaaagtaaatcccagcatcattacaaacagcacatatttcagcaatggattgcaaattaggatccatattgtagcatgtccaatcaactatcccaccatctttgggatcata

SEQ ID NO: 14371 - DNA, 7224 bp, Cannabis sativa
aactaattttatgaatattattgtgtaaaatgagcaatggccgtgtaatatttttttttttttaatttttgaagaaagatgtcaataaatattcttaagtcatctacaatgcaaataaagattagcgttgcttgttattatgacccattttccgtttttaatataatttaacaataaagtatctaataaaattaaaaataaaaaaaataaaaaataagagagcaccgctgctgagtacgactctagtgctaatatttgtttttgttgttgaaaagtcaaatacttttgcgtagaaaaatctcatttactcataggcatctacaatagcaattgcattaaagatgcccttagtgatgacatcctttgtgtaaatggacaactatacacacaaaaggagataagatctgattggcctcattaaaaagtttttagaggaagagattgcattaagagctttcgtatgatgattgtatatttttttttctctttttcttcatttatatgttttcattggtagagatatttaattaattcgatatgaattatcgtcgtaaaaggggttcaaaacttcaaatcaaccagaaagaaaaagaaacaaaacttagagataaatcccacaatgtttgaaaggaccgctttgaattgaaaagacaaaggatttattatgcgcatgcttataatagttaagttctttaatctcgtcttccatatatatgtactgaagtctgaagtgtataatgtatttgtttatataaatagatataaagttaatatctagaccatatgcaatgctgatcatggcattgtatagtattagtagggtagtatatatagcttatgcattacctaccacgtacggctatatatagactgtagttaatagtccttttcattgagcatgattatttgaatattcaatgtatacaatacaaacacatgtattcaccaccaacctctcatcaatccatttaattcgaactaaaaaatcgactttgaagtcaagatattaaatgaatagataataatgaattaagtggtgttacaataattattaattatgacttagtagtctctgattgatcacgcacgcccaccaatctttttaagtcacggatcgatgcaacaccaacaacctagctagctagctacctgcgttaatttatgaatatttaattaagattttattattaattatgccacatttttccactgttgagtagaaacgtgaaacatcactttgagagcatggaaacattaaatttagtattacattagcattaaatttaaatttaaaaaatattttgactctaattacaacactaaaaattacattaaaaaaatatatttttattatattaattttttaataaaataaaaaaataatatcatattaattaacaatgtatccctctaaataaaagagttacgcgacagaaaatttgaatttaattttcggcgtgttaaatttttcaaaattttaaaggatgtacacacgcgaccataaaaaaaaaaattaaacaagtctcccgaatgccgaaacaggtaggagtatatcatgtgcgccacttttaaagaagtgcattatttttcggcgtattaaatttttaaaatttttcaaaatcttacaagatgtcttaaataattataatatatactactgtataaaaaaatagactaaaaagtatgtcgggtgtcgaaacaaataaaaatagattcgtacatcacttttaaaaatgtgcattgtaaaattttcttaaaataattattgattttactaatacaataatataaatattaattaaattaaaaaaaaaattatgcagtgactacagtgcacgacatatatatgtcgtgcactgtagataaaaccacaaaatgcgacaagaaatacagcttttttagacagcacatgtacgatatttaacatatatgcaataattttatagtagttagtttatatatgaaattaatataaaatataaaatatttaatattaaattacaacaatagtaattatataacaccaattaaaaggtactatatcactactagcttttagcatttctagtctcaaaacaaagctttcttgcctgattaattaatattggagtcctatatattactaaatttcaatatcaagatatagtacaggacatcatatcttgacagtgccaatacctcagatatttttaaagcctacaaaatagaccatcccctcttgatgataatgaatatcgaccatgaacatatattattgacctacatatatatttcttttaatttttatatatataaattatcactacttaggagtttgatctgatctcaatctcatcattggtttattactaggatctccatcttaattattgtacaatcgaatctacttgtgttgtccaacaaagacattgaattctatgtaactcgtgttctgaaaagacatttaactgattggtacagatagtactagctagagcacatcattttccccggcttaattttttttactgtgtaacacttaatatggacctgctcatccttatcttattaaatatatgatcaggccacccttatactcaatctgtatagtttacttttttttcttttctctttttaatgtaaaagatgtttaaaaaaatgaacagttaattatatagttcgatttttaaataatgaatattaatttatgtttataggactcttaatttaaagagtcttgttggccaaacttcagggagtcttctacttttcttgtatgacaaaacttctagctagggtagtaccaatttaattttacatttctataaatatatgcattttgtaacagaaagagagtataattattaattaagaattttgaagagaaagtgaaagtgaatgtatatttgaaaggtgtgtattggaatatgagtagaaagattggaaaactttgagtaaattaagtttttaattattagcaaaataataaatatgttttaatttatggttttcataattttactaaatcaagtcatttttattttttataaaagaaaaagaaatattgtacgttatccatgttttcgaaaggataacacgtggaattcttgagtaaagaatggcctattagggcctcgcaaggagtcccgctaggaaagcaggcccaacccacttggaagggcaggtcgaagcccatgcaaatggatgggtaccttcgagacatgactcatccagatcaggaaagacctcccgccttcacaaggagaagttatcaaagcccctccggatacacatttgggatacatccaaagaagacattctggaggcgcctcaaaaccttatatagtacaagatgatgtggcagcccttggataccagatcccacagaataaagggtttatccctatgtcagagcctaagagtgattgcaccaccaaaaggtagccacccttttgtccaatgacacaattttgatactatagtacataaaaccgacgcacgtaggacatttgttaaggaatgcgtggccccagatgtacggatcgcctctgtcccacgagctgggcttcagctagtaggcccctagtcatgtattcattgtatttacctcattaattagtgggccaattttcatgcaaaccctagagggtcacgaaaatatccagacccatattcctatatagcctataaatactactttataccctcatacaaatggttaaaaaatcatcatagaaaacaatcactactacaaaatagtttttcccgacgtttttaaatagtcatttaaagtattcctgtcggtttctataatcgtcgcctatacgactgttgcaaaatgggcaaaataggcgacagttaaaaaccgttgctaatgtggacttctcgatggtttaaaaccgtcgactataccctgttaatgggcaaaatgggcttgctgcatgcccaaatgataataagtcaatagctggctaagatgtttatctgggtgaatttttgatttcttggcaatctaagcagcaaattgtggtggcaagatcgagtacagaatcagaatatataaccttagcttaattagacgctgagattgcattgttgcaagctttactaagagagatgaaacttacaatgattgttgttcttatgatttggggtaataactaaagtacgagtgctttggtagctaatccagactaccatcctcggacttagcatatagaattggctgtccattttgtgagaaacaaagttcttgctaaagaactagagattggacacgtgccttccgatgaccatattgttgatagcttgacaaagagtcttacttcaactcgttgtcattttctcatcatcatcaaatataacgtgacagagttaccattgagtttgaggggtgtggtgttagagaaaattcaaaattgacacacgcagaggagagttcggactgaatgaagcaaaccaatgtatattcactttacctaatttcagttcttcagtatggaatttgtaatgattggtttaatacatgtattgttgttattggtccttgatcatttcctttgcactgatattctcaatatataatgaaaggccactcagtctattgagctaataagttttcttctcactaaaatatcttaaaatcaaacttaactggtaatcttattaaatgtggctcttataaaatctgtaacaaatacgaatatggtcatcaaaatgcagatgtactgggccatgatgagttagctaggttatcgtgggccatggcctagtatctaagatcggagctggaaatggtcactaccaatagtaccatgcatgggtcgtattattattattattattattattattatagggtataattatttcttaatttttgtgtccacacaccatgttgtcccacgaccaggttcgtgtactaccactgtttaatttccagtatccatgataaggttagaaaataatttcacggattcacagggattctataccacatttcaaaacatgaaaatgagacaaataaagaaaataatatgaaaaagtgatgtataaacccttgaagggtcaaatcagtatgtacgtaccgcgtttttatttatttcctaatattatacaattatttaatttcatctagattaatcataatatagtgaatccacattagttactacttaattaatttatgtaattgtcacgctttcaattgtaacctttcatttgattttatacattcaaatacatactttttctatgcaacatgaatttaaagtgagagagagtgtaattttttttaaaggagagtagtaaaagtaaattaatatttaaaaaataaaaaaaaaacatttctggttagatttgaattctaacatctattcatatcgtgtctataaatatattttttattataaatatatgtcgtaactaattaaaatacatgtttatcttttttctgattttcttgacatcctttgcttctagatccgcctctatcatgatatatcactttactctaactataaactaaatttagttgatgaaaagatataaaaattattattttcttcagatgtcatctctccctctggtcagtatggattcccctcctgtccaacttttttttttcttctcccttctcaatcatataggttggcagcattgctaattgctccattattgttgtgatttaattaatactgatgttgactctaattggctgacatttttattttaattgtattcttctttaatttctttgtgatgaatatgatcgactgacttatattttactaataaaatactatcaaagttgaggtttacaaaaggattcatactattttccattcagtattttacaaaaattatttattagattctatatattaattgttaaatgataatttaattttgtattttctaaaatgtataaaattgtatcgtgagtttaaattttaactaatttattttaatgtaatcaatttaaaaataatattttacatgaacaaatgaataaattttatcataataattttaaattgagttattattaaattttatattaacaaaaaattaattgatagtattattttgtatgatttaagaaaatataatttaatttattatttaacaaaataaaaaatttaatcggtaatttttgcaaaatacacaaatcaattattaattttaagtaatttttgcaaactaaaactaaaacagtacgtagggtttacacacatatttaaatgataatcctttctaataatgaattaattaatttcatgtaaataataaatatatatatattcacatatgataagatggaataaaaaaaaagtatctaagatatatagagattactaaaacgtgaagatttttttaaatttttttataaagaaacgtgaaaaaattaagccatatataactaatgaggcaatggcaacgtgtacgtcctagctggcgttgagatcgactcgatcggctatatcaaattaactagtaattttcagtcattctagaatgcagttgtagtcttgcgcggcccaaccaataatggtatgacgcgtgtccaaattggctgccctttcatgcacgatgcttaattaatttatatatttatataaataataatgatatttgatgttgaataattatgagtagatgatgacgagagacaggacgattccatttatggaccaaagtgataatagccgatcagtactgtttaactggaggctcttttttaaacacgttcacttttctgtgactttaacttcatactcaattgttttctctctcatctctctatatatcttcatctctatcatgtataataccccacattttctttctcatgtactcagtcatcaccttataatttcttagtcataatgatttgtgtgtgtcgatcgacaatacggattactaaaaatatatattatttttttatatatatatttttctttaataatgtatagttggtcgacttcaatgttttttaaatatttatataagctcggtttagtgggtcatttattcaaagtactttatggatatattgaggaatatgtggaggataatgagctgagcaatgttttagtgtttatttatagagagacttgatgatcatgagcaaacgaatatctttccataaatgtctaaaatcctgtaaattatttataaatctgagataatttaataagtatgatgggaaagattaaggttaatgtcgatggtgcaatctttgca

SEQ ID NO: 14372 - DNA, 12546 bp, Cannabis sativa
acacaatcacgttatccacattatacttgaaaatgaaatccatcatccaaactcgtcaattattgagttttatacaatattatattaacttatcaaatgccatgatccgcggggaaagaaattatatgcgaatgtgaacgcaaagaaaaaatttacacaaaattcaaactagtaggtacgtaaaagtgccttgtatttattattcaaagatgaactcttatgaaaaaccaaacacatatctttctatattcttctgatcaaacattgaactctctattatactccatgagcagttcagtcccttgtgttgtcctgctttatgtacttctgcttttcttgagacaaaattatggaattggatctccaaaaacaaggtgcaatgaagctgagagacaagcgttgctaaggattaaagaccagctttatgtttattcatttagaactgagagtgacacagaagttggcattgatctactttcgtcttggggagaagaagaagaaaaaagagaatgctgtgaatggattggaattggctgcagcaacaactccggtcatgtcatcaaacttgacctttctccttcaactttgtcttttcaaacatatgattatgttttaagaggtaaagtcagctcctcattgtttgacttaaagtacctgaatcatttggacttgagtaatgtcgaatttgcgggcgagtatttcccaactttcattggtggtctcaccaaattaaggtacctcaatctctcttccactgcactaactggagatattcctcctcagcttggaaacctttctagcttgcagtttcttgatcttagtactaataatttagaatcgaaaaacttgaattgggttttacatctttcttccttacgagtacttgacctgagtggcacaaacatgagcttagttaatgattgggtgcatgtagttgattatctttctcatttcataacaaatttggtactaagttcttgtgaacttcctgatattgtttcaccttcatttgctaactcttcaaaagctcttagagtccttgatctttctataaatgaccaactctctgagtctatattccaatggttgttcaactataagagtagccttgttcatcttgacctctctggttgcggattaccaggttccattccaagtggttttaaaaatatggctgccctgacctatcttgatctcagctggaatgactttgaaggaatcattccagaatcttttggggatatggtttctcttacatatcttgatctcgcacaaaatcaattaaagggttttaatccacactctttcaagaacacaactgccattgcataccttgatcttagctacaatcaactaaaaggttcaattcctgagtcctttggaagtatgattgcccttacatatcttgatcttcatggtaaccaattaaattttctcaatccaaaatcttttgagaatatgactgccattaaatatcttaatctcgaaagcaatcatctaaaaggatccataccagaaaactttggaaatatgcagtctcttgctcaggttaatcttagcaataacgagctcgaaggccaaattccaaaatccatttggaagatatgtgaactagtgaggtttgaagcatacaacaatagccttgggggagagctccatttctcagaatcatcttccaacaactcatgtgccaatttccccatggagtatttggacttgaagcaaaacagaatcatgggatcattgcctaatttcacactatatccctctttagttgagttacatctttcctcaaacctgttcagtggaatatcccaaagtataggccaattatcaaagttggagattatggatttttctgagaacaaaatcgaaggtgtcttatccgaagctcatttttcaaaactcttcaacttaaacactttggatttatcaagtaactcggatatagttttgagagttgatcctcattggattccaccctttcagttgcagtatatacatcttgaatcttgcaaattgggtcctcattttccaaaatggctccagacacagaagaattattatgaacttaatatctccaattgtggaatttcagattatactccagattggttatggaacttcaggtcagacttaagtcttctggatttgtctaataatcaaattagaggaagactttatgatattaaacagagtgtcaatttttcctatgaatacagaagaagataccctgatgtagatttgagttcaaatcagttagaaggctcagtaccaagctttttactccaagtgactgcttcactaaatcttttcaacaatagattttcacagctaaattccatatgtgaggccatagagttaattcctttgatctttcttgacgtctcatataaccagttgtccggcgagatacctgattgttggtcacaagcacgctccctgcgaattctcgttttggcaaataacaagttatctggaaagattccaatttccattggcttcttagtttccatcaatgtgttgcacttgagaaacaacaatttaacagcagaattgccttcatcattgaagaactgtacccagttggttatatttgatgttggagggaataaattgtctggagaaataccaacatggataggaacaagcctaacaggccttcttattctcagtacacgttctaatagcttcaatggaagtatacccttacaactatgtcacttagtggatcttcaattcttagacttgtcttcaaatgatatgtctagccgaattcccaactgtcttagtaacattacagctatgaaagaactaaatcgaatcgaagaagcatcatacggtgcagatccttattctgaaactcgtgggcaacaaggtgttccagatgattttaaccgtgaaaagttagtgttgatgtggaaaggaactatctctgaattcaaaaatgttggactattgaagagcatcgatttgtcgagcaacaaacttattggggagattcctaaagacatatctaaacttgttggattgattgccttaaacttgtcaaaaaacaatctaagtggacatatccctcaagagattggtcaattgaagtctttggatgtacttgatttatcaaagaatcactttcttggccacataccttcaactctcactcaagtggatcgtctgggtgtattggacttgtcaaataacaatttgtcaggagaaattccaagaagcactcaactccaatcccgtgatgcagcttcatacatgggaaatcctctactttgtggagttccacttccaataaaatgtccaaatggaaaagtggtaactacatctgatgaagctatagagaatcatggcgacgatgggtttattagcaaaggattttacataagcttagcacttggatttgtagttggattttgggtattttgtgggactttaatcttcaacaagtcttggagatgtgtatatttgaagctcttgaacaatgttggggactgggcatacgtaacttcagaagttgggaagaaaaagttactacagatgttcagaagctaaattggtaatcctctctctttctctcatgttttggatgtatttattatttatgtacactgctattacatacgttatatttcatttttttcataactataattgttgtaacttgtaaattttgatcattttgattttgcagggggagctttcagtttcaaaggatgcagtgcgctgggaatatttcttcaccaaataatttgtaatatgctagtaacttatgttttcatttataataatgactccaactagttattattcatgttttcaaattttaaaactttctacttgtaaattattccaagtgatgcaaattcctaaaacttactaattgttgcacgagcataaaatttccttgcaatatacaaacaaaatagagaataatctgcactaatagcagataaactatcatccccaaattgaataattattatcattatcgttatcgttatcattatcattatcattatttggacaaaccaattgaataatttaaaacaagaaatatattgaaaacaaaaagcagaataattgaaaaacaaaaagcagaatagttgaatgtagtagtagttaagtagaagaatgatttctgtgagttccattacaccatcccatgatttctatgagttccattacaaattctgatgaagcttaggaaaatcttgatggagacgaatttattattaggaaaggattttacacaagcaagtgcatttttgcctagaaaacgagatgaatttggtccaaaattcctataatcggtataatccactctaattttcaaagggtgttttttttttttttgcagagaataaaaaagtacttatcttccgattaacaatcattaattgcacttagaggtatacagcataataatcaaaatctaaccttattatgaagtgtaaaatttaacaaaaattgccaccaataggctaaatctaattattcagaaactcgttaaaaaattcaacaaaaaatcaaacgcagcctaaagaaaagaaaaagttagaatattggagagggaaagatcacctccacttatcttgtagatctttcttctcagacaagatccatgtaacaaagatggcagctactagtccgacgatagtgatgaggagcaaagcataactaaaatcttcagtgagcgaatcataggtcctggaaggtgcgattcgcgtgtaaaagagatcaattccatatgcgaaaacaagtgttgttgattccaaccttgcagggacagttactatgcctcgaagtccttctactttaagggaatgtgttacataagactgaggattgataggcaacgaatctgtcaacggaacaaggccttgttcgcgctcagcttgtgaaggattggccgatcgacggggatctagaaaacgtttatcaagtgccaaaacctgatctacaatagtaccaataagaagctgctttgatgttactcccttagctgttgatgtaactgaaatagctttaacagaatgagtgaaaaagtaagactgtgatttggtcacaacctcagttcttgagtaggaagatattggagatgtgagattatggtgtccaagaacaagcttccataaatccttattggccgatcgagactggtcgtatatctcaattactgacatttgatatctgtgtgcccttaaattgaagtagtgatagacaacccagttctcactgaaaactgcatggacaggaccctgagaaccatgatgagtcattctgtgcaatatgcgaccagatattgtatcaataagataaacaaccaacgaagactcatccggggtagctgttccaatttcaccactcgattttggcgtaacagtggctacaaacatcaaattttttgagatgtacttgtacattacatcatcatcatgatctggtataatcttggcctgagtatggaccacctcctcgttcaattttcttgtcacagttgcaatgatcttttctgagtcagatggaaacacaattgaccatacatctctagagtggaagaagtactcatcatcaccatggtttgaatttctcttcaaagcatgacccttaatgatgcctttatcagaatcaactgagtgccagtatatgtttgaaaattcacgttgaaaaatagtaacagcctcaggtgttctggggtatagatatgcccgttggtcctgatctatcagtagatgaagacgttgttcggttgcatcagtgaatggcagtggaagaacttgtgaaacagaatgagcaggactcgatgaacttatttccttcccggtgtaagtatcaacgaaagaaagaacacctggtgcatcgttactttgtccacactggcctactatgagcacagatggattttcatccaatgcatgatgatggggtacctgccattggtaaatactaagaccacacgctgaattacgcaatgaaggcagtaaaagagaccaaacaactcgtccatctccggtgtgcaaggcaaacaactttcctgatcgagttagaactataagcagcttccgaaaaccattgtgatcccgggtcattttgctcttctccgaattctttaccctcatcccttggattactacaacatcctccgggcttgcaagcatcaaagttcccttaagcttcaacatgtgacccttaagccattcaaagaagttatcctccacttttgaaactgatacaccttcctctttttccacaggtagttctgatgttactacacctacaattgaagcaagaccatcctccctactccagacaattgctccttgttgtaacagcaagagtgaatgatcttccatgacaaccaaggccctgaatccattagacctgtctgtgcggatataattgtttataaacaccctatggataaaccctcttccatgatccatcactatactttccttatgcaattccttattccaatcatggacaagcttcactgtaagatgaatcttgccatcatcatcatgctgaactattgcaaaagctttttctccctctgaaagtaagagaggatcactaataactgttgcattattgactttatccacaacctccagatttccttcaccagttattctaatgaatattttaaatccattgatttctaaagcaaacattccttgaagctttaagggcaacaacactgctgtcccagatgaatcgccaataagatcagataacaaatatgtttgctcaaatttgataccatcctgaaattttattgtcactatctttgatttagtggcatccaatgccacaaccaggtcatcagaaaccaataacatctcccctgaaaaattaccaggaaaggcagcatcatatttattaagcaagtctccgttccttgcatttattgcaaacacctcaaaatgggaagagccaacaaaacctatcgcatatattacctcactatccgaaggatggataatctgttggacctcaatactttctgattcaaagctctttttccaaactatctctccatctataccagaaacaccatgaagacacccattaccgaaaacgtggatcaaattatctttatcgactttcaaattattgggaatggataataatgattttgaggactttgaacaaccctgtagagaagactcccaaaccatttgaccatcgggaagattccatgctcttaagatacctccgctagatgagagggttatgacatattttcccagagcaatatctattgcatccacaacatcattgttgccaagtacgtgtctccagaaaatctctccatgtcgaagatcaagagaagcaacaacattctcctcggtcgatacaacaacacgctttcgcccagctttctgagtgtggaacactgcatctttcaccttccctatgtattgttggtgccagtccgcgagaccaacttcatctccgaaaagcgaaaagcttggcttcgcgtgaaataaaaacaggatacaaaacagtagagaaaccctaatcgccatagccatggcaaatctcgcagtctctctcgcagagatctcaataatataactaagtgtaatttaatagagtaatatttgtaaataattattgccatttaaatacactaattcgtaaatatctaaatagtatttttaaattgaataattttaatcattattcttttttaaagtaaaaaaaacaattcaaataaaataaacaaacgatttttcagaataattttttccgttagtggaatatctattataattactacaacaaatgaagctatggaagatcatggtgatgatgggtttatggaaaaaggagtttacataagcttagcacttggaactgtagtttgatttttgggatttcgtgggaatttgatctccaacaagttcttgaacaatgctgaggattaggcttacgtaacagctgtagtaatgtagttagaagaagctgttgcagatgtttctttttttcttttctgttttttaatagaagctgttgcagatgttcagacgcttaatttgataacttatctctctttctatgttttgagtacatttattatttatgtacactgctactatatgttgatttcatttttacagttaaaaatggttgtagttatcaggagctgcagttgatatttctttataaaaaaaaaaactgttgttatgtccaagttaattatgttttctttatataattctttgttttaaatttcaatgcttttgtattttcacttttaaatgacatgaaactcctagaaattaattatagtggaaggagcataaatttccttgcaataaacaaacgaggaaaaaaaaaacagtaaccatagcagaaaaattatagcagtactgatttctatgagttccattctgatatgttctctatatttgactttaaatattcttctttggaaagaaaggcagcagtcaagtaaaggcataatgtggcatagagtaatcctctggaatgcaaattaaagttgcatagagaaaagagagttgaatggatatggaaaacaaaacttgaaataataatgggggaagttcatctctctattattggttgctcgtcaccataaacataaacagtatattctcagtccattttataatttacaaacagctcaatgattccttttatgactgactacaaatgaatgaatgtaaattttactgctccctaagcgtgtgtgtatacatataattatcccttcaaattctctttttctttatctacaacccctccaaccaacactttctacccttcttaaataatcaaaaaattgagcaacaaaaaaagaaaaaaagaatgaagctttttttttccttttttttcacctctgaatcacaaaaggtttactgtatccaaatctacctgtcttctgttccacattaaacctcaagcgaaacacgagtttttattggtttcaacttcaaccccatgctttctggagaaagaagctctggggagatacaggagggactgagcgggctcctcgggctgtcactgaactggcaaggtctatacaacccatagcccatgaagaaatactccataggtatcagcattgcatgtggttgctcctctgttaccattgacccgcaagcctggacctgcacaaacattatattcccatcctttgtcaaaaacatgctattccacaattcatgcatttccagtgaggcagtgaaatttcaaagaagctaaagcaggacaatacggtcagaatgacatacctctactaaggcgctaaatctcctatctaactttgcagtcatatggagtgcctcggaatgaaaaggagaactatccccaacgaaaatgagtgtgcgacatcttaacctctttaagccttccgtaatgtcagatctcctgaaagaaagataatgttaatttgatataccaattgccagcccaagaaaaagataacaactcttgaaaaaaaagtatattacccgttaattgcttgcagaaaccggaaaacatttatgctctgcctctcttccagcagctgaacaaacaaagatataatgggaattagacaagaattattccttcaaaaaccatccactggaatgataattgtgtgttatgcatgtaaaaaagagtgaatcaaattccaagaatgcatatggaaagtgcttgatctttctttatattttatttactaaggaaaatctcgaacactaacttttctgcatgcttgaactatatccgactcagggacttcggtactaccacgaacttcctgttataatatttgcataaaagattagtcaccgctcagccgacaaaagaagaggaaaacaagttaaagaaaatgatggacagaatgaaagtaccttactgaaataccgttgcagcaaacaatctttaagtaacccacacatgccataaaaataaagcaaatttgacatgacctacaaataagaggtttgatatgattaacttgtgtaaaatctcatttaaattaaaaataacaaatacaatgcaaaaattgcagcagctaaggtttgaggtaaaaccttattatagatccattcagaccaagagggtgctttgcaaagtggagatacaagtatcaaaccaataacacgttctctatatttcatctgcggtatagaaaagttaattagtcaactggcattgaagtaacaaaagaactaaaccactagaggagggaacctaccgcaaataaggtaaggatataagcaccggcagttactcccatacacataacagcaccaagcctgaagaatataaccagagaataagttacacttgcattcgcaacaacttgttgaaacacaaaaatataacatgagctttcctagctttaaaagacttgaaaatacaagtacgaaaaattccttataatcaaagaagaacatggaaaagtaaaagaaacaaaaataattacctaaaatggttaagaacttcaatgatctgatctgctaaatcatcagcagaaggcacaggatcatctgggcaaattggagcagctcctaactgcaaaagctcttacggaagtgccaaaagaggaactatgttattaacagcactccaaataaaaaaaaatggaaaaaaaagtattggaacaaacattccaacaaataaatagccaagtaaggtcaattaactaaaaccaaaaaatgcactgacctcatggccaggaggactgatgtgatatatgcaaaagttgtggagcagcaaagaagccgcatcgggacaaaaaaataatccttggaaacaagacatatctgccaaataacataatgatgaaatataaaattttgttaggttgtaacttagttttacgaaatagagaatatacgtgtctgtgcctgttggtgatcattaagccttcaacgatcaaacaaaaataaaacatacataaaataaattaactaaaaaaaagaaaaactgcactctgaacaagccatcaggaacaaggagattacgaaaccattgtacttacgatttaaagctatatcaggataagtaataagagcaggcttgtcttggtccccgtagacaataacagacacattgccacggccagttttaattacgtgttcctgaaagaagcgagatgagaaaattataacagaagagtagaagattgaactaacgaagccaagatcaactatgaacctcaaatagatacatttaaaacagttttgactaccatgatttttcttcaaacaaattgcatgatttgctaacttgtttgaggatataatgtgtactttcagaaaagatgtgggcttgataagacaaaacatttatatcgcattttaagccttcaagtaagggctaagattcaacactgctctatgggattattatccttggaacttcccatgtgcatttacccctttccaggcaactaagccgaacaagatacaattttttatattaaactttcaaaaagacagataaaacaaacaagtatttaacattgcaattattgcgtcatttgtatcttttgaagaaaaaagggaaaagagacgtgtgacagttcaaaagagaagcaaggaatctcacatatataaagacattggtttaaaactaaaaaaatgtccaataaaacaagaaaattcattcatggaaagccagagtaccagctagactagtcaataaaataaaaaaggaaacaagataactactgaagaaaggtatatctttgattttgtcactggatagtaaaccagcggagagtccaaattctctccaattaaaagcatcacaaaccaaggaaataataagaaaaatagggaaggaacgcattatacgatagcaacaaaattaagagtgtaaaaggtcctgctataaacaaattaagacacttctcactttaaaaaagtaataatatttagaataaagggagactcaaaaacacggctttacagtaaaagactgcaaaaatgattaaacctgctcattttcctaaacaaatacttcttcctttgtaaacggaaagctgttttattttattctgtgtgttatgcttaaataacaaatggggaataaacctaactggcaaatggtatgaaaaccaaactagcaaataaggcatgtatagatctggcatttacgctacctaaaagttcaatttcttaaaagtaaaaagctcagcaaagccaagttaagaactattccaaatacaaaaacaatggatatcccctccgttttccactttccgggatacgaaatctcaacccaaattttattgtatccctaaactcagaaaagtcaagcacccacaagtgaaatgaactcagaaaacgaatcccgtttgatttcaatcgattacaagataaagggcataaagtaacagttggaacgcagaataaatcttattaactaaaattcccatttcccaaatattccgggaaaatcaaaagacccaaaagacaaaagcttcatattctgcaaaagctgattcaaccgttggacccaaatgcaaaaaaaaaaaaaaaaacccttaaaaacaactacaaatcacct

SEQ ID NO: 14373 - DNA, 5000 bp, Cannabis sativa
aaaatgataataagtttttttgcacatattttgtaattaattaaaataatgtatacaaaattgtaaaatgtcctttttttttaaaagaatctttaaaatttataagcagagacttattctatagtgtctaggacctactcaatccaaggcccagaagaaaaaaagttttttttttttaaaaaaatacgtataatttctcaataacttttataattattacacattattttaataaaggctcgaaaataattacatagaacattattttttgtaaaatttttatatttatacgtttaaagttattttttttttcacatttttacggtatttgataaaaacacaagaaaacaacataaaagtaacaagaaaatcatatgaaaataacaagaaaataacataaaaaataatttataaataacaaaaaattaataacaaataacaatagtacaacataaaaatacataaaaaccgcattttatataaataaaatgtaaaaaactgtaaaactgttaaaaatgttagaaattacatacaaaccgtatttttgtatttttttttttgttgtttttgtattatttttttttgaaattatcccattttaatttttgctaagacttgttaattgttttaatccttgttaacaacttccaaactcgaaaaattaaccaacccaaaattggattataaaattttgcataattttattcaagatttttattatttttattttttggaaagaacattttacacaatttatttattttaatttttgaaaaaaattgagaggtgtgtaagtgaagtgtctataaattggtaagacatgattggaaaaatatacttggagactacgtaccatatagaagcatactataatatataatatattgttatttcttcttaagaaaaaagtcacattaattattaatacaaacttttacttttatttttatttttcaacaataaaaaatttattgaaaataattaaagtgtaacactttctgaaaatctgaataaaaatctatgagcttaatcattgcataaactatataaaaagaatttattgcaaaaataataatgttgttagaatcattatcatgcatttcaaaaatacaactaaaaaattggatttgtataaaattaatattctcaaatctaattttatcaaaattatactatttgaggcttttttttttcttttttaatattaatattttcttttagtaatttgaattcattattttgtattataatcttagagatcagactccattgaagagaacagtcatttgacattagtcaatgaaaattttgtaaatatcagaggcataataattattttaaaaaatcgttaatatttaatatgctataaaataattcattcccaatttttaataaaaaaaagagtacttatggcgaaagtgttttgattttttatactctcttatcttttgtttttcgtggtaaaatttctttatgtttattttttttatataaatttgagatgtcagctagacattaccgttaaatacaaactaaattattaatgtattggcttcgaaattttactttcacgtatacacatatgtacacagtggttatctagttgatattaagggtgagcaacagtcagtttagtcagttttttacacaaaaaacaatataaaattcgattttcgatttacatggttataatacgaaaaccgatcgactatattatataaatgtaaaaaaaccgaccattttaattgacggtttggtcgatttaaactaaccaaaccgagctttatttttattattttttttttagaaaataagtctttaaatttgctacaattatttagaaactaaaaaaactaaagtattatatcaaatatcatacaatttaagaacaaaaacttttttagtaaaataaataatgtaaaatatttttttttaaaaaaaaatttgctcaaattatttgtactattaatgtggtaatgaattatattaaaaaacgcatattattttatgaatgtgtgtatataatacataaatacattaaattataataaaataaagcaatggagaattgagactttaaatgaaaaagataaaaagtaaaactagtttaataaaattgtatattaaatatgtacaaaaataattatattatatacaccaaaaataacaaaacacaacataagaaaaaataatatgcaaataaaaaaatcatattttatacaaatcataccttaaaattgtcaaaatgtttaaaattttgtataagtatatttttgtaatttttttttattgtttttaaaattatcccaaaagaaaaaagccattaaaaaaaataaataaataacacaattcattttcctacataacttgcaaagaaagggtcccaaggcaagagactgaaaagggacaattcattctctcatctcaagtggcaaaacaaaaaaatagagtactaaagtaagttggcactaaatttaatgctgtcactcactgccatctctctcttgaaagctttgaaaaagagataagtgaagaagagatcaagaaattgagattcccaatggctcccacaaccacacaacacaacacaacacaagagaagagttcactcactccattattgctactcacacataccatgcacaccaactgacccttcttctgaccactcccaccactctattaaaaccacccaacccaaccccaccataccatttggtcccaccaccaataactcatcaaaaatttacttactaaccctttgtttcagaacataacgagtacatatcgataattcagttgatatttaacattaagagaattttactattaattacttgttaggacatcgaacaccatttatcttcactattagtatgatattcgctttggactatctcgagtacttttcacaatctttctcatttctaaccaatgtaagactttagttacacacccaataccctttttcggtagactttctcccccaaaatttcaaaagtctaatccctctacttttggaaagattataatttataagacaaattaaattataccaaatttatatattttttttttatatatatatataaaaaaaacatgtttacattaaaaaaaaaaaaaagattatagtaattttaactattaacttcctctccatttttcagacttcacttactcttctaccaaaggtagccttagtgagaaaaaatagtggaaaacaaaagagagtccaaaaaaaattgtaggtcctccaaaacactttgaaaaacaagtagaaaactttttaaaactactaataagatttaattactaatgtaccctttactaatttaattgttacaaaaacaatcaaagggtaaaattgtaatttcaaacaacctaactttctttctttcctttctaccaaacatagtgtaattaaagaaaaacaagagggaccccattttttgaaaaatcattcttccttaattttttttacattgtgattacaaatttcataacaaaaacatccatgaaacattttctcaagttttacaaactaacccttcaatttttttttctctatataacattttttctccatctatttttcattaacaaaactaaccataatactaatttataataatgtttttttttttttacttttcttgatttcactcagtactattctgagaaattacctcaccaaacttgacaaacaattgtgcatctgatgtgctcattgatgggcaattgacaatgtggggtgtcttgatatttgcatactcatcgatatagcccgaaactttggctgcacctcctgctgaagagagtgtgcattgcgctgttgctgtagaagccagtttagttggcaagagactgctgagaactcgtgttacttcatgcattgttggccgatcagttggttgtttcttgctgcaaagcaatgcaagttgaaataccttcctaaccgccccgagatccttacatgtagctgtgatttcggggtctacagtctccataaccgcgttgtttgctgttttggacaatatctaaggcaaaacagagagtttaattagttcaaaaacttgatagaataaaaagctcgatcgagttaagcaatgactactactactaaccaaatggtggagatttgattcattgtcaacagcttttcttcctgttagtaactcgagtagaacaatcccataactgtaaacatcagacttctcagtaagcctcgaagttcgagcatactcggggtctatgtaaccaatggtgcccaatatgtaagttgtagtgtatgatttcgtgatgcataagttcttggcaatgccgaaatctgtaagatgggcatcgaaatccttgtctagcaaaatgttggacgatttcacgtctctgtgaattatgcgtggactgcaatcgtgatgcaaataggctagtccttgggctgcaccgagcgctatcttgaggcgagtatcccaatcgagtttttgctttttgctaggacctgtagaaaaacagtataaggtaactggttactcctctggttaccataaactgaaaatgaagtcttttaacaaagaaacttaccatgaaggaaatcccaaagactaccattttccatgtaatcatagaaaagaaggtaaccagaagaggacaatgagtatccttgaaggctgacaagatttcgatgtttgatgcttccaaccgtcgagagctctgtctcgaattccttgaggcaccgagggtaatgggagtaaagctttttgatagcaaccggcttgcaattcttaagaacacatttgtataccgtgcttgatgcaccgtaaccaattatgtatttctcgctcaaattctcggtcatcctcatgatgtcttcgtagacatgaagcgccatattcatgtgaagaatgactagctttggtgttgagtaataaacagctgtttcacaaaaatgcatcgaaatttagtacaaaatcgcatgaaacttaacaaaagatgatagtcttatg

SEQ ID NO: 14374 - DNA, 7225 bp, Cannabis sativa
ggtggcaatttgagctcataacggatcacaaacgactttttggacgagtgacaattaggctcacaacggattacaagtagctctgataccatgttggatttgggaataagatgaatggggttccatctcaaaaccaattgattatgggaggagtagcacattcatcttatatatcacaatttatttccacacattaataatgtggaactaactctaataattcgtgccagtttcatgcttgtcaaaaaaatccgctcacatttagaggagtacctcaacgtgcataataggaaatcgcattgctccatatgtagagagagcatagataagagtcaaattaaaagactaggcgtgtgtgggtgggacgatgaggggccataagtgagtatcttgcatgtgtgtaagatattggagttgagaaagtgtgaactggctattgcctggcatcctctttctctctctctccttactttctatctctatgtgtgctatatatctatgcattatgacttgtcaccgacaaaagttgttttttttcaattttttaaaagacgagatgagagttgaagtttgagatattgaaggccaaccaacgtttgtaaattgcacaatgatgttttgtttttcttattaatttagctaaaacaaaaaccctgcaatacccttttgcccccacagtgataaagttgtggaatttaagcttaaaaataaacaataacaataaaaaagaccgttctttcaaacttgcttcatctctcactctctgtcttggcttctttctttctttctagtgattatgtaagaaaaatattgagaatttttttgtgaaaactaaaaagaagaaagctttgtgctttgaatctgttgttacagaagcttgtaaagtctgagaaatggctttagcagggagcttaatcccagctcttgtggtcatcaatgcttgcttatttgtaagcttgtgttttgctgcggatcccaccgttttccatgactttgaggtctcttacatcactgcttctcctctcggtgttcctcaacaggtttgttctttggatctatccatgtcttttttctttctctttacactttactttacaatgctgagctaagtttctcacttgggttgcctttaaattcgataaagttttcacttttagctccagatctactaaatgtgcttatctttttcactgcctgagctttagagttgtactgattgaatgtgataattagttgaggatttgtggcaaagtattcatgtctatatcttcattacattgcaggtcattgccattaatggaaaatttcctggtcctaccattaacgtgactacaaacaataatgttgttgtcaatgttcggaacaaattggatgagagtcttctcataacatggtaggattttcccctattattaagtactgtttatgaactagaacttgtagtatgtatagtatagacatgttatagcttttagtgagttagtttatggattggacacacttttaaacagggctggaattcaacaaagaaggagttcatggcaagacggagttttgggcaccaattgcccaattcccccaaagtggaactggacatataactttcaggtcaaagaccagattggtagtttcttctacttcccctccctccattttcagagagcttctggaggtttcggcggctttattattaacaaccgagctgtaattccgattccttttgacaccccagatggggatataaccattatgattggcgattggtacacaaaaaaccacacggtagatttctcaaacttacttgtgaattaagaaactgcaatttatcgatattaagtgttataatgttagctacattatgaaatgtaggctttgaggcagaccctggatgcagggaaagatctgggaatgccagatggagtacttattaatggaaaaggcccttacagatacaatgatacactcgtcgcagacggaattgattttgaaactattgatgttcacccaggtaatggcagtggcatattagagctcaatttttgttcagtcatcaagtggtattgccaaccaatgtttttatttagttacatgatacattaccttttgttttccatgcattttatatggttgcactttgctaagtctatcccctgaattggcatattgttgattaagtctgtggttcctcattggccccttaaccttttaccattagttgaaacatgcaagaggtttttaggactgttgtatctgtgttaaatttagtttttcgtattgttttacatatgtttaacattccactttccatgcattccttgtcattggttagtacttagtatctagtccttccttgacaattttgttactcatttttaaatttgaattttttgacaggaagaacttatcgtgttcgtgtccacaatgttggaatctcgactagtcttaatttcaggatccaagggcataatctgctgttagccgagacagagggttcatacacagtgcaacagaattatactagcctggatatacatgttgggcaatcttactcatttttgctgacgacagatcagaatgcaagtacggattactacatagtagcaagtgctaggtttgtaaatgaatctatatggaaaagagtaactggagttggcatcttgcgctattccaattcaaaaggcaaggcaaagggcccccttccagagggaccaaaagatgaatttgacaaaacattttcaatgaatcaagcaagatctatcaggtttgtatagacattatctcaattcattaaaatgtgttttccatatgaaacaagtgcacatctgtgtgtgtgtttattggtatcttatactggaagtatgacatttggggtctacattgcttgtttccatcaatctagttttgactgttcgataaattttgcttctcttgtcaataaaaaaagtttttgttgatttatctaccaaattgccttttaagaggctggatttcgagcgttattttgaggtttctgtgatcatttacttgccaagaaagcactaattgatagatattttgtttatttgttataaatttctttgttttcatgctacaaagtattgaatattcctaccaagttggataaatttggatgtaattaaaggttgctgaaaatccatattccatgctagttcacttttcataggttgtatattcacactttgcagatggaacgtaacagccagcggtgctcgcccgaatccacagggatcttttagatatggctctatcaatgtcactgaagtttatgtgttgaaaaacaagccaccagtgacaattaatgggagacgacgagcaactctgaatggaatttcattcgtcaatcctaccacacccatcaggcttgctgactggtacaaagtgaaaggagactataagcttgactttccaaccaggccacttacaggagcacctaagatggaaacatcaatcattaatggaacatttagagggtttatggaaatcattctacaaaacaatgagaccaagatgcagacctatcacttggatggatatgcattttttgttgttgggtaagtaaaacaaattgatttgtttctcatttgtctctgagtattgttttcttaacagcgattcttacatttagttatcacctcttgcaggatggattatggcgaatggtcagagaatagccgaggcacatacaacaagtgggatggaatagcccgtaccacagcacaggtatagttcaagaactctgtcttagtactgttttatgttggtagtaaatcatttggagttatcttttgagttttgttattccattttagaatgtgggtgtactaaaaaaagatgtttatagttaggtatgtgaagaaatttagtgtgtattattacttagcatgttattatattatctactagcgaattctcttggtccttgattgattacataacatgagatgatcaatgaaatccttaaaacgtgttcttgcaagcagtcatgtaatggttaccatacaaggatgtgacaaggaaccaagttctcagttgtaggccacttcatctgaaaaaagttttgtatattgtagtgtatactcaccgggattaactgatgatagctagcctgattaactaaattgctttcctattacttcatatcctttgtgattatgctgccctttgatgcttacatgacatgacaattacaaatcaatttgttgtaggaaaaaggtgtcaagaacatttgtaacagtcatttactctttcacatgtgtttcttattgtgttaatcctaaaaatataaacatgcttccctactcaatgtatgtttaggtttatcctggagcatggacatcaattctagtgtctctagacaatgttggtatctggaacctacgaactgaaaatctcgactcgtggtatcttggtcaagaaacatatatcaaagttgtcaatccagaacctactaacaagactgagttacctataccagacaatgccctcttctgtggcgctctcaaaaaattgcagaagtatgttcccttatactgtcatattaaaaaaatgatcaaactttgtcactctcttaacaaggagaaactcacatatactttgtcactcatttcaggccagaagacatttcttttgcaacatcaatcataggcaacaaatcaaacttcttcctcacattgctgatgattttatcatccgctgcgattcatattttccactaaaaggagtttcgtttagagtgttcactcctgtatggtttgttttatcactatcatcgcggcttcttagcgaggtttgtgatctgtgtgttagtaggcttgtaagtttagtcttgttgatatgaatctttcagtgattttgaccaccgcattcttttctcagtagatcttctgaaacagctcccctcctccaccacttcttgcttgtttaatttatttggtttatcattcttttaatacctatgatttatgtattaataacaatacttcaattaattgcagaccttctatttggttcttctatagccaagcaatgattgtcacaatttatattctctatgtattcaaatactacaaatcaaagaatctgctatacatattacatatatttgagattttaaaaggtgacacaaattgacaaaagggtccagctgattttcacatgctcctacttagtactttgtcctcatattaaccaaccaacaaaccttgcctcttctattccatcagcacaacactctctctaccttcttttactctgtttttgttttcttttatattgttactctctctctctctctctctctctctctctctctccctcctatattctgaattgagaggataagaggtggccttacatctgtacataacatataaccaatttgcctctcacgtgtctacttgcagagatttttggttggttgtgagtaattaagtttggcaaatatgaatgttgtcaaggaagttcctgttgtttaatggctggcaatcttggtcttttctgtcctctctataaactataaatgaaaataaaaatggttgttgaaactaattaatatatttataaggaaaaagaagacactgatgagatccaactttcaaattgaatgctcatcgtcatcatcatgttcatgttcatgttcatttcttaataagagtgaagacccacctcatgttttccattgagcaatgttttggctttgactttgcttcaggctcaagcatttatacatacatatacatgtcacagcaaagtgtatacatacatacatatatacatacatacataccaaagtaactttaatttccataaagctggttcaacaaacatgtaatatacctatatctatctatgtctttttgaaacgaaatggagggagacaagttattcagaaatgggcagaggagggggcagcaagcaaagcaaaataaaaccctttttacagatatctttaagcagtacaatagttctttctcttcattgttgtatgcatgtagttgattcaaaatagtgctccttattgggagtgcagcttacacttttggtaatggtcgcatcctatgcaaaattttcaactttacttgtcacgctttcctgttctaaagctttcatctttaaccctttatatctagggacacaacatgtaatattacaagtacataaaagaatagaatgtaattatgctcgtggtacacagttaagcactatcaagaacttaatactgtgtttggtgtgattatatatatttacatacataaaagaatagaatgtaattacaagtacgaaagagagcatgttgaaagcaatcactcacattaatagtgcttattgttggcatgtatgcattaaaattttctggtgaaatagtgtatatgaatctaaatgcaacctttataccatgcactatattggtgtcctcttggcttaaaagctagcttccaacattggaggcatttaccatgggcaatgtcttcaacaaatctagcattttcaaaagagaagaattaaaaataaataaaaagaaaaaagatcaccagggctatttcccatgtgcatgcacctagctagctaccgttattgagagtttttgttttgattgtagtttatataaattgtacttcaactaatagtacctacagttaagtcttctgtatactttttagtgatttttgaaaaaactatagtggcgtttagtaatatttttatttttaaattttttaatcataaaaataaaaataaaatttttatttttaaaaaataaaaatatgttctataactactcttgttttttaattttaaaaacaaaacaaaagtgtgttctgtaaattttattttttattttcatttgttgattttatttaattaggattcgaggtcaagaccaggtgcgggtccaagtatggggtcgggttcgggttcgatttccaaaaatttaagttggggtcagagtccaaaatattgattaaaaaaaactgtttaaagaaattttgaaagtgattttttcttaaatttagattcttaattaaaaaattaaaatgtaaaaacagttttatagaatatgattttggaaaatagttttacttttttgattttaaaaacaaaaaattgattaaaaaaatgttaccaaacgcactttatatttgcataattagcattaatgtttgtggaactggtttttgttaggacttggtcactatagtttttagtt

SEQ ID NO: 14375 - DNA, 4609 bp, Cannabis sativa
ttttgaaaaagagaaagaggccacttgtcttagactggcctccctccgacatatattaagaacctcacttatggcggaggaatacattggtaaatgagaaaagtgtcatcaaagaaatagacccagccaccaacacaaaacaattcttggtgatgttagataaaacaaatcataaattccagatgtaattcacgagtactaaaattgcagagctgtgcaaataaatatgggagatggaaatagaaggttaccagctagatcagccaggagagcccgagctggtccctgtaaaaagttataaaattcattgtttataaacacattatgtaaaagaaaaaaaattccatgtacttaattctaattgccttacttaaggtgcctagctcaggtgagtgagtgtctatcagtggcgggggttccaaaccccttaatgtatatataaaaaaatattctattgacagcatgtggttcacaaagttattataaactcacctgcactgtattgttggcaagatcaagcaaccaaaacccaattataaatacaacagctgccctcgtccgggtacctttaaatgttctgcatttccttagatgagttggtcaaccttaaatgaattgtagtatagagtaccaagattcaagagaaggcaacaaaaacctgcaatgctcctttgtgtctcctaataagtatccaacgtctgcagaaaacccgattaatatcacctatattacaaggcttagtttagttatatttatcacaatataaactaaataaagacagctgagaacaaaaaaatagtaatgcttacagcagctgaaatcatgagagatccagcaagaatgaagggacgtcttcttccaaattttgaagtacatttatcgctccaaataccgacacaaggttgaacctaaacgaaaattaaaaaaaacaggataacgtattcaaaatgccatttaccagattgaatacatctgtttaccctaaaataaccaaactagtcataacaaccacaaccaacaataataaaaaattacttataaaacaattacagttaaaagataaattggctgctgtaacttaccacaaggcctgtaatggggccacatagccaaataaatgaagaaaaagcgtgcccaatcccaagtgtctgaaatgataaatttgagcgccgttaacagaaaaaaggatacaatgtgattagtatcccaattaatacaagaattcatagtagagaacaatatgtaagactgcattttcatactagttatatgattcgtatccattatcaccgcctaaatattagaatttaatctagatacataattcaatcttttgagctaaagtccactattttaactagattatgttaatgcttatgataaaaaaaaacgttgcagatgtatacagataaaggggtcggtgcaagcaagcaagcaatttaaatgttatgatcgattcagttaggatcgatgaattatttcatagtataagataagaaaaacctgtatatagggagtcaaaagtgaaagctgtaacgcccaaccaaattggacaccagcggctacagtacaagtaagaaccagagtggccagactgcaattcttattagatctgggaggattcgacggagagaggtcatcagaggtcccattaggaaccctaggagaagacgtagaagaagaaggaatcgaagaattgaggccgatttggtgatgatggggttcatcaagtcccaccatttccatttctgcctccttcaggttcctgtacggaacccgaatcgtcactgagtccgtcttcgctgacattttatcgatgactcagtcgaatactcaaatttaatcgcttgttcatccagattaatgctaaagatctggtttttctgagccaatatccaatttcagggattaacttttcagaaaagaaagaatgaatgtttttggggctggtcaaatttgcgcgggtggtgaagagtcaagtccgatctcattacgggcagacttttgctacactgcactgcactaccatgaaagctcctacgtcagcggatatgggccattagctcaaagtattggaccgaaaataaatttatctgggctcataaagcccataacgtgtaatgttacatcaccgaaagtatctttgacctagatcttcaatcgtgaccgtctattttgtcttggttaaaagaaacgaaaccgtggatcggaggaaaagtaaaagtcaatctaaacatgcctttgtgattaagccaactgtgcaagccgacacagaccatttgaaattagatttattacctcacgtacctttatatttgtatcttaatatcaaaaacactgttgcccatttaatcaacggtgctgttcttttttattcttttctttttcctattaacttttcacacttaaaatgtatttagaactaactctatctcaagaaaaaaaagcttgcaagttggccgcagatgaattggatactaaaatttgggaggacccttagatcgctcacaagaaagacttttgccctcgttctaatggttctgccactagtagagtgaacaaagttgccgagcttctgttagatttgaaaaggagcatttcgtctggctagggcaatgatagatagatttagactttgaaaaataatggtcagttctcgagcaaatcggcctacctcacccaaggtttagatagggcacctccttgtgaggttgctccttcgctatggaaaaagttgtggaattgtaatatttcagaaaggctgaagactctgtggtggtgtatcctgtctaaggcaatcccagttcgatctgagatctgtagaaggtttcctattgaggatgttaattgccccttttgtgggacagagaatgaatctattgaacatctatttctttcctataatgtggctttttacttgtggcggtcctcttattggggtatttaccctatttgtggtactggcattcggatatgggactagatcaaattcattttggaaccttaaaaataagggcataaatgctaatgaggttttcctttatgcttcgttagttgtggacacaatctggcggatccgaaacgataaggtacacaataatggtctagttgatgtaattaagtgtattgacaatattcgttcttcttttgcagtttaccatgattcttcgttcccttgcgtacctccgcgtttgacggatgtctggcgccctcccccttaggattggttaaagctaaattatgatgttaaagtggggttggacaacatatgtgttgcggttgttgcaagggatcatcttggtagggtgatctaggtccatacttctagattggattttgctaatgcgttatgtggagaagcggtggcttgctgcattgctttggatattgcaaagaatcgaggttttaagtttattattgtagagagtgattcgaaggtagttatcaatgctctcaatagggcggaatctcagtggaagattgagaacaatgtctcatgttgtattagatcctctccttattttgttagttgtactttctctaatattagtaggaactgtaattttgtcaaccataatgtggctaagtgggtgtttacccactagaggttcagttgtattccgattccctctatccatgaacacctttttttgtaacgactgggagatctaactacttttatttctaatatatgtacgcttttctttaaaaaaaaaaaattcacagttatttttctttgtttctctttacttttacttcatctcttttccactattctctaactataaaaataatttttcatcacactcttgatcatttcagcttaaaagaaaagatatgcttctttttttttttttattgttttcataattaaagaaactattaggtttctcaaacgatctccaatgattcactagaggtgtttatggaatactcaatcaaatcccaatttgcataatccaattcaactcacagagtgcaaatatcctcacttatgtagattggattggattgaaaaatctaaaaagcgcacttgtacaaattaaatgttaattcacatgtaaaaataactaattatatccaatccacacatatttatataaatttttaaaaaattattatacaattaatatttttatataaaaataataatttaagaaaaatatttacataaaaaaaatacaaaaatatattttatttacataaatatttatgcatgtaaaacaaacttttataatttatatactcatttatatttttaaaaataaattaattgccaaaatactttttggtcacacccttttatttgctttcctatacttcttcattttttatttttattttttatttttagttttttgataggaatgagatacaaaatgactttaaatttaaaaactaaattagtaaatgtccttaaagtattttgaagtgtaaaaataaaaaaaaaatcccttatttttttaaaaaatatatataataattaaattaagttatatatatttttagtatttcataatagtatattgtaacaaaaataaataaataaattaaatcattaaatataaacaacaatatttgatatattgtatcactaaaaattaatata

SEQ ID NO: 14376 - DNA, 10275 bp, Cannabis sativa
  modified_base (35)..(37): a, c, t, g, unknown or other
atttatctgctactcggcataaaacttaggtattnnngccgcaaattactctttatatattgctatacgaattttatttgcgatttgaattgctacgttagttgctataggaatttttctgtggaattctattaaaatacaaaaaaaattattttaaagtgtaaaaataataataaaaaaaaactccaatatatattatgtactcagaataatgtttatatttcttttaaatacataatactattttatatatatttaggacttttacaatagcaatattttaatattattaaatgattatttttaaaaattgtacaaaataatgttaagagctcaattttcatcatttttttaaataaccaaacataacccaatttctagtgcgaacatatactaaaatgtaaccgatctttaatataacaccttcagatcaagttattattagattttatttttatcaaaaattgagttcacagtattatcttgtaccatccattaaaaaaaattttacgtttagtcacaacaaaatttgtgactaaaagtaaaaaaattgtaattaattataaattatcattcttatgttgtgtctaaaagattcatggctaaaggctttagtcacaaaaaattataatttgttgtgactaaaagtaaattagtgacaatttgtatataaatactatgttttagttacaagtaatttttttattgtgactaaaagtcatatttagtcacaaaaaatttatgttacgactaaaaatttgtcactaaaattagttattttttgtagtgatcttaaaaaataaaaggtcaaaattttcatttaacaaaatagaaaaaaaaataataaaaaaaaaaacaactcaaaatagtatttatcctacttttatcacttttttttcgagaaaagaaacttgttataaattaacttacttttattatttgataatggtgagtagaattttgatcttgttgtggtttaatcttttgtgcctagtgaagttgatgccatacttttgattcctagagtaaccaatcaatgagtttccttgtgaaatcactcattaattaattagtaattcctaaagtgattaatgttgtttattaatagtttaataatcttaaacatttatgttacaactatttttatgtacagtcgtatgttaattgcagacataaattaccttaattaaaatactattcaacgtttgaaactctcaatatttaagttgtagaaaatattatcttatagtagtgttgaacatcattagaatataataaaccattagaatataataacaattctcttaatattaaaacttctttgagatgagttaataaacatttttgttgtgcaatttaataaattattattatatttgtatatataaccgtatattaattgtacacataaatcactttattaaaaactattaaccatttaaaattgtcaacataaattatagaaagtattatctcgtaatggttttggacaccatagaacataataaaccattaaaatataataacaattttctagggtgcgtttagaaagccatattgtaattagatttgtgtgtaatttgaggtaattacacaatttgacatgtttgtcaggtaattacattgtaactgtgcaattagaagtaattgataggttccaattacactctccaattcttatgtcccccatgagaattggatgtaattacagtaattactaaaaactttccacattaaacattagctagaaaaaatattattttctcatgtaattactaactattttgtcaaacaagatattaagaattcatatgtaattaccacgtcatgtccaaacacactttgcattttaaaatttgaaagagttggatgtgaataaacatagaaaattcatgccatattttgaaaataaaagctattttaggaaaggagaagtgggagactgggttaatcatcttagttcgacaacagtagagcgagttgaaaaattaatccatgataagttaaattctcttatttgataatttaagcttaattattttgcatattagcaaataataataactatacatatgagggaaagatgtaaaaaagtctatatataatataactattgtttaattgtggtattgtgtatctttgaagtaattctaaaataaataaaattgagcacttattgtgttatgtactatagcagcttaccttactagactggatagttttacttttgaaattaagtttaaaattttgttaatttattatttgctatacttaataatgtgtttaaattttaatccttgtggacaatatgagtgtccttgccattggcgttggccattttattacttgttcaatttataagtaagcttttcaaaatacatttatatatctgccaaaaccaattaattaggggcacatgatcatggtaattgcagagggaacatataagatacataatgagtcctattatctcttactttgatgcaattttatttgaatccaaaggcttgaaaaggcacaaaataagttttaccagtcatggtttgccaccgtcaattgtttgaaccgtctcttcaaagacaggactactaaacaatttcggctgatctactgtttcgggaggagaaatcgacagatcccattggcattcctggacaggacaagtagatatcatctttgctgctgaaagtgatgcatgaaactgttcaaatcctggcaccttcataagcttcgagtcttcggctttcatttcgctgtagctgttacactgcatcttcctcctctgtacctcttccttaactctctagaaggcatcaaagaaaaaaaactaatgaccaaaaagaacagcattttcttacaagtaaaacagagaaagaatatttaaatgacttccagtctttaaagcctttcactcatatcataaagacaattcagcttaacaatatgaggtgttttcaaattccatttcattttccaagaaaagtgtaaactacccactccattcattacttcaaagaatcataagtacacaaacaaacttttgagataataaaagtgtatcctttttctagattatgatttataatggctatccttcaagcaaagattagaactttaagccatttctcccaaccctttcaagccctgaatttgtctagtgagcaagtgatttcgtaagtaacatctttacttgtttccatgtaagacttaattgtctataacatcaaaaactaataaccaataaaattggagcttaatacattttcttagaaacactttttgatttagctaattataaagaacaagtaacatttactacgaaagatatctacaacaacataagtcttctttttgcaaagaacagaatgaatttgattattaaaacaatgaagaagtattaaggaactccataaaacatacctgaaacaacctcaaatcaaacttgggcacacctatttgaccaacagctagagacccaaataagttacccaacaatgcagcatcaggaacaggcaaaccttgcacgagtccagccacgaacccagcaagaaaactgtcccctgcacccgttggatcaacctggttcgtagggaaaggcccaatttgagcttcctcatcctgccagtagaccgtgcacccatgtttcccatttgttacaacaacacaacacaattttctcacttcctcaatgtccaaagacgaagtctcttcacccgacgcctttataaatccaatttgaggaagaaggtgataaaacccactctctttcaaatccacaagtttcacagttccatcaatggcatcaaaatcccgtatcaaagcctgaatatccacagaaactgtttcacataattcaagcattttctcaagcgtctctggcaaaatctccccgccgaccccaaccgccattccaaaattgaatcttgattctgggagatctgagggccaaatcgggtcacaagcgcagacccttttcaaaatccgatcttggtgcccatccccatcgatttcagagctgaagtgtgcatggaacaaagtggttttcgaatcaggcactacaattggttcatgatgggtcgaataagcgaagtcccagccaactttcgatattgaattgtgacaaaccaacacgccatcgaacacggcagaaatgaaggaaacagcaccgccgagagtctcggccactacaacatcgtctcggagaagaacatcatggcaatagttgccaacaattaggccccggtgtcggggatattttcggtccctcaccatgggtgggaattgaatcttttgtgagaattgtcacctacaacacacctaataatcttagcattttctaacaagacagaaatgataaataaagcaaataaaaacttagcacaacaattgttctcccaatgtactaaatttagttgtgaaaatacaggaaaagaaaatcaaagatattttgaatattaaagtaaattaggttgtttggcatgattaaaacttaaaatagaccatacctagttaatgtaagaccttcagaagggtgtgtgtgaagaagcacttgactaggcaggagaaatctttattaaccctaaaaacagcaccaacaacatttgattccaactcgtgtgtagaattcttggattgaacacattcacatcaaaccttacaatttaatttaaacatggagaaaagaatataattcctattttagtcacaccttttcagccaaacatttacttttctatggtttcattctcttgtttatatggccaaattaagtttgacctttttatgagtcaagctagtgtcttgctattaagcagagttatccaaacattggacttcacacattcatgattcatctttcacaaataccagtcagttccttggcatttctgatatacacgaaaacagtcagcatcaataataattataaatttataagtatggttctaacatacacaacacttgaattttgttcatgctacaatagtagtaattcagagataataatacaccgataaaattattacagagatagcatgaaaccaaatatagaacacccaatcaaaaccaaacttcatttctttttatttaaggtgtggttcagactcctcacaaacacattagatcgtcttatttactaaatgttaagtcgtgattttgcaagttttaaatcaagataccaaacattgtcaatcagtacgaattccacccataaaggtccttggatcaggacagttgccagtgaactgggcttgagagaagtcaaaacccgggttctgcaatttaaaaacaaagcgttaaaacaactggtctcagactaaagagcgtatcatgtcaatgacataacaaaaaaatgttgtcagtgcttaacttatctaaaagaccaaaaagactctaagctacacagcatcaaattactaaaatcttattagagtaataaaatcaagcaaatataagttcgtttaatacactaaaaaatatgaattctaaatttcttttagtaaataatatgaaagtgcttgtcatcttttacaaactttttaaaattggtttttttaaaaatatctacttaagaagtgaatgtttaaccgattcttgataaaatcctataaaatgaaaattgaaactaccggcccaacgaagaaacttaacacatatgcaagaactgccaaatattagatgtcataattattcatcttttaccaatactatcccatacaattttaaaattgtacagcataaaatgacaatgtactacaaacatttaattatcagctacaatacagtgctcagaaggtccaaataaagaacaagagatcaaaaatcaatgaaaacaactcagcacgaaaaataaatattagcattgcattatatatttgagaaacgaaccaaaaaccatggcaacaaataaagcacaaaaagaatgcactttgatcattttgtataaagacaattacatcatgatattacaatgcaatttaagcataatttacctcttcttgaaatctttgaagcatgagccgcttctgttcgagatcagtagcgtaaggatcgagttggccctcacccaatataggagaagcccaagtctggcctttgtccctcttctgtagtgttatatgcattataccatcctctaccaattgcggaaaaaatgacaattttttattaataaactatgaactctagttcgagccaatctatatacatgcacttctatagaagttacgcattggcatcctatatggcatttaggacctagtaaaactaaaacgccagtataaaatttcagccagtactttagtatagacccaaataaaaaactcaaaaatctaatccctaaaagtcatagttctctactgttgtaattcaaattcgtgatatttctccaaatccaaatgggcaactaaggacattttattcgaggaataagaaaacacaaaaaaaatatacctaaggtccaaaaagaatcatctgtcttcaccgggctagcaaggtcatgctgcgataataagactcaaattaactaaattataaaactgataaaacaccacggtgaacattaagtaacatgactaacattgaggtaaggaggattgcccttgatcccgagttcaacatgcttagactgaatcttgcaatagaattgcttggaatgaacgtttggtggaagagttatatacatgttgacctcatctagtgtctggtcccattcaaacaccttttgacctaaagaataagaagtgaaaatcaactgtttcagagaccaaagtcaaagaaaagagaatcgggactaaagataaataccattgtgaatgaagttgtggcgcttttctggagccagtttctcggccattgcttcttctttaatcaagctttttggtcgtttcgcctatttagttactctctactctagcttttgctttgtttctctgattatctacgagtagtgctagccacctagacaaaatatcacaaaagtacaccatgactcgtggcaaatttgttaatcttacgtgatttactaacgtgaatgaacaaaaataaaaaaatcgatcctaaaaaagattcttaagtttacttatgtaatttatatttaaaatataaaataatcaaaattattatttataagataacaagaaatatcgaagaagataaaagactgaaaatacttacctttcatatatagaagctttgtttatgaagaccacaacaatgctagtttggtttgcaaacacaaaatttacagaaaagtggtaaagtaaatgttggtaggtagcgtgcattagaagctcaaatggtaagaaataataattataacatatgtaattcttttctatcaaaattataattattttatctcttttaagtcagcatgttggccactatattgtgaacttttatttaaagaaatttgctcaatcaaccatgatgtacatttgtaacattttgtctaaatgagtacactacttaaatcaagcggaggaatgcagagaagagagcatagagggtaacaaaataggtgaaacaacagaagcacgactacagcagaagccatggcctgtaagttagctccagaaaaacgtcattgcttcgatcacaatggtatctgtctacgtctctattcttaattatttttctttgattttggtctgaaatatttactttatcacttcttattcttcaagtcaaagatgattgaataggactaaccttaaataaggtctacatgtatataacactttcttcaagcgttcattcaaagcaactctattacaagattcattcttgcaacagaattagaattacaacaatgttggcctcgtttcttaacattcaacgatggtgttgtccatttgagtttggagaaatgtcacgaattataattacaacagaagaagattgtgacttagggttaaattactgttttctttttctttctctaggtccatagtctatactataatattggctataattttatatttgggtttttaactttttatcacgtcttaaatgtcatataacaatttatgcataaatttaattgattataaaaatatatttatatatatagattggttggaactagagtcaaatggtagagaatagtatcatgcatttaccactacaaaagagagacaaagactagacatgggcttctcccacactttataagggtcgacttgatccttatgctactaatctcgagtagaaccagctcatgcatagattttaaaaaaggtaaattatgcttaaaatactttctaacaacatacaaaatggtcagtaatgacatctttgtgtgcttattgcttgtgctatcatagtttgggattgttcgcaaaatataatgtaatgataacattcttctttagtactcgattagcttcacttagttggacttcatgagcagtgtgctatagctcatgattaattgtttgtggttcattgtcattttatgttgtacaattttaaaattgtattaacacaaataattgtagaagatgtataaactttgacaccaaatatcgatgtttcttctatatatatactttaagtttctttgtcgaatcaatggctagtttcgacttatatttaataggattttatcaaaagtctgttacatattcacctcttagatagatatttatagaaagaacttgtttcaaacatagtctggaaaaggtgacaaacacatatgcttgtattatttactaaagaatttcataattcattttttaagggaacttaaacttatgcttgcatgcattcactactttcaataagaaatttgacatttgttatgtagcttatagtctctttgctttcttggataaatcaaaagcacttacaacaatctttcacactgcagatccaagttctaacttctctcaagccccacttacaattgtcttgatcaaaagaactttatggatgaaattcgcactttattgacaaggtttggtatcttgatttaatgtgtttgtgagtagtctcaactttgaaccaccaccaaacaaaaagaaatgaaattttgctttgattgggtgttctatacttgatttcatgctatctccctaataattttatcagtatcttgtaagtcaattactactagtactacaattactatagaatgaacaaagtccaaagtgctatgccaaggaatcgactaatagttgagaaagatgaatcataaatgtgtgaaaccatatgggtatattaaggtattaaggcatatgtttgggtaggtgtgggcttctaagtttggcttttaagttatttaggtttggttttttggccatagttttataagaatgggttaactgggtttggactatatgagattcgacttacttagtaggtttgggaataattcttagaaaattattagaattcaaaaccagctgaataagtattttctaattatttttggttggataatttgatcatcatgtaaaagaaattattataagcaaacacaatacagttttgaggcatttttacaaatttactcttatgatttctaaggtatactatagggtacttagatcaaaataatgtctgaataggcatttttactgtctgttgtgttcttttcatttaattcactaaactagctaattaacacatacaaatcagaattgaaacactaaatacattaaaacaacaaatcatcatcaatcctaatccctttataggattaggattttatgtaattagtaacaatgataaatacctcaaatccaccaagccaaaaactcccaaatctcaaatccaaaccaactgggataaatcaaaacctccaaacaaactgcaatcaagcattataaagtgatatacatagcattacttcactacattttttttttataaatacaaaatttagacgataatttaataaactaattaaacccacatacctcagagagaacgaaaatggtttgggggtgcggctggctgctataacttaaagatgttattagggttaatacatgtatataatatatatatatatatatatgagaaatctggtggtgtagtgatacgtaacggtagaatcacactagacttacaagtgttccattgataaggtttttgtgtttgcgatttgggggattttctagggctttttttggtgttttgttgaatctggagattgaagattggagcagtcacagggttttggatacgtgtttgattttgaaattggttggttgtttttttatggtaaaattgtctattttaaattatggaaaattctacaatgcactc

SEQ ID NO: 14377 - DNA, 3375 bp, Cannabis sativa
taatttttattcaaaaaaaaaataatattatatttttagatttgaatttcttattcgaatgagccttaattataagaaattaaatatttttttatagtagtgtttattatattaatagtatcattaaaaaaaaattaaaattttcacgataatattgtaactataaatagagatggtaattaattgaaaaaaaaaataaaaactgaaaaggagataggaaaaaccagtaaaggttggtggtgagctgtttggaagacgaggagtggtcgatggcccagtctcatgacgacagcagtagtcgcgaactgcagcgtatttcaggctcaagacgaacacgttcccagggggcgccggactggtctttgatggactcgcttattcttgtcaatgagatcgccgccgtcgaagccgattgctccaaagccctatcttcctatcagaaatgggtgattatagctgagaattgcaccggtttgaacgtccccaggaaattgaaccagtgccggcggaaatgggactctcttcttctcgactataataacatcaagaaatgggagtccaactccggagatagtgtttcgttttggtccattggaagcgataggcgagaatctctaggacttccgggagacttccaccacgatctgtttttagctattgagagtctcataatggcgcgagagaatcaaccggatacggaccctgaggatggcgatgatgaagctaaagacgatatggttgatctcgtaaaagagctaggtaattcttctcatatatgctctgaaatgtatatttttgctacaaactataagtatggaaatgcaatctagttgttaggcattcacaacaattatgaaaaggctttatctgtaattattctagtgtgaggtttgagaacccattcatagcttgtcttctgtagtaaaagattttatcacaacgcatttccataaatttggctgccaatttttacatttttgcttccataatttggagcttgagcttgttgctcttaaaaggcttcaatagatttaatgaatttttcgagcctagaaaagcgacaaattgatagttaagaaagatcacacctctttagggtagagccacacaaatgataaatgaattttgaatacccttttgccatatcatgcaagttaagttttagtacatgcatatttgagcttgattttgttccatttgttaaaggtctagcattagagtaagtttcctctacaagttctggaattaaaatggagagagttgaagacctttatttcattatctgaatttgacagcggtcctctttttgttttacttttgtatgactagttgtgtcatgtctctattgtttgttccttcattaaaggaagcttattattagagtacgctcaaccaagatttcagtcatttaattcgtctctaatattttaccacattttaaatattcaatcacggtgtctgcgattcgttcaaagaagctaaatttccatttatgctgagtaatgtgcaggtgcagacaccgatttatacaagcaagccaaaggtgcggttgttctttaattatttatcattttaagaaattttttctttatagtcacttgaccaaagaaaaatggttcttacaccaaacttccttataacagcagcaaaaactttaagaatatcaacaatttcggaagtaaaagaaaaaactgaacgctatgtaatatatgtatgctcaccacttcacctccataatgatctgctatctgtccctaaagttgtaaattactcaatttgctttgtttgatgttcttggatgcagaaatggaaaaactatttgtgtaaatcatctcatgagacaatcaatgaaacaatcagacttcagacagatttagcctttatcttaatcatattgtataccaatcatacagagtttctacaattttgaaaaatgtagaaaggttgtaaatagccacccacagttggagttacaactctgtttacaataacttattagcatatagaatcaaaaattcagccgccaatattcttaattgaattttggtttgagaacattacaagttttactgattttgagtgatgtgatggcatattaataatctttttgctttggtgtatatgtcatgaagagggatgattcatgttctttattgaagtttttggtgctgtttctccatcaacacatgtaatactaatttttcttgctttttgcattgttagggtctaagaggcaaaggaggagatcaacatctcaagagaactctgcatggaaaagcctttccgaagaagtatctataaagagccaggcagaaacaaaagctcctggatttcacgttgaagataatcctgccatgaattccatagaaaaaactcctgttagaagctcttcagatttaaggccacttgatcagacgagtacgaagagaaagtctcaaaaaggtaatgtggttgaaaatgagaatcatgagacagctgaaacagaagatgagaaagaacaaagatttgcacaaatgttgcgtgaaaatgcagaaatgattagctccattgtttctgagaatggaatgtatggagttggtaaggcggagaatggtgaagttggccaaaccaaatcagctgaatatgttaggcgtcaaggagataagctgattgcctgccttggagacattgtaaaatcccttgaccatctctgtgttcttgtccaagaatgtgaataatttaactgtagtagtcctcaaaattaacatgagaacaatatatattcttttttgttacattagttaatgttattgtagtgtaaatattgcatctgggttctcttaccatgctctttatcattttggtctgaaattgagattttattgctccttgcattttttttttaatttaagcgtttatatattacataatacataatttgagattcgaatcaaagacctctaacacacacgcacccttttatacatttgaagttaaagtaaaatttgcttatgataagtgtaaggtaccgcatttttaagtactacttagacaaatttttcaggatcttttccattatcaatgtgttgatattataagctatatatttaggaattttatcttttcaactactaaattttcctttgaactattcagtgtgttgaaatatgggacttttttttttcgagggtatgaaatataggactttcacgtgttaacaaaatattgatagagttgatgtgtcattatatcagtaatatttcttattaatagttaattaaaaaatgaatttcttaaatttttttaaaaaaattacttaagtgtcgtttggtaacacttttttaatcaattttctatttttaaaattgaaaaaatgaaaatatttttcaaaaacat

SEQ ID NO: 14378 - DNA, 4203 bp, Cannabis sativa
gaaatattagctatgcacagtgtcaagtatctttgaatactgacaacatgaaaccaactttgaatttcaggggaggtcattcgattacctaaaggagcttcaattccagtgacactcaaagttctagaatacgagcttttccatttctgccctctcaaggtgagttttagagaggtctcttcctccctactccctcattctattatacacttgttaatgacattgacattctgcattgcaggaaattgcatcaaacatttcatttgctccaataggcctactcgagatgtttaactcatccggggccattgagcagtttgatatccacacagcttcccagaaaccagagctctttgatggtgaaatttcatccgagctgaccaattctctcaatgacaatcgatctccaacagcctcaatctctctcaaagtcaggggatgtggacggtttggagcttattcttctcagcgcccactgcgttgctccatggacaactctgagactggctttgactatgactatgatagtggattattgacccttgtcatcccagtcccacaagaggacatgtacagatggcatattgaaatccaagtttaagttcagaaaaattaacagtgtctcatcatttagagtatggtatttgggaaaggtcttgaattgggttatacctcattgttgttgtaatgtgtgtgtgtgagagaccctatggagaaacgacctgtttggattggttttgtcttgttagtgttggtgagtcactatatgcaataaaaattgtcttatgatctttagtagaatgtgtaacttgtgtcataggtcctaatctcacaactctatctctattgttgtaaatatttatatgtagtattatcaatgtggtccattaaatgcttttgtacaagcctaagagtaattgatctttttaaatgtctgaaaagttgaatgatcttatactacaaggagtattttttttatctaatccttattttgggtgcatttgatttttatcaagtgcaatttgattagtttttaacattagattatttaatattttttacattactaataataaaataaaattaaattagtattattgttgtttttttaaataaaataaaaaataacaaattcttaaatatttaattttgttttaaattatattttttttttatatataagattttcaaattactattttttatttaaaatattaattatatgtgtaatttttttaatatataatatttatgaattgaattgtatctactagtttcacatgtgaatcaacattcaatttgcacgagtagagattttggattgtccaatctaattcaatcagcacaagtgcaaatatcagcatattttgtagattggaacctggttttgattaagtattctagcaccactatcttatacaagctttcatcttcctagacaaccaaaatatgagacaaaaatttgttttacctttctatttcaccagtaatccttacaagtacaagatccatcaacaaatttatggaatctaactctatctcttataattatttccctctcaaaacttttgcttataatcttcatcacttcatggcaatcgccacaaattctatgattactcactattctaataacagcaggtgcttttgtcttccataatccataagcaactgctagcttctcactgtgctcgccgaaagcactctctttctcttcgtcaaccactctgcgtagtatctctgtgacactaggtttgtatccagtttcagagactcttacagaaatgtctcctaaaatttctctcaattccttggcgtctggatgggatgagtcgttaattttgaactcatgaacaataccgcctatctctatggagctgtaggcagggatgggtttgattcttttctccttcatctccattctaacaagacgcatcttctcccactgagaaactgatgcgtacaaactcgagaggaggatgtagttatctgcatttcgtggttctaattggagaagacactcagcaatgagttcacctttcactagcaatttattcttctcacacccaacaagtaggcttcgccaaattactggatttggcgagatgatcatgttttttacaagactacaagcttcatctacgagaccagctcgacacaatagatcaaccatacaaccataatgctctgtggatggtttgattccagattcaatcatgtgggaccaaaatcttcgaccctctgaaaccaacccgcagtgaccacatgcggataaaatgctgctgaaggttaaatgatcaggcttcacctattcacaaataatgagattgtgagaacaaattcctatcctaatgacaatgcacaaaaggaatagcaataaaatattattctagtgacatactagtacactattgttccattcctatattgaaagaattagaaaataggaatcttattgctatcaaagaaagaattacaatttttccaagcttttctagacacttggatatctccctgagtaaattttacacttaaatagtacaaatcaattcttaatccttcaggattaatcattccctctatttatactaattcatcccttactgttttaagctaacaccttaggacagctcacttagaaatatttcatctcaacaactaagaatcaattaatttaagggactaatatcatggcctaacacatacttactgctaaatgatgagtttaactaaggtaaccttcaatgcttaaatataatcataccttggatgcttccatcatagcaaagtgttttaaagcttcttgatataacccatgaatagataatcccacaatcattgaactccaagctttagtatcttttacagacaatttgttgaaaattgcttttgctttttcaatacaaccacaccttgcatacatataaacaagtgcagttccaagctcgagatcaatttcaatcctatgcttctctatgtaagcatgaacccacttaccaatgtccaaagaatcagcccatgcacaagccataactacactccccattgttacctgatcaggtacaacacccgccatttgcatttccctaaaaaacccaaaagtctcatcaataagtccaactctcaaataagcactaatcatcacactccaagcaaccaaatctctctcagtaatttcatcaaacaccaactgtgcaaaacaaacatcctcaaatttcacatacatattcaacaatcccatttgaacaaaagaacttgaaccaaacccagatcgaaaaacacgcgaatgaatctgtctaccttcatctgaggccataacaaccgaacaagccttcagaacaaaagccagagtaaaagtattcggacccgggtaccctttttgagtcaattttttgaataaaacaatcgactcttttgatgggttttcaatttgagaacaaccccttatcatggaattccaagaaaatatgtttgggcatgggattcgagagaaaactgttcgagcatatgagatgtcgccgagaggagaaagggagcaaaaagctgctattttggataaagcaaaagagagtgaggaaatgggaaggaagcgagtgaggatgtgggcatggatttggcgaaggagtctcatgttgggacattttttgaggagaaaagcgattcgttcttcttcttcttccagctcctcctgctcttagtgttcttcttcttcttcttaactaagcttcaaaaatggtctttttattattacaagttttttctttctatatcatttgaaggctatagagtggcgggtatttcttatttgattttaaattatgtttggacaaaataggtttttgtgtttaagattatttatttattttgaataattgtgtagttaaagtttatgtttgtaagtggatttttggtggagaaagaaagaggtaaggaaaaaaataaataaataaataaataaaaaaataataattttaattgtttggtattgaaaaaaaaaaaattgagaacaaatttctcatgtcaaatatgaaaattgattttttatttttatttttagtattgttttcatacattttttttttacttttttcttttccaactaaaatctaagaatttaaaacctaacaatatgtgaaataaattgaaaggaataaatttcttattctacaaattagagatatgatagaattttgctctaatttt

SEQ ID NO: 14379 - DNA, 3980 bp, Cannabis sativa
ctctctctctctctcgctctctctctctctctctccccttggtggttctcttgcgcggcagtgctggccacggaccaccacgagctctagtcttaatcaataaaatattccttccattctttgtgcaaccacaacggcaagaccacgacgttcttgcgtgatggttgtctccaatcaaaggtggtgttaaaaaacgagctttcaactgcgacgagagaggaaaatcaaaaatagagagggagaaactcagggttttgggatttgggaccttgggagcatgtaactatggtccttttggaccatcgatggccgttgtggttgcacaaagaacaaaagggatcatcatggagaaagaacaagaaagagggagagggaatcaggattcttggggttttctctagggttaaggtgccgtcttcgggctttcccaatggttggaatgacttgccagagctggtctctaacaccaattcgatttctaggaagaagaagaagaatatttttttatgatttttaaatatttaatttatttttaatattttaattagtaatattatgtagttcaatgaaaatttgtcacgtgtatgtttttgtatattgtggtagtttacattagtatttaacaaatcaaaatgcacgaaatagtggagactaaaacaaaactaaaatttagaaaattttaccccaaaaatttaataataaagttgatggtgacaaactccaaagttcgttttaaaagatgtaataataatagtactgtaaaagaatagatcgcaaaggtccggtgaaagagagaggtatgcgtaggtgtcttgatcgatcatttagcgatagagagagagaggtcgatcaataagtgatattgtttgtcactgaagtcaatcactcagaacgaagatcccacatcaattggatggcctacaatggaagacaaatcccaaagtttaataaacgattgaccccatgattctctacaggttgttagggcttcggtggttgtgtccagtttccatctccaatgtcgttagtctttcttctccagtgacgtgctttgtaagtcttcgggttgtgacgtgatgagcaccatgaacgacgatgatctcgcgacgttctacaaagaaatggctctcgacgatgacgaggccgatattaatattgatgtggttgaccagtcgctactggatgaaggtgtgatggtggtggccaaaacgatcgtgggtagggtcatctcaacacactccgttgattgtaatgatctgatttacgctgtcaacaatttctagaaactccagggatcctttacggtgaaggctcgaggtatgaatatgtttgtatttcattttgatttgattacggatcggaaaagggtcctagagggtgggccgtgggtatttaaacactgtctcttggagctcaaggaaccagatgatgttttggctccgacagagatggtgtttgattacgctctattttggattcatattcataaggtgctggtgtgttgtatgacaaagtcatggggctttgagttgggaaaatcgactggggaggttttggatgtgttgtgtggtccgaatgggctttgtacgggggtgtttatgaaggtccgagttagtgtcgatgtccacaagcccctcgttcgtgtgatcagaagacgtttggcaccagataaacctctattatagatgctgctaaggtatgaacgacttccagatttatgttaattttgtggtattttgggtcatccttttaaagaatgtcttttaaatccaagctcggttggtggcaaggatcaattaaaatatggagattggattcgggttttgttctcgaacaaggttaatgggcacgtttctaaaagtcctcggggctgtgcattaaatgcatcggcttccgcggcgggggttcaagtggggaaggtgagtgacctcatgactgttcagccattggagggtggtcggctgtaggaggggctgagttgaaatcggttgttaatgatggtttggggaaaggcaagggtattatggtggaagattcagtaaattggcatcccgtctcggatgcatttattgctcaggatctgaactctctacctgttttggataattctttttccaaaactattgttgatggtctcgatttggatcatggctttgtgggggatgggagtgctagttgttttggttcaactaataatgagaataaggtgactagtgtggtgatggtggataaaggagccaatgataatttagatgtggctactatgcatggtggtacatccatttcttcccatgcaaggaagaaaataaaaaaaaaagtctctttttcgaataagtatggtgttttaaagatgaaatctaagagccccaaaaaagtttttaaacatggtttaaaggatgaaaactgtttggcaaatgttgattcttctggtctacatgaggttcaagttgacatagttaaagatgcgagtgacgttccgtgaagaaggtaatgtcttctattttacctgttgtggttggcagagatgttgtggtcggtttagattcggtggaccctgtggagcagggccaccgagcattatgaattctttggcttggaacgttcaaggtcttgggaatcaccgacgttccaaatccttagttcccatgtcaaggagttttcaccaggcattatttttttgtcgaaaacacttgtgacgcattcagtgcttgaagtgatgcgggttagattgggctttattggtaagttagtggttgagaaagtcagtaggagtggcagattgtgtctattctggagtattaatgttaatgtggtgcttaagggttatgctcgtagtcatattgatgttatggtgtgctctcatggtgatctttggtggcgttatactgggttctatggccaaccggaggcgcaccttagatcccagttttggtgtcttcttgagcggttggctgatgggtattctggaccctggttttggggtggggactttaatgagattcttttttcctataagaaaagtggtggctcggtccgtgctcaaagtcttatggatggttttcataatgcattggcaaaatgcggtcttgttgacatgggttatgaaggagctcgtttcacgtggtgtaataagcatacgagtggctcatttttgtaagaacgtctagatcacatggtttgttctagtggctggcactcattgtttccgaattcctatgtctcgcacctgaagctttgggggttggatcataggctcctcttgactcgcatcctccgtgcttgtgaatctaggaaacgccctaagcaaaaaggccggtttcactttgaaatggcttgggaaaatgattctggttgctgggaaattattgctaaacattgggggccatctgagttgactaatattggtggtgtgcaatagaagattaagtgtgtttcgggggctcttaatgattggaatggtatggttttttaagaggacacgcgaggctattcgcaagaagaagaaggagctagaggtgctggactctaacttaaatgatagcaattggttgtcttataagaaaatggaaagtgagcttgatgttctgctttataaagatgagaagtattggttctctcgtgctaagtactcttggtttaaattgtgtgacaaaaactcagctttctttcatcaaagtgctactcatcgtaaaaaagaaaaatgctattggtggtattttttataagaatagtgtttgggttgagtcgccccgtggcatcgctgtagtgtttgaggaatatttcagctctttattcacctctcatgatcctcctaatgaggttctatctatggtgttggattcgattcaacctagggtgactaatgagctcaatgatgtgttaatgagacctttttcagaagcagatgtgcagattacgctgtttcaaatgcatccaaataagagccctggtaaggatggtaattgttgggttttgtgccc

SEQ ID NO: 14380 - DNA, 17189 bp, Cannabis sativa
aaccaatggaattgagtggaaaacaaaaaaataaataaaaaaaatgggtaataacgtacgtaggtggtggtgagcgcagaagatgaggccaactgaaattcggacacgttacaacaacggtacaaagaaatagaattgactttgtgtgtgtgggattgccaaagcaacaagcaattgcagcaaaatcattttaaattactaaaatacccctaaaaggtctaaaccccgttttggactttttaccaagttcaaactccctcctcctcccgctcttcctcctccttcttcttcttcttcttcttcttctcccccaaccacaaccatagtcacgcgctcactcactccttctctctctttcgttttcatctctgtttaagttagagaaacacaatctctctctctctccctctttttcctagttctatacagctctttggtccgccattgaagcgctctccctaaaacagagtaaggtcggctcccatttttctttctcttttacaccttactactactactacgccgtcttgataatgagctggactttttcctttccttttttttttttgaaacgtcgtcgttttttttttttttttattttatgccggtcgtagatcgacgctgagcagtggattctaatggaaacttcgacgttttcgagtttcgctacatagatctgcaatgctgttaattttaatgtttattctgtttcttcttcttcttttttggtctgttagtaatgaataaaatttagattgaaatttttgttctgattttgaaattgttgcgtttaaaggcgcattccggtctgttttttcatattaatttatatatatatacatatatgtagattttatttttgggtgaaagtttatggtagccgacttttcagaaataaaaagaacatgtttttttttcctcctttatttgtgattttaggtgttttgttattgcattttttttcctaaaaaattaatcaaagttatgttagtatttctctaattttttttttttttttcattttttcatcaattggtgttcatatttttctaggtagcttcagatcattacaatgtttacactattacttgattttattaagctaacaagcgttgtgcaatgcaaagtgtaaaagctaaaatgagctcactaaaatttaaccttcaagttttgaagatgagtttttaacattttagtttatgggttaaacgaaaatttaggagtatgtccccttctcagttttttttttcctattcattgcaaatgaaaatcgagtataatattatgaagacataaatattgggttattacataagcctcttttctttgctacattcagattttacactgttttgacaaagaaacgttattaacagtgcaggtccaatgaaaaggaattgagttttaaaaaattcatgatttgctctcggcaagggcatgcaactatgagtgacgaaaacacaaatgttgcaaattttgaagagcttggtgttcgggttacacgagcgcgggctagagccttgggaacatctggtggggtgctctcacaattgaaaccttcacaagaccagaggcgtgctcttagagcaaagtctaaaagagagaatctggatgagaacaaaccttcaacggttgcccctgctagcttcaagcataaaagaagagctgtacttaaggatgctaccaacatttcttgtgaaaatcccaatttcaacaatgtcaacaatgcatctagcgttaaggtatatatatgtgtgtgatgtgatcatgtagtagttcacaaatgtgaatatcttttcactcggtttctaatggtattgcattgctccttgacagactagaaatgtagatgagaaaaatgacaagttggctgcaaatgactctggagacttgctgcctgttcatgaggatgcaaaaacaaagttagctgaggaactatccaaaataaaggtggcagagtcggaagatttcactaagcaagtaaagttggagaaagatgagcaaggtcccaacttcaaacaattcggtgttctcaaaaaatgtgcaagtaaagatgagaaagatgatgctcttcgattctcccaaagagaaaaaggtcattaattgttctgttactgttctacatacataatagtacgtgtcttggtttgtcaataaacttgttgaattggtggttttaagtaagtcggtagtatatagttaatcaattacttgttcttgtgtttgtaatatgatgttgtatcgacttgatatgtaatgttagagcttggagttcttttaccttttgcaactatgggttgattgttaacagtttttttctggtaatgtgcagaagaagatgaggttttggagataacacctgcttcaaaagaatcagacattgttgacattgactcagacgtaaaggatcctcaagcttgtagcttgtatgctccctatatagatgataccagacgcattacagaggtttgttatgatgccatttgtttaggaaatgagggttaggatacttgctgtgacattttattttttctgatttgagttttcaaagttattcacttgcaactgatgtccttgcattagttttccattttatgtcaatatttgaaatgaaatgatgctttttcacaaaaaggaactgccaacacttcctttaaccaatcatcaagaagaaaaattatgattacatttcattttaggactcctgattgaattgaattgaatacccttttcctcctcagctagagcgaaggccatctgttaattacatggaggagttgcagaaggatatcactccaaatatgcgagcaattttgattgattggcttgtcgaggtcagtatcttttttttacctgcaaaatttaaattggtattaccacatcaaggcagtttgagctaataaaatatagctcatttttcaggtttctgaagagtataacctggttccggatactcttttcctcacaataaatctgatcgatcggtttctctctcacaattatattgaaaaacagagactgcagctacttggtgtttcttgcatgatgattgcatcgtaagttctgtaatatgtcactaccatatgggaatgtgcatttttctctatttttttttacgaattatcaaaacctctaatctttttcaagtcttttgggttcagattatagttttattatgaaatatctgtaactttatattatattctcattttggtcaagtgaatgggatgacatttggtagaaacaagaacctttatttgctgcccatgtggttatttattatgttatatttttaaaattaacaggttgagttttcaatttcaaacattttgatcgcatttagtagtagtacttcaacgccaatttttgtctttctaatgtttgcttctttttccaattatgacttgaagaaagtacgaagaaatctgtccgccacgagcagaagaattttgcctcatcacagaccacacttacacaagaagagaggtaatctgattgattctcattatcattaacaaagatttatataagatttgaaaataattttacaaattcataaagttgaaacatgtggacaactacagtgctttgttgattatctgaaaaacacatgctaattaaaaaaattcggaattttctttattttacccagaaaatatataaccaatcaatttttaatcttttatttttaaaaaattagtttacaaatatataaccaatcaatttttaatgtagctatgctaagatcctactgaaattcgcaggtattgaagatggagagtgaagttttgaacttattgcactttcaattatctgtaccaacgacaaaaacatttctaaggtagtgtattttgctgtcgtagagtgtacgtatatatatacgcatttcttgtcaaactaccacccaatgtgtaatgactgaactagttttgttttccaggagattcattcaagcagcacaatcttcgtacgaggtagtatattaatgagctagtttaaccgctaaaagattagtttcaatgtagaacaagttgtaattccacgtaaattaatctactctcttatgcaggttccttgtgttgaattggagtttatggcaaattacttagcggagttaactattgttgattacagcttcctaaagtttttaccttcgctcatagctgcttctgctgtgttcctcgctagatggacactcaatcagtcagaccacccatgggtacgctagcttcctttttcttttttcctttcaaaatacatatatagaaatgtatctgaaacatttccgtgctcatttgcagaattctactttagagcactataccagttacaagacaccagagctgaaatatgcagttcttgctatggaagacttgcaactaaacaccagaggctgtcctcttaatgcaataagagaaaaatacagacaacatagggtaaggttgctattatatcaaaatgaagtgaatccagattagaactgtttgcaattgcatagtcaagtgttgcccaaaaacatatatcctatccttaatattgtgttgtattaattatgcagttcaattgtgtggcgactttgagttcaaaagaatcggtgggatcacttttttcaagttctgagaatgactgaagaacatatacactactgatttggaactgggtatggaacttggaaggtgatcatctagatctcctaaacgggaaaaaatcttaacttaattctaacgtaattgttgttccttttgtcgtattaacgtaatctttttaggtgcataacacattgaaaagacactaaactatataattggcttgtgccttgataattccttcaagcttagttgtacatgggaattttggtaccaactgagattttgtgtgcacacagttctgaggtgttggccacaggaatgtagctactactttaatatcattcttgtaccccagattattacaatagtaagtaacaaaagaaaaagaaaactgaaaacaatatcatttatttcttgtgtcaacatgatctatgttcatcgaaacccttgtacctaatagacacatggctcacacatgtcaaagagggtgcttattcatattcaactcacctccctgttttgtgttttatgggcttttgttttttatttgtacttagtagtggtccctaaacttttcgagtgtgttactgacctctttctggatttggattttaggaatgaaaaagaaaatgggtattctagatgttttgttttttctaatttggattcagaggagagaatctttttcttttaaaaaaaatgactggtaaatttaatttaagtttttaacatatatattttagtctgttctcacaaatatttttgaatatttgagctccaaataaaaccttataaatttcaacaccatgtaattgtatacatagatccatgtgtaggcagtttccccagtttctcttttcaactttatctgtcactctctttttactttccctaataagtgaaataaaaggtgttgagcatgtgttgggttttaaaattttaaatgattagaacatactcacattatacatgtatatatttacgatccactataaaagagtgtattaatgcatttcttcgtagttttaataattaaatagttagtatgtgttatagttatttaagatattttataaagttttagatatattaaaattatttacaatataaaaaataagaattaaatagtttatttacatacctataaaataaaagaagcatgaatgtaataaattgtttaaactttaattttttatgcattaaacctttttaaatttttcaaaaatttgtagaatgacttagataattatgttgtacactatcatataagaataattaagatcaaaactatctagatataaaaaaatacaaaaaagatgggtctaaggttacaccacaaaatttccctataattagttatgattcattaaaaatgatagaaaaattctacaatacacccttatctatttcgacattcgagagaatttttcagtttatttttttcatagttgtgtacattgtagttatttaagatatcttacaaaattttgagaaattcgaaaaaatttaacatgccaaaaaatagggttcaaacattatgttgcatgcacgactcttttatttgatatgcgtttgatatgcgtatgaaataaattgtttggacattactttcattactttctatattgtaaattattctgaatttctcgaaatttcacaagatgaataactataacgtacacgactatgaataaaaatagactaaagaattttcttagatgctgaaacagataagggtagaggtgtatgtcggtcggtttggttgagttatagcatatttttactaagccaatataaatatcggtttgcacgtatttaattgtaacccacctaatcaaaaaaattagaaaaagtttaacctgtctaataattttgtaggtttggtcggattaacccgtcccaactgatcttcacttagatttttatgttttttataattattatttttagtttctagtattcaaataattagatttaaaaaaataaaaatatattaataatatttcaaactaaaaaattctatagtataagcaaagtagaccagggagactaataacagatgtacaataaccatcatgagaaaaacagaatacatgataaacaagacaagaatataaacgaaatgcgcgagacagtatgaatgttctcaacacgaggaagagatacgatctcaacatgcttgcttacaggcttattatccaaaacttcattgtggatgaccataacggaggtccaaacacatacatcgcgagaaatgcctcatcgatgctatgcgaggtgcgcaaatgaaatagtggttcagtgaaataactgttttagataagttgaaatagcggttttgagcatttaatatattttttctacatgtagtaaatcaaatgaaacatgggaattgtccacgtttcatgaacagttatgaaaataagaacgagaggaataatcgtcgccctctaagcattataaataggagaagagtttccttccaaaaggggaggaccaattttgagaatacaaaaatctttatgatcaatacttgtatgagactggcactctgtataaataaaaaaactcaaaaataagatagattcgtgaactatgaaaatttaactttaaaattacgtaaaacttctttgtctatttgcagtcattttctagttttatttaattgtcaaataaggttcatttactagttaacgtaaataatacaattaatgacagcctaataccagatttccaaaaagcaatgtcccaatacggagaaataaaagaaataaatggagaagttaccttatgctacagctgttggctacaattatgtgcctaatggtgtgctcaagaccaaatttaacacatagcattagttgattcagtatgtacatgtcgaatccggggaaagaccattagtttgtaataaaatggttgctgagatatttgattggaacaattgaaaaggggctggtttaaaagaaaaatgaagaatatgtgagcttggaaaggtatagtgactcaaattatgctggtgagaaggatacaaggagttctaccttagcctttcaattcagggtgtgtgggaactgtgttagtggcttactcgttttagatttaatctctttagttgtaggtttttttttaattgctaattattaatggccattcccccatttggtgaggatatatggaggtatgttagggagctaacagattctcagaaaagcatgctagatgattgatttaaatggaaggttagtatatctttgagctttgaatttcttttcaattatgttatgggtttaacttttaaatgctttgtttaggttaatttgaaaggtggacaaaaaataaaaggaagccatagctgatttgagtttgagatttttcaagatatggataatgatactctaattttgaaaaattcaggtttaatttataattcaacaaaacagaaagtcagtcaatcaataacatttgtagaacaaacatacatagagtctaaaatgatatttatccatttctaattcatattttagtggggtttaataggtatgtattgtagggtttggtttttgaccagtattgaactagaattttactagggtaacttgttaaggcaaaatcatagataaaaatagaacaggaatgataattgatcctttctttagagaatgttatggtgtggtggccaagaagaactccctattatttttaagtttatagctctttgatacatacacatctgccatttaatgacattttttttaagaacaaatatcacagtataaattaaaggagagacaaatcagccattacagcttcaaatgccataggaggaacactcccttcccattctgcagaatccttatgcaacaaggcatatttttttttaattggtagacattttgaaattagtaggtgaataatgattattatgtttgatatataatgtattttatattattttgtttggcatattactataattataattaattaatgaatctcaaaaaaaaaaaagtataagtaaagatttttatactgaactcgttattgccagtggcactgcattgcaagttgttgtatagttttacttctaaaaaaagtaggaataataataatttgaatttgaaaaatcaagtactatctagtatagaaaatcgttaatccatttaatggccccttcccataaacttagccaggcaatgaagtgtacatggtaaaagaaaaaacaaaaaattacaacaagaagaataacaggctgtcgtaggaccattaacgggaaaaaaaaacatataacatcccaacaacagccatttgagtacaaccttttcttccaccagggaccaaagaacaaactgaggaagaacactagttcaaaagttacatattctaacatgaaatcgaagttgaataaggagtaaccaaaacagcatttccagctattggctgaggtctggctgctttctctagccgctcccatgcttctttccgcttctcagatgccaagcttagttttgcttcttcctccttaaattgagaatagcaggatgcaaacagctcgtcgtccatctcgattaacatctttctcaggtttagagttaaatggagcactcctgggttccaatggttctgggcattcctttcaaggactggtaaaataatgggcaatatttcttgacggttatgcgcaactaagttgacaatatgatcgttgttccaaaagaaaagagccctttcagccacctaacagaaaaaattgacaagttgagccatttcttctaagaaattataaccttaagaaaagcccaacaaaacagttatcaaagagactatttaatcagctcatgattatacaatatctgtagttttcaaattggatgaagcaatgtaaaaatgctaacacttttccatcttaaatgaaggcaatatgcactagttcccagtatgaaaggctgcaatgtgttaagaatattaacaatgaagaagacaaaccaaaaggatactgacacagtaaaaaactgtgcagccaagaaaacagttttccttcagatagatccatctttttcttttaaatgagaaaacaacacaagagtatccacctaacgagaaatttaggtttgtggatagtgatgaaaggcaaaattgtggggaaaagtacctggaagtggaaactgttaatgcagcatccaatccgccagaacaaagggaccatgatcttttgaaattccatcatactaacagcttccaaaatctcttccaacaaacccaagaacattacctctttctgactatttgtgaccggccaacaattcaacagaccctgtataacgatggtcgccaactttggctccttctctataaattgtgtaacacagtaggagagttgttggaagtaaacccccaaagactttggcctatgcagaggaatcaaaaccctccgcaagaatatcttatgctcctcctttaaaggtaatgcaaatccactaatgatactcccatagatctccaatacctcagcaatcccattatgtttctcagtctcaaacacaaaccggtaaaatacattgtttatagacttccttataaatggcctatgaaccataaatttcccataggtcctatgaagaatagtctttaagcagtctctttctctaggatcctcggaatcaagcaaatctagcaatctcaaaatgaacgaatgatctatgtactttttcgctatcttggcatcaagacacgaagaagtaacaaatttaagcaataactcatacacaagttgcaaatgtggccacgccggatcaaacattggctcgtcgtcatcattttcaccaccggcactcgaattaaatcgacagttagggggaaaatctctaaatagattaacagcacacattctacacattgcaaggattgcaggctcactaaatttcatcgacctagatgctacaaaatccacaagctcaagtaatgtctgtctcttaacatctttctctacagtattcttactagggtcagtgaaatcgaatgtgacacaacaaaggctaaccttgctgacaaagaggttcatcttctccgcattgggcacgtccttgaatggcaataagggctcaattccagccaccatgctcgccggaaacacggccgacgatgtgcgcttcgctgagtttgatcgagcagagctcgaattcccgccattgggtttcgaagcgtcgagcccagaccccgaagagccagccctagagttggactgcgaacgcggtgagcatgatcgaggcgactcctgcttagcagccgagtcagatttcgccgacttcctgggaagtttactcagaaattgcttcaacatgatgacgaagacgacggaaccaggaattcaatcaaacccaaagtagcctagatcaatcccatgagagtaaacagaaaaccctaatctagatcttggccatggatctgggttagtgtacgaaattcgaggaaaaggatcctgatagagatggcgtatctctggaattgcataggatatttatgaaaaccatattggctacgcaggtaagaaccgattttcgacgaatctgaaagaacagatcaaaccccagatcctaactctactttgaatcccctcccattatgctataatacgaaaagctacgaaattttgccccttgatctcaactcaagggtttccaatatcaccgttacccaacaaatacttcgaaaaaaaaaaactatatacaacacagatacacagatttgtacatacaccgaagagaaatataataggttgaagatggaacctgaaagatagaaattagattgaagtgtccaaagatatgtagatcaaaggagttcgttctttgagaaagaacctaactctgtgtgaggccactacttcgacgttaaggtaaaaaaaaaaatgtctggcgtcttgggcgatctccgtgaaaagaatgtgtgcgtacaaacaagaacgaacctttggggttttttttttaccactttttcttttttgggttgctttcctcggtcgatgagaaaattttggcattttctcggaaaatgcaggcggttctttggactcacccacactagattaattttttaataatttgttttgaaattttggtaattacttaaaaatatatctagtaagaacctaccattaccatattctttttcattaatcaaattaaaatgtcattaattattttttaaaacattcttattaaagttgctttaaataattgttttggtgcactttttatttaagaaatttttaatctattttatgatcgcgtttgttatagttttaatattatgtatttttttttttaattttttcaaacttattgccgtgttagttatagcttaattaaatttgatgcgataatttgtaatgtaaaagttgagatttttttttctttctttgtatgaagcacgtttaaagtggtttttttttttttggacaaaattaaagtggcacttgtttgagtgaatgaaatgaatttggcaatttatgtatttgtgtcgtattttggatcaacataattttaatacgacacgattatattttaacatgagcacgatacaattaaataacatgttataaaatgtaaacacaaagacgatacaattataaataggttaactaatgacacaacacaattaacaccatatttaaacatgttatatttagatcatattaatcttaattaatacgtcacattttttatctatttattacttattttacccacataaataaaaaataaacaaatatgtttaaatttattactttaacatgtataatctattagaataatttttatacggtaacaaattgatttgatttataaaatatgattaattaaaatattttaattgtggatagatttaattaccaaatattttagttatacaatttaatttaatggattaattgttaaaatattctgacaattaatgtagtacagactttgatggaaggtttcacctatataaatatagggtctcgctctccgagctcactactcattttgtaaaaatacagtaaattcatctaaaaagagtagagagagcttggaatctcgattatccacactaatcgatttccttttcttttgcagatttaaggctcgtatgagattgaagctcaaataatcaaaagctagaggtatttcgatcttttagttatattgtatatatgtttgattaattctatatttcatatacatatacacatgcttcatatcattcatataaatttctaacagttagtatcaaagcagttttgtctttgtcttgattattttgagttttggtatttacgggtatatatatgcatgaaattttttcttcgttatttatgagatttttatgttttcatttctaatcctagatgcattacaacattcatataatatttttattcgattttatgcatgagaaagatttgaaaaaccattgaaatctggaaaaaaaaaaaagaaaaaaaaaatcttaagaacatggtcgaacctaaaaactttctttgaaattaaagtcaatgtttttcgtgtttttgatgctaaaaaacttcataaatcttatcataaatgtttttctaaaatttttgggcaaaaatctatccatttcaaagtcaaaaatgatgtttttaggccgagttttattacaggtccgatgacccgcgtgtgcagagaaccaggtcgtgtgacctatagcttgaagttgaagacaacatgaaacggcaagtcgttttccatatattatgggaaaatgacatgaaaatgatacatgatttttcctatataaaagaaaatgacacattgttttttaagggacagagacagaattcaaaaaaaaaaaaaaaggaaattccaaaaagtttataaattttcatttattttggaatctcaattattttcttattttggttaatttagtttataaattacatttaattaattttttccaatttaatttaatatatatttgttatttttctattatttggttataacttaaaattgaaaatctttcatttagtaattatttaggtatgtaattttaataattgtattaatgtttaacatttaaaattttgtaattattatatttatttaccaaatcatgtaatttattgtctaaattatttatttttaaaaaaatatctgcaattaattacaaattatggaattttgcatttaatatattatcatataataattgtatttatttttacaaatttattattatatttgcctgaaggaatggtcttctactatcccttcttcctcgttcacttttgtgttttctgactatatttctttggttttctctactctctgtgcctttcattctatgtgttttctcccctgttgataatctatggccttccttccttttctctatgtcttctgtccctgtgtgtcctaagttctagtggctctcttcttttatttcgtgtcttgtgcttttggttgggttcgagggtgggtggttggtaattcttgtttgtctcttcctttttcgttattctcttgtgtcatttattctcttgattctgtggttggctttgactttggggtttagtttctttttcttatctctttgtcttttattgtcgggtagttatggaaccttttaatactaccaacgcccatcttaaaggaaaatgttttttctgccttgaaaccactgttacattgaccccaagtgtttcttctctgaaggccttaaccaggttgtgcttatatggaaaactggtggctccaatggtcgtggatgaaggctctttggctgattatgtggttaaaatttggtaaaagaaggtctcagttgtggccttggctgagaatgcaaagacttttaactattttgagttcggatttgaagttgctgaagacagactgggtccttcagaatggaccatggtgctatcgaggatatactctcgtgttacaggcttgggctccgagaatggtagggtcggttgtgatacattagttgagattatggatgcaaatatataacctacctcaagagtatttctccactaaaaatggtaacctactaggtagtcttgcaggaaaggtggtgagggtggatttggaaaatgataaaccagcgttgtggcttagagttctagttgacattgagtataagaaactactggtctctgggtgtttctttgaccttgctagtggagagaaacagtggctacaattcaagtttgaaaaggtgggtattttctgttataactatggtgtgcttggtcaccaacacaaaggatgcaatttaaccacacctgttatgatcgtggacaaggaagacaaatattttcccatgtttggaccttggctatcaccatcctctgcttatgctgatgttttctctggtcctaagatgaacgatgttcgtggtttgttggccacaaatccagaaatgaagctgcgtgtttttactccagtgaaggcaatcgacggttctggtggcgaccgattgaaaggtcctgggattctctctactcgtcttcctagacgctagctgatggtgaccacgcgtgcccttggttcgatgagctttgcgatggcttcgaaggcggtgtggctccctaagcccctatctgtcctccctgttcaagtagaggctccaactggtattggaggcgaagtaggtcagcaaggaggagaaaagagttttgaaagtttacctattttagcgagagagggacatgtcattgcctcgattttggagaaggataaaaatttgaatttgttagataatggtggatgtgatttgggtcaagatttggttgtttgtgggtcgtttatcctagtgggcctgtgaatggctccatttctgttatgaagcccgatgcctttaataatgacaaaagttttttttttattgtgaaaatgagggcccacttcagctaaataatgcaattattttgagtggcaaaggtgataaggcccagtctactctcgggcaaggagggtcaaagctagtagagggtaatattttgggctcgacttgtgggcctggagccgagccaagtaatgttgaagaaaggactttgtctcaattttttaaagcccaagaaatattacttcatgatctgaaacattttgggaagttggattcgtatgagataaagtagttgggaagtgacattggagtggtgcctacttcggaaaccaatgagagaactacgccgtttaagaagcgtaaatttgaaggctctgcttcgatgtgctctagacctcacaaagtgctcagaaagcaccctgatgttgttcgtgacttcccgtgggatactaaggtacgagacattgaagctaaggtggcctatgaagaaccatctgatgaaattttttgttccccaagttgctctgatggaattatgaggaactctctggttggttcttttgtgattgaagaatctagatccagcttgtctgttcactctcatacccctgtggaggagaatgtcatatctcctccacaaaagccatgagaggggttgcttggaactgtagagggttaaggcagacctctacagttcgagaactgaagtccctgattagagcgcgctctcccgattttgtgtttctgactgaacgtaaagtggatgccactcccctagtacgtatactaaaatctctccatttttattttaatgttaatgttccacctattggcactgctgggggtattattttggcgtggaaatttggatttaattttgagcgtatctcttgttctcgtaaccatatcactggccttgtttattcggacccacctacccacccttggcttctcttgtgtgtgtatggccctccttaccttcatgctaagaaaaagttttaggttgaactcatgaaccttggggataggtttgggggtccctggttgatattaggcgataccaattttgtccttagtgactctgagcgcgatggggcgtcgggaagggacccttttatccctttcatatctaatcttgttgactcttggggtcttgttaatatgcatattcaaggttataagatgacttgggatgatcaccggtctagcaaaagccatgtgaaaccaacccttgataaaggcctagtgaatggagcttggctccagctatttcctagagctattctttgctcctctcagacaagtacctcggatcatagacctttatgcctagtctctggagagcaggaggtcaaatttaaaagatgtttcaagtttgaagagagctggacgagggatgaaagaagcaatttggtggttgccaacgcttagggttcggttgatcattcttgggcccctgctcgagtcttcaagaaacttggagcaactcgggtggctcttctttattggaatagaactcaatttggtaagatagaccgggtcattaaggatatggagcttacaatatacagaagttacctgctggagctcgtgattagaatatggaatgtgaaattcaccgctccctaaatgaaactttggccaggaaagcgatttactggaaacaacaggcaaggatcactgttggaaattattttaccaggatctatttactaacatgtatgttggattaacaaccta

SEQ ID NO: 14381 - DNA, 3316 bp, Cannabis sativa
aatcctaattagcctaaaaataatgcaacaaccccataaggacattctattagaacagacagtaagatagtctttccattataatcattttgcacaataatttctctttcataattctttgtaaaatgactttctagacactcacactcaacacctatctaaacacgccacactatttacagacattttgcaaaaaagtctcagaagtcaaaatggtattaaaaaatagtccatcttcctcaatttctctaataatatactaagcatatagaaattaacatcactacataagaacattcttaatacaatgcccagttaatgaattgacatatattaaaagtattaagctaagaatctcagtcctcacctcaatctgtcctctgccagaagcagaatgcaagatggtataaccctgagcatccctgaaagtcaaaacatcagaaccatcaccaagaatctctctcaacatctccaaatttcctcctctagccaaagcatgaacagccctgttcttcatttcccacttaaactcagcacttacacagcccaattgctcttccaactctcctccactttttagggaacaccttggagacatagcaaaatccagaagcaacttgaaaacgttagaattcttactcctagctgcagcataaagcaaatcagtaacaccatactctccttctccataaacaagaagagggtctctctctaacaacactttaacgaaccccacatcaccagctgaggctgctgtgtagagtagccatccaccatagccagcccttatgagagtgttatgatgaccaccctttacttcacatgccaagaggagtttcttggccacttgacaccgacatttggctacatcatcgaactgagattcatcatcccaaaccgtttcaagacgcctaatacggcgaagagaggtgagcttaatgagaaggtttgtgtctaaatggagaagctctctaaccagatcatataaaccattggctgcagcccaatcaattggtgaagcgtaccaccactggtctctggtgctctcccatctcagaggaaagttatcaggtggcatatttctccttgaaaaactttcccgggaaaataaagagagaaaatatattaatgaagaatatgggaatcaaggcataaagctgaggcttttgatgattgtaggaaaagttaaagaagacccattagagaccatgttgagatgaagagataaggagtttggagggaggagagagagtcatatatgaagctcaattatagatagagagaaaggagggaaagatgggtttgttttgtagaagaaagaaataaagaaagttacaaatagaatagaatgtatgatctatagtgaagaaaaggacgaggctttttggagtggaatggaagatttttggaagataatatacataattatatattgcttatatattgctatatatatatatatatatatggtggagaaaaagttaagaaacaaatgccaaaaacattagaaagagaaagataatttgagaatcttttgatccgtgaaaacccagtggacagagagagagaaatttgattgaggattataaccaatacgtggtggtgtggattgagagagacggaggaaactagaagatttaactcaaaattaaagaataaagttctctgctttttcaccaaatcttaatgaacattagttatttatatactgaaaaaaaaataagacattttaaaaaaagtttaattttctggggtcattttagtataaagtttctttctttttttggtgtgatttagtttgtgccttttctattctgtttgtcattattatgcactttctcatattccaagaagagagagaccaaaaaaaaaaaaagtaaagaaccaaactttttcatccattaatgaatatagtgcaaaagccaaaaactctgaagccaactatctgtttatcaatggagcttgttcctaaaaacacctatagcaccaaaggtatcctaacttcaatgtttgctttttcaatagaccataccacaggctggccatgttgtgaagtcaatacttagccaaaaaaaaaaaacgacctttgatgggatgagacccactaatcaattaaatgagtttttattttcattaagcttttctattaatttggtgggtaagtactaaataggaagtttggctagtatgggacacaacaagatgagacccttcttctcattttattacaattaacaaagccattgattatcacttatgggcaaaaaaaaacaataaaagcttcgtgatttatttattatagaaggggaaaatcctaatttagctacaaatatatgccccacataatatcatgtgaagaaaaaaagaaaaaagtcaccttttcatgctttaaagatcttatactatatagaacattgtcctttctcataaaaagtaagaaaaagttcaaagttttgatgagcacaaattattatgtgttgttcttggatcccaaccatgtagcagcctatgaattatgtggtccttactgcaacattctgtatactttcacttacaagaaatggccggcattcaaggaattcgatataaggaaatatgtaatattataatttgatttaatactaatttaaatattctagttttaataaggtaaataccattttaaacgttttgcaaaagttattaattggactttctattttgttaaaacaaaatagaccttgtattttctaaaattataaaaataggaccatgaactgatattttatcaaaataaaatttaataataatttaatttaaagatgttatgacataactggttatattttgtgtatatgttcgtgttaaaaactgtcttaaagttggttacattaaaaatcaaaattgttgaaaattaaattcagggtcttatttttaccattttaaaaaatataagatctattttattatttaataaaataaaagattttaattaataatttttataaaatacagagtctagatattctttggtaaaaatatttcattacactcgaatttagtagatataattttcaattttcaattttcaatttttttttgtcatctttacttgcgtccacatggtcaaaataatcaatgatacgagtcatttactcaactgcaccgactagcgactgttaaaaatatattctttctaattgttttgttaaaaccaagatgagtattattaaaagaaacaaaatttgccaaaatgagaacatgactacttctttggccaaacaacacccttatttcatctcatcaatgatgacattcttttcttctttcttctgaa

SEQ ID NO: 14382 - DNA, 6081 bp, Cannabis sativa
ttagtttactttcgtgaattggattgatgcatgtgatgactaagtagtaacggattatagtgtgcgcaatttggattttcctttgcagctgcaggactgcaagtgcttcaagaaaagcatctcattcacagggatttaaaaccacaggtatttttctttctttcttgccaagaagctggatttatatggttttgcaggctatttggatgatttttttttttttttgtttaaatgggattcatgattctatgtcattaactatccgagagtttgtttactttctggtcattgggtttccaggctgtggttgattagtcaaccgtggttttacattttgtttttggagtgatatccgcattgttttctgtttaacttgcagaacttactcttgtcaacgcatgaatccactccactactgaagataggggattttggttttgcaaggtaaaaatatatgtgataggctgtttgatgttccaggtctgttgccttctcattgttattacgcaaaaggactgtattatttttcaggaagaagctatttagtactttcttttagtcccatttatctctgtaaatttttgcataaagaacatgctaagacctaagagcatggatcaaattatgtatcaaggacagatgaatttgattgttttatttgtgtagttgagttatagcttaatggtttttaacaatggaaaatccagcattataaaaattgtgtatagctttatttggcaagacaatcttgaaagcttctgttactcttgcctagtcatttttgtttgaactattgaaagatttttagtcacattgggttattttgttgtattaaattccagatcccttatgcctcaaggtttggctgacacattgtgtggttcacccttatacatggctccggagatcataaagaaccaaaaatatgatgcaaaggtgatgcaagatagtaattgggataattttgactgtacttattgatatttttacgactattatattctcctttttcattttgttttgttttgtttgcaggctgacttatggagtgttggggcgattctttttcagttggtgactggaaggccaccatttgatggcaacagtcaattgcaggtttgcagtgaagttaaaatataattctgtataaaaactagaacatattttgaggtttgcataatttcggttttcattgtgcttttctgattcattgatgcccagcttttcgagaatatcataacatctactgagctgaagtttcctgctggttctctggaagagttgcatccacactgtgtagatctttgcagatgcctattacggcaaaacccaggtattgggggttgctagtggaaatgtgtatctggttattggtatatttgtttagtttacaacagagatcaagcatgtttcgaagtttttaactggcagtgttacattagtttcatcttcaacttgcataacttaaaagtaatatacatataaattgaaacaccaatttgcagttgagcgactaacattcaaggagtttttcaatcacaagttcctcagggagccaaggtaatcttgtaatttgaaattttgatatgctttttgtattttgtcttggtcttggattggggttgagcgccattttaatcttggatctctccgttaattagcctgtaaataagggactcagaataactttcttttttgtatcttctgtaggtccatgcttgatgctaggaagtctccttttgttctgcctatagaattaactgttgagccgtccaatgcttctgcccttgggaagaggtcagaattgccagctgttcttcctctggactcgtgcagtgcacattcaagtgcaaaatttcctattggacttgaaaatataattttgcaaagaaaagagggtgaaggtacatcaagcaatgttcatgggcttatgccaaatattgtgagtaatgaaagaaaaagatatattgatcaagagccacaatcatcttatcaacgacaaggttttctttttcccctctttttctgtttggcatgtatagatctattcacctgcaatgtttgacagttgatttgtgatgacatgtccagtttctgattccatggagtccattgagaaagattatgtccttgtcaatcctcattttgcttcatcagaatccatctcttattttctggaaacgtcacaactgtctaactccaaaactggagtgtctacctatgctcaaaagcagaatgaacagggaagaccagttatacaagaggaggagctggctgaaagctctattggtggtttagagggctcactgaagcatggatcagacctattaccaacatcaattcctttatctttattgagagaagtgcaagaactttctatactgcatccttccactaggctccagttgttgcatcagtatgttgaagttcttaccgaacttgcacaagaaaaggtgtgttgctttgtctcttacaaaaacgattttgttttcctttgctactcgaagaaaccaaaatgttcttgaattataaaagtatcatgtcaactgttgcctttgctaaatttccatggagttcattcctagtaatgtttttctcaatttgctgatctctctccaaacttcgtttcattacattagctccaattatgacccatatttgtgtatatagttgcattcatgacttggcagatgcttttggtgagcaataacttcttttctccacatacttcataatattatttgtgtctttgaccctgtaatttctagttgcatgtttcaagctcttttctttgttgacatttacatttttctctccctctgtaagagtgggttgttagaaagcaccaattatcagtataatcaaaagttgttgcttcatcatttgaaatctcttttgttttattggtcaaccattgctgtttttttgggattgaagctgtagtctatacaaccctactaaaatagctttatacattgtacaaattaccaactggagtgtagtaaagggtaataagttccccgaaccatgtttgcattgccaaaatgtacattatcattattattaggatgagaagaacgtccatgcgtctgcattctgctgatgttcacccctcatttttgtaaagtaacattgaattttatttgtgctttttgtaaattgacttgcccttttgaggatggttgaaaatgcttataatccctttattactctacctgcagtacgatacagaattctatctggaggctttttcaactgagttggttattttggctatatggaaaaaagtgctccaaattagcagcaattggctggcttcttctgagaatgaagcaactggtagcagtgtagcgaatgagcccaaacttgatcagaaaggtgctactttagcatcaaacactgagggaaaccttgattttagccaaccttcatgtgtttccttgtgggcagaaaaatcatttcttgttgcatttaatcgtgctgagaagttatcaaatcatgtccgaaacatagatggtgagtgagcctcttgtcgaatttctcaactcatacttttctgttttgctccgtccatcaccgggtttgagtgttctcaatcaaatcattactttgcaggtactgttgacatgccagatgcgatggaaataatatttcgaaaggcactagcatttggtaccaatggtgctgtaagtatactcttataactgccatgtttgtcaatgtctttagtctttcttgccattgactttatactccgtgtttcaggtggacgagttcgagaacaaaagtactgcagcagagaattattcaaaagcgctacttctgctttcctttatcgcaggagaagcagcaatgctgcctctaaagcctccattttcgttaactcctgcaggcaagaagcgaatccaacaatacattttgaacttgcattctcggcagactaactttttaaaggcacagccttctcttaaagaatttcttgactctcataaaaagtaaatagaactggtttgtacagctattcttggaggttcatcttttgccaaggcagattactaatgttggccgttgtggcagtaaatcagccgcctatgcagcaggcagtttttaagtctctgacatggatatactcttttctaacttttgtttggtgatggaataccaaagaatgtctataagttagataagtaaatactagattgttgacattatggaacaagaaactactttagtctgtgtaaatgaactgtctattctttatttggacaagaaattgtacatatgaatagaaattgttacgtgtataactggtcactacagcaaatcttctgaattttctaatggctcaaaaatgccatcaatcaatttgctaatttgttttgttttgtttataaagtgattgcacatatacaaacacatttgcaggcctcggcctagagagtaagaaagttacctaaagttcccagttacatatgataatgaaaggagaagagagcctcttgattacactttcagaaagtatctattacaatatcatagaacaaaaaaagagcagttaataataatatataccatacttgagaagtaactctcaagtatatgaaaagcttaagtacaacagagaggcttcttgagctcccacagcagtgatgtaaagtgagaaataaataatgatcataataagattaaccattcatgtaaaaaaaaaagacattgtcttcgaaagactggccagatgagaacacgttaaatattttcttgtctaaatgtctatcgagggagtcttttaagtagagtggcataggttcagatagtaatgagcaacgtagacaaataatatggtacacacacctacacgacaagttgcgtgagattcaatagtcaaataaggcatataaggataatagacaaaggggagatttcgaaatttacatgcaataacaaaggtttcctcaaaattgcatgcaaaatcagatattaagttgaacctctccttccaagcgtagccttttggttcctctctcctccacctggctgctggtatttcccacgctgttctctttggcctcaactgagcaccttttgtaaggtttgaatcctgttctatgaaccttgagctttccttgtccaagccctattgtcagcaaactttcgtctaaattttcctcatctctaagtggtccaattttctccaattctggatggttagaacaagacccgcaagtcttactgttgagatctattaatgatgcacctacatctttgttctctttttgtttttcttccatgcagccattctgattctcctgcttcatcaggtcaggtgggggtgaaaagctttgaggtaacacctctcttgagaataatgcttgaaatgccagccgtccctgaaaaagtaacacttcgttagtaatagcataagcaatgaactaagaatcagatgcagcaacctcaaaacaacaaaagacagtagtaaaagtttatcaacaaatgtgtcaacataccccttgagagacttccttccaagattcaagagggttgcaaatgcttttactacgacgattactacactcggaaactgattgattggcttctggttcttgcaattcttccttgccattctcttgcttctctaaggcatctgtctcgacttcactgctagaagctgtgttggaaccacaagatgagcggtcaaccggcttggtgttttttggtttattagaatcaagctcagttgctgggacagtattttcatgatcagcaacttttacattggaatcaggttttcctcccccactttcctcagagtctgatgaggaccctgttggagattttgaacctaaatgttgagcttgcacagcttccgagtgttccggatccacttgttcttgcaatagaagaataagaggtttgtcttcctctcctgttttgggtgcaggaccttgatcaaagtccatcgaaggaactccacttgtggatgctggagggacagcaaatccagtgtgtaggggagtacacaatggaagcatcccatgggctgcccaccatgcagttgcagcagctacagtagcagcagcaacc

SEQ ID NO: 14383 - DNA, 9712 bp, Cannabis sativa
atcaaggaaaatactcaactgccatagagcacgaaaagatgggcagacgtttttcaaaacacgaaaatatcctcaataagtattttttaaaaaaaaaaaataaaaacaaaaacaaacaaactcaacaaaaaacgcatacatgaggctacactcttatcttaaaaaaagcaaagtatatgtacataaaaacatataacacaatcagaaatatatacgtacatactacatacaagaatatagatataacatattaatattgataattagcagttaattaccttttaaccttgaactgctatgaaattaattcttcaaaagtatttctacatgctccctgcaagaatgattacaagtaagcaatcttcgtagaaatgccacactttcggattcatacagtatcaaaggggaagcagggaaaaaaaaaattgtttgcatggctacagcactgattgtagcagaaatcgtcatattttccagtgaaactcatcttgtttcttctttacatttattttactatggccaaccatgacaaaagtagtggaatttccaatgacaccagctacattgacttccacaggccatatctctctctccacaattaccttaataatttcataacttccaaagtaattaacattctcatccaataggacttcaccaatccctgatagttaatagtgctaaatctcatcaaattctaaagaaaaatacaaatattcaagaaaaggctgcagcataccttttaacatcaatatcagagttagtcattagatctttcggtactccaacctgaattgttaatctatcctgctacagaatgtttggacttaaaatttcgaggcacgttgcctaggcgttgttgaggattttctatagagtacacaagtaggcttccatccttggttcctgctaagaagcattcttctggggttactgtcagggacgttattatctttccaattccattatacttttttatgacctcaagtgaattcatggagcgtacaactatctgcccttggtctccagcacagaccagaaactcaccacatctactcagctcaacacagttgaggcgtccattggattcagaagaagcaagatgcttaccatttattgaatataaatgcaaactgagatcatcatcagcataaaacacgattcttccatgctgagaggcaacaagcttagataaagcacagttattgggatggcgtaaagatcttacatatcttccctcccttaaggtatggaaaatacaggttccatcttttgatccactgataactatgtcaagctccatgctaacaaacaagcatgtaattatatcatcatgcccacaaagaatatgaaacggagtttcaacgattacacagtctttccgagggaattccatctgcgcagtacgaaatttcttttctgcatttcttccacgaacttcccaaaccataactgtggtgtcaaaacttccagtagcaaggacgcttccatcagatgtcactgcagcatcattgttaattttaaaccaataacttggaagaaacaaactgataaagagttattttgactgaaatttccaaacataaacacgacaaaacaaaaagaaaaagggaagggacttggatatctttgttttcagtgtaataatattttaacaaaaaatgttctaaatttctcatacaataggaaacaggagatttattttatttatagacatgtttcaatcaatacaacttattttgtagagtttaaattttcatataaatttcagatttgcattactttttctttttggccttctccattttggggccatcatgataagaaacagagaagaattcaatgccagctgtattacttatctctttaagcatggcaaatcgttaaattttggaaatatagttggtaccttacccagaaaataacacctccactatactagcaatggagggaattcacacccaagacacttttttcccttttaaagaaatatatatttatttatgagaaataattggatagtgattgtttgtttttaattactatttctaggtacttttattatttttggtacatagataaagcgaaaattcatttttttcttttaaaataatgtagttacagaagaccttgcaaattttcaagaaattccaaataatttagcatgctgaaaccagtattcaaacagccaaattacacacatgtacaaatatctgatgtcaacctcctaaattattcagaattttctaaaaaattgcatgagtctgtaactacattatattatacgcttataaaaaaaaatgaaattgcaacttattcatatgtacggaaaatattaaaagaagacaattactattatcgtggtaccctttatatatgtgtgtgtgtgtgtgtacattaaagacagaataaattgtgggaaaagcagcagtttccttcctttctacgcattgagaaaacattgagttaacctatgcaaaaaaagtcacaagataaccaacaatatgcttggtgtaaaccattgcaaggttagatattttatcctgttctgcattgcatacatcatcattgtttttagactcttgactcttgagaagatacttcaaccagtccttgagttataaaattacctgccacacagctgaccacatccttgtgctgtctgatgctttgtaccattctgccatcattcaaggatataacttggaagctgttttcccaattgccacaagagatcaaaaaattctctgatggtgtttgcattgttgcaaagcattgtgctccaagttcaacactttcagccaatgggcttccaatttttcttgaagatagaacatcagaaccaacaccaaagaagggatcctgtaaatttttgatagaatgtttatcaaatgtataccctacaataggtctgaaaggtttagtaatctattgatacaaatataagaactgaaaccctacttgagagcccgagaaggtaaaatttccaccagattgcaattgggttgttaaccacatcttaactgacaaggtgatcccctgattaataatgacaatattcgagtctaatatatgaacatataacacagaagatgatggatagcttgtactagatacaatagaggttaagttaattgagccaggtgcaaagtaaagaggatgagcaatcggaatgggtggtccccttcttgggtgttttttgcggaagatctggataggtgtctgaccaaaatttgcaatttggtcttcaattgctgatctttgcaaatcatcttccatggtgtctaaatcaactgcaccttcataagttaaatagtagaagacattccctgcctgtacaaggagaccagaaagtacgccacaaatgaatgtcaacgaattcaaaatcataaaacagaaaaacagaaacagaaaaagacaagattttagaggatacctccactgcaggtttcccacgctgcttgtaaccaaataccaaatctatccagtgatgaaggtttgagctaacatattcactttcaagagcctctcgatttttacgaacaaattcttcaggtgaaccctgacaaaataagtacaaaatcataaatatttaccatttactatagggaatctcggcggttccttatctataattaatggtgatacctatcaccatttaccatgatggctggtatcgtttcagtttttttttagcataaatctgatcgtttaggtttgtatgaatatatctgattttttttttttttggaaagacagaggtcacttgtctaatgacttcctcccgaatgttattgagtatgaacatacatatatatgagttaataagaaatctggagcagtttatccaagggggagaaaaacataattccttttatgctctaggtggtggaaggggatttggttgtagagaataaactgctacatctaaattataaaatttaatggcatttgcatgtatcagaaatattttggactttgttcagaaaagaatggcatcccatgaacacttggcccaaggaggaagaaaaatgaatacaaaagttcaaattggttctgagtaaatgcacataccttcgcccaaggaggaagacaaacatcactaatcaattcaccatcttgtttcacccctagatgataagtgtttgagttgacgagaaactctggcatgtaaaaaaactcaggtattaactcctttacatcacttgtattagaaaggcagttccgataggtgccctcaatgctttggaatagccgatctgcatggtcaaatttaccaccctgaccaaggcactatgttagatcctttaaccaagaatcttgatgcacaaaaacaaacagaatgaaatgcaaaccaatgtaatgcaccaacaaaagcataaatcaatgaagctatcattggaattattatagtgtatacccaaaataaaattttaattttttcagtatcctgtgttgatgttatgagttaaattgtgtggcattgtcggttcattttgtaagagttcagatattcctatctcggaatggttgagagaaaggaattttgttaagtaatttatatattttgcttcttttaaagacttaacgttacatttttgttacttccgtcagtatcattccgtcaactgatggactaattatgttggcatgtgttagcatattattggtccaagtcaattacttaattaataagaaaaacaagaatcatattttaatttttttaaaacaaaaaacagatttttaataaataaataatattaactaataaatgttgtttagttttttttctaaaaaaaattagaattatataacaaaccttttattgaatatatgagatggactactaatatgctgacacatgtgagcttatcagttttaataagacttgatgcagattggtaatgacgaaagtaacatgaaattaacattaggtatttaatccgacaaagaagaaaaatggtatatgagtgtatcaaaccgaaaatattatgtaattacgcctcaaatgctcaactaaaaaatgattgatcatctttctcctttttcttcgcaccccaagattgatcatcttttcaagcattgggggcagtaagagaattagaaacaacatcaaatgtttcttaacatacctgcaagttcctgtgaagagaagtaaaaggctccaatcgaagaagataataaagtacaattcccatgcttgagtaatgagacccgtagtagaaactgcataagtgaataatagctgttagaaaaggaatctttttttgaaaaaaggagagaagagggccaaagtctttggcccccaaccccattatgaataaaaaccctctcttgtggcagaggaaaaccgtggttacaaagtaaaactaaattccaaaacttgtaacaactctaggtaccctaaaaacaaaccactgcctcataaatttgattaaaacaatcaaccccctagaacgcacatacacaaccagatctctcacagtggaagaaaacacaaggcagctgtaaaaatcttacagcaatgttctccattctctaattaagtctaaaaatgaaacactttcaaaatgcttagtcttgtacacccaagactgttagaaaaggaatattaaggaatcaataaaaccaattcatccccaaaaatgggctaggtattacctgggtatatctggatcagagaaactacgatatctctcttcaaacacctgtaaaatgtaaatcattcaccattaagatattttaattaacttaaagagtccatgaactcctttgaaggggaccctttccagtatatttcttcaggatggtgtgttttgtgtctaaaaataactaaaagagtgagacaataattgttgataaattgaaggtttccattttcttcgtggcataggatcttaaccgagaacggagcaatcctgaaaatttacaggattagtgtccatggatatttcaggcaggaaaacaaaaaggttggtagtagctgttatggaagtttggtggtctatccggagtgaaagggttttggaggataaagaaactgatgcggagtttctctaggataaaattaaacattgtgtgctattacaatttgaaaatagaaaataaaacaaacctcaaaccgttttgaatccaatgctccaactggctttgagagatcccggaaggttgatgatttgttaaaatcaagaatttctgaagagtaatcagctaagatccaggggaaaacaggatattgtgttagatcattataagatcttcctgccagtgtattgagaatcattagatattcaaagtttgttatatccctttttctccatctttctctcgcaatatctgccatcaccagtgctacacgtctatcaacaaatgaaataacaccactcttgtccctaccacttccctttgggaacaaatattcatttctagtggcaactatcaaggttccaacatcttttgcgtccttaagtgatgcaaaattaaaaaatatgggagcaactgaatcactgaagaagatttctatagcagtgtatcttagcaagtaccgagtccagtgaacagcttttatcttcaaacagtcataagaacacatgccacaaaaagaaaaatgcaaaacatcagacaatatacaagatttacagtggtaaaagtaagtgttcaattccctaccttgctaatgttccatctcctatgtcgctttatgttttttagttgtttcttcttaagctcattttcatgtatgtcttcaacgttatcagcagaggtacccttctcagaatatagatccagatctattggcattctcagagatttttgcttttgatcaggcttggttgtgtcagaactgcttgaagcatggaagcctttaaaaactgataatcctccagtaccttcaaccaaaatttcaccaaagaaatgcaatacacttttcttaactgctaatcgtccagctaattttctttttgtagttataagtacgcaaggaactgatgtaagaacctgaaacataaatccactatctattagcaaaaccaaaaaacatgtacataaatgtccttccatataatcaatcccacgtatacctcactactttctgcctctagtgaaatcaaagaagaatcttttctctcttgcacccaatcactggagtctttgactagctcagggaacggactgtctaagagatccttggcaattgaggccttctgcccagattgttcagtatcgctttcattagattctgaaatcacctcatcggttatcctacgaactcctttcagcaaaaactgcttcatctgttcaggaagattcccagctaacccagatttactgtcattcatgggaactgtaacctcatcgctagtcactgaggatggaggatgacaaagcctttcatcaaaatgataattctgccttagctttagtctccttctccaagtatcttcttccttgtcaagtttccaatgtttttcagatttatctggaatttggttagcagaccatggacctctttcatcaatcaatgcacgaaacatgtgtatccatttttcctgttaaagaaacattttagtattgcagtgtgacaggatgtcctgagccatatgaagtgtaccaaaaaaaacactaaacagtaagataaaagggcattctttaaaacacagaaaatggcacagaattcacatacaactatgttttgttgctcttcctcatgagtaagttggaatgcacctcttctgctctcatctgaagctagaatggagttaaggctgctttctaaatcatcttcaaatgctttcctattatttgattctgcagatgaattttcatccattcttgtgctgaggtcatgcaactgtctgatgcgatcagtatttagtgtttttacataacttgtctcatcagcaacctgaaaattaaactagcgagttaatgcccagacaacattattacggaaaatagtgaatgaaacagcactactcgtattattgataaaaaaagtaatacagcacacggggttcaaaagcaaaaccagcccagaagacaaaattcctaagcagcaaaacactaggaacattcttacagaaaacacaaacactgttagtattacacaaaatactattattttctacaaagatccgaaaagggaacatcattgaattcttaagtgttgaacagtgatatatggctacctaatgtcttgctttactccaagtagcttctacacattcttcagaatcttcaaatatcctttaaggtttattttaattgctttgattgctgtaaatatcagtctcaactctctttatttagctgcttttgtttcctatacaaaaaggccagatctcatccatttctctgtataaatacctggttgtgtgtcaataaaacataagaaactattctcgaaaatgtttcaagtttcacaattcctacttcaattttccttctctcctattctaggcaccaaagtactactgtatcacagtacaagggacttatttatgattttcttataaaaaaaatgattccaaacggtattggacactatccacgcaaccatctaacacactttacaccagcttctattgtgcatagaaaatttcctcgattttgagaggcttcctaccatctttgggtcttaatccaagaaattacatactatgggaactccttttcttgctctgggcagctaaaacgacatgttcattctcgcttctgttacaccttatggatgcgtttagttgggggtagtggaagggaatgaaaaaaaaaaaatttattccactcctttatttggttgcattttaaagtattggaatgtcattctaatggaatgatttttccaccattttagggaatggctattccatttcaaaataagtggaaagaccattggatgcaagatgaaaaaaaattaatacttttttcatttatttttttatgtgcatgttaaatttaatttcagtccttttctatttctattctcattccccctacgttcctagttcctttcattactaaccttctccgtttgatatttcttgtaccagaacttcatggtaagcagattgtccaagcaatttttctagcttcctccatcttcagaagcttcctcttttaggaatgacactattcttgacgcctcccctacttattccattatcatcataattttttcttatgttttgaaataccgccaccaacaactaaaataaattatttctgaattttcttttcagtttaatgtatcttttctttttactacagcttcaaggacttcagccatccacacaacaatgtccacggtgatcactagctcctagcctgagaatctaactgacgctacatgttctaccaaggacgacaaaaggactgttctattgttctatcctaaaactccaacactttctaaatctaactaatatataacttgaaaaatccaacatttggacacataacatgtgaaccacaattattagtcataagggcataatatactttgtgcaaaagtattaaaataaaaaatagagtaaaatttaaatgaaaagccccacaggttgttggtacaggatttatctcctcaaatagctattgggccaactataattggccccaagactttaaggaaccccaaacataagtttaaggagcgagcctagcataacccttgcttagaatattgaggtttcctcaaaaaaaaaaaaaaatatat

SEQ ID NO: 14384 - DNA, 16393 bp, Cannabis sativa
  modified_base (13719)..(13727): a, c, t, g, unknown or other
  modified_base (15012)..(15015): a, c, t, g, unknown or other
  modified_base (15963)..(15963): a, c, t, g, unknown or other
ctctatggtaccaatattattatgagattaaaagaggacaattctcagttgggaagagatgaaaagtttggtgctttgccactttcgcaacacacatgcaggttctttgcacgatcactttctggtaatgaaacaagaagggacatttttggattacaccaaatttcattattggcccctttggatgacattattgtgaagttgcaactcagcaccttcctcaatggattattgtcatctttaagggcagaattgctaattcaacaaccttggaccgttggtaaggcttatagagattccatagggtatcgaggtaaaatattgggctataggaccatgttttgtatcccatacttgcccgtcatttcaggaattagtggtaaaggaggataaaacaccagcaaagacttttttctttacatctggaacaaatgtgcgaaggcttactgatttggaaatcaaacataagaggcaaaaggggttgtgtgttaaatgtgatgataaatggtcacatggtgtgcctcaatctattattgcagatcgtaactgcatctttctaagcaacttttggtctcatttatcaagcttcaaggcattatacttgagtgaagcacgacatatcatccacaaaccgtcctcaatctttgtctcgaggcatacctctgctggtttaatttccaccagcccaagcaatggtctaaatggttaacttgggtggagtatggttattacacttcctatcacacttccctcaagagtacacccttccagacttcgtatggccactcacctctgaccattattccttgcaagatgggactgccatagtttcagctgtgaagggcatgttgacggctcgagatgcaatgttagatgatctccaaatggcacttactccgagcctaacacaaaataaaagcccatgtcaattctagtggcaaagatgtggactgtgccattggtgacaaggtctttatcaagctccgtccttataggcagcgctcacttgccaaatgagccaatgagaaattattagctccgtagttggtactatgggccataccagtttgtccactacattggcaaggttgcttacaagcttcagctatcaccaactactgcaatatacaaccattttttcacgtctcccaacttgacgacctcttggcgatgtccaatgctcatctatgattccccaacaactcacaaccgatttagagctcccagagctcaaagaagtgtttcagtagcattttctttcccctccaaacacattcaactttgaggtgttaatcaagtggaagtccttgccagtttttgaagcgacatgggaggaggactataccaccatttaacaacaatttcctactattcaccttgaggacaaggtgaaggtcttgggggttaatgattagccacctatttggttggtatatatcataagaagaaaggccatgtgggccaaatgtgattaagtgtcttagtataaggtgtgatatgaaccagatagatatacagagaatataggaacaaaccagcaaaaatgataaagaaagagatgaaactattcagattctttattaatgaaagatcgagaacaatacgataagaaaatggctggtattggaccgccaactctccacaatggctgatattcaagagacagctaactctcccaagagcaaatgctcatctcaatacccgttttcccccaaatgatgctcacacttcctatatttatacccatacaactctttccccttccctttaattccaatagtctctgacagcctagaacaatatgtcaaatttccctcaatgcttatgtcgcatattgctttgtgttctatcaaggtgtcatttgattattgggttttaaatgtaattagttgatgaggtggcaagtttattctctttaaataaagagaaaagagaataaacttagtttcttgtgggcgaattaagatagaagtgttttcttggagtgatctattccacttgacaggccaaaataggatatttaaccctctcgaagtgcttggtttgtaactcgttaaagttcaataaagtttctgctgtgatttctctactcattgtgtatactatttttgtaagctccttctaatctaagaaaagttttatcataatatattgcctttttttttacttaggaagctacattagggatagtttctcaatttcccttttgaaaatctggtagtggcatatccaacattactaaaatgttgtacattctgtgttagttcgatcagaagttttcgccccaccctttaaccgtaatgaggtacttagtaatctgaatattagatgagtttgcagtggctttctcttccttgtatggatgtattatataaagttgatcaagataaacatgtgctttacaataactcttactgctgttaaatcctattcttaaacatattgcttgacctatatatgtttgagtttggctacaattaggttgtatacagaagagtattttgtcaaagaaatgcctaacgaggggataccagagattcagagatctaatcttgtttcctgtgtcattcaggtttgccatttattttgtaatagtacttgatgatattctttttctggttattaattttatggtcccagaactcatatgttcccccttacaatacatgaagttggggattagatagagtaaattatcccatgttttttcaatgagattgggtaggttgttggattagttttcttaaatatcctctcaagctttataacaaaatcacatatgttatctaatctgatccactccaatcctactttctaaacacatctacatgtcaattgtttctcaccagaaatcttcacttagaaaccagattttcaaagattttagttaggtcctaggattagtttggtgtgctagcatatattaaataaatagggtatatgagtctatgggagggtaatttgaatgagaaattactatatataggtgagtaagagaatagtgaaggtatgctatgtattgagtaaaacactttgcatcaaaggggcctaaggcctctcatagtttgtaattgtttttctcatttattcaatacaatactctactgtttgtctatagttttgctcctggtctattgattttctgttactgttcttggcgctgtgttgttgtattggctactggtttatgaatctacaactggttctcaccaattaactatgccttgaattttatatttatttaacattgtcctacaactgcgtcaaaccatttttgtgataattttatgcttatgaatatttgttttttcaccattggaaagtgatacactatggggtgcataaatgctttattgttatgcttttaatttgcagttaaaatctttgggaatagataacatactgggctttgagtggccagcatctccatcacctgaagctatggttcgtgcacttgaagtactttattcacttggagtcctggatgatgacgccaaacttacttcaccagatggatttcaagtagcagagattccattagtatgttagcatgtgtaaactgttattgctgctctatagtttttgccattttttctgtgttctctgagaattaatcttctttgtcaaggattttgcattatgttctctaatttctatggtattttgttatgttattatttttatttttcgctgaaatgatattttgctatgctgtaggatccaatgattgcaaaaatgattttatcttcaagtcaacttgggtgttcagaggagataataactattgctgcagtactttccattcaagtaagttacgttttattggttctttgttcatatctatgtatacctatgaaaattccattcatagattgggaaaaaggaagaaggaaaagtttataacatgtacagtaggtcgttacaatgatgtgattaattttaaccacccttattgtcaaatagaaccacaccgtgagggatctggtttttatgtgcgtcctagggggttgattgttttaatcaaatttatgaggcagtggtttgtttttaggatgcctagagttgttacaagtttggagtttagttttactttgtaaccacagttttcctccgccacaagcgagggtttttattcatctcggggttggggaccaaagactctggccctctcctttgtttagcttgtaaccacggtttccctccgtcacaagtgaggttcctgaataaagttttgggaggaggtcagtctaatattacccttgttagaatatggttgacaagaattgaatcactatgcagtctatctgggtttctagtagaggagcacaaaaggagatggatgaggtgaagttgagatttgcaactgctgaggtactggaatcttttttttttttatttttctaatgagattattatatttttaaggtggataaattttgctgttattctacagccctgagaatttgcatctatctctggggttgtgtacctctataactatataatgttgtactttcactcttgcgtttgagtaacaatgtctgttaactttgtttgatggatatagggtgaccatgtgaccttcttgaatgtgtacaaaggatttttgcagtctggtaaatcttctcagtggtgctataggaactttgttaactatcatgcgatggtacacctcttttttgaaatacccaactattgttcagattgctttcattccacattttcttaagttgtttctctgattaatgcgcagaagaaagtgcttgaagtcagagaacagctcagaagaacagctcagagaataggtctcgttttaaaatcctgtgaaggagatatactagtgagttttgccatcagtgcttacattgttttttattctttagtttgtgtaattgaattgttagttaatttggtctgacaatcgttcctttgtttaatcttctttcagatagtcagaaaagcaattacagctgggtttttcgcaaacgcgtgtaatttagaggtaagtaaatttgttatcagctgcattatcacaagtattttccatctattttcctttccggtgatttagctatattttactgtcttgataaaaattctgtgacattgtgactttgcatctgacaaatcttcttttaactttactaaaggcatacagtcacaatgggaaatataagactatcagaggttctcaggaagtttacattcacccctcatctgtgctgttcaggttagtagagacacactttaaaggtccgattagtacatcatattgtattgtgtagtatcatatgtcatatttttatatagtactgataaacaatacaatttacaatttagtataatactatataatataatacgataggattcatttgtaacgttctatttgtcaaaacaatgatgttttatgttgatcacatgcaacatcaatgtatatatataattttttttgttctttcttggctgtctagaagacagactttcagccctctttgatgctttagttgttagatttgtatgaataatgcttaatttttgtaatttttactgttacagagttaatcccaaatgggtaatatatcattcactcgtctcgaccgacaagcaatacatgcgaaacgtaatctccatagacccttcttggctaagagaagttgccccacatttttaccagcaccagcgtccatcttcaatacctcactaatctatacatttgttgggatttgcatcctatccgaaggcttcttctgcaggttaggagtacattttcagtgctagtgactagtgtgggttctcgacgtgattagtacctcatgatatagacgtacgagatttgcttaggaaaaaagacaaaaaccagtttttgattatacaatggattatgcttaatgttgatatagatagagagataatactctttacaaaccaaatttgtttgtacctttccagcctgttattttatttgcgcaagtggctattgggttagtttaactaaactaaaaataaaactctggtatacactactttaaacagtgcggtttggtggaagaaaattggcttgatgtgattgacttttataccctatttatggtttaaattaaaagaaaaaatagttaaaaaaattgtaaattatatataatgatattaaaacaaattcgttgaataattgtaattttgtttttttttaaggaaaaaaatctgttattataaatttaacaaaagagtcatttacaacaatagagtttataggtggaggaatacaatctgatcaaaaataatctccatccacccctagtgcaaacttgaccaaactatgggcaactatattagttgtacgtttgacatgagatacatttacattagggaaaaaggataaaagactagaaatatccataataatatcttgaaaagtaaaaaaagttgcagatagtttgcacaaagcaatcttgacctgtagagcatcagtctctatttgaagttgaggaagctgaagctgtagagcataatgtacaccatgaaacatagctaaagcctccatttcatgaggatcaaagcttccaattaattgcttggagaaggcagctaaaaccatactagttgagtcacatattacagcccctaaaccagtaagatttttcgattgatccactgtcgcgtctatgtttagcttgaaagtctttgctggtggtggtttctatttaaccggttcacataatgggagaggaggttgagttttatcccccagtaatacatctgacacaccaggagcatgaataggctggtatttcaattaagcagattggaaattcagcagatagttagctgtaaaaaatgacagctccttagcaggtttggccttttgtccatggattactcgattttgttccgtccaaattgtccaaagagtacaaattattcgttccatttcagactgagagtggatagttgacagatgaaccaaataatcacctttatgcattgaagatgctttgagccaatcgaaactaaaatttgaaaatctccatacagcttttgcatatttgtaaccaaaaagggcatgacccacaatttcccatgcttgatggcagattgagcaggtggaatcagtgataaccttcctcttcaccagggcagtggcaacagggagggcaccattgaagaaacaccaagtaaaaatcttaattttttggggcagctgaagtgaccaaaaaaatttccaccaaggactttttgaagaggagtttgaacaatcatcaacatcatcaagagatggagctaagtgataactagtttggactgtatagatacttgatgtatgatgatgccaaattagtgtgtcattattcttgaagaaactcagtggtattgtaagtatgcgttcgacatcaggctgtgaaaaccattgctgtaacaaacataaatctccttctctactgtctttgatgaggtttgagactactcctttagccggtctattatagttgaaaggtaggaaagtagagtgacctaggatccaagggtcgaaaccacatcttacacgacatccttcactaattttccatcttaggcccgaagagagaagcttcttaccccaatggggagtgtccaaggttggattcgaggaaagagttgttaggatagtaacgacatgtgggaagctttgctagtagtgtatccggttgagtgaaaagtctccaagcttgttttgcaagtagagtgtgtttgaaatgtacaaaagaacgaaagcctatacctccactatcctttctcttgcataaaagtttccaaaagagccaatgaattttagatccattctcattcaatccccacaaaaaatttgccatcattgattaaacttggttgcaaaaatagataggcaaacgaaaaacaattcacaacatacgtaggtataaattggactacaactttgaggagcacttctcaccctcctgcagaaaagattttctcattccaattatgcatgagtctccatattttttccttgatgctgttgaacatttgctttttatccttaccagagtatgaaggtagtcctaggtacttctcatggcattcacaaataggcattgacaattgcctatggaagaacacttgggctactaaagtagtgttaggtgagaaagatattactgatttcttcgggttgagaacttggccaaaagcacgatggtagacatccaggacttgtttgattgcaagacaagagttctcgtttacttgacaaaataggaggctatcgtctgtgaagagcaggtgagagattggtggagcatgcctggtgagtttaaaaccatttaagtgacccaccgattgttcataatgaagcaagcgtgataatccctccaaacagattagaaacaaatatggtgaaagtggatagctttgtcgtactcctccagttggggtgagtgaacttgtaatttcaccattcagcataaaagtaaaggtgttggtggttaagcatccaatgatcagatcaatccatttggtagagaaaccaatttttgtcatgacctccctaatgaaacgccattcaacctgatcgaacgctttactcatgtcaagcttcaaagtagcaatgccacaacgaccaactgttttatttttgatggcatgaacaagctcaaaagcaacaagtatgttgtcagtgatcaagtgatttggcaagaaggcactttgtgttttggcgatgacatgttggaggacatttttaaagcggccaatgagaaccttggtgacaagcttagagatgacattacaaaggctgatgggtcgatagtcatgcacccgttgaggttttttgatcttgggaatgagggtgataatcgtcttgttcaaactagttggatcaacgccatcatttaagacacgtacttaacactgctttggctaccacctcacccacagtagaccaattttgttggtaaaacattgaggacatgccatcaatactagggctcttgttgggcaccatggattgttatgcatttttgactccagtagcaaggaaaggtcttgtaaggtcatcattcatcacatcagtaaccatttgagaaaattgcatttaaggtttgagagagagcctcctcatcaatagtatcggcagtgaaaactgaagcaaagtaatcttgaattgttactgccattttagatcttgaatgagctcgaaccccagcctcattaataagagatttaatcttattattggactttcttgcaaaagttttagcatgaaaaaaattttgtgttggcgatcacccgaacttagccagtcaacccttgagcgttgttgccagtaaatttcttcttgctccaataaatcatcaagaatagcctcggtgcgttttagttcattcatattgtcattgtttcggtgggacaggttgttgagacctgtcatcttagcttgagattcagcaatatttttcttcattcttccatacttttggaaatgccatttttgcaaagaagttgcacacacatccaaattagatagcaccgtttgtataggatcaatatttgaagaattgttccagcaattagaaatgatatcttttctttcaggatctgaaagccccaatttttcaaaacgaaaacaacttctccatttttcctgtagaaccgtggattttgctggtgcaaaagtggctgaaatggctctatggtcagagctgaaataataaagatgacgcactgtaggaatgctgaaatgattctcccaaaggtggttaacaaaacaccaatctaacctctctttgattgtatcgggagccaaatgattcttaatccaagtgaaaggttctccctcaaaaggagtttcttagagagagtagtgctctaacaccttacgaaaattttccatttgtgactcattgcgaaggcaaccactagatttgttatcattggagatgatttcattgaagtctccaattgctaaccaaggaaggttcaaagcaacatcagcaaaccattggaagagagtccaagatgcctctttgttttgagcatcaggtgctccataaaaagatgtacaatgaaaactaggctcactcccagcttttaaatagtagtaaataaggtgtgaccataattaagtagtgtaacatcaatatcatcataccagagaagcattagaccaccactcaaaccgactcaaggaaattcaaggctgttattgaaacgtagagactgtcgtaaacgaaaaatggaattattgggaagtttagtttccataagaaaaagaacatggggcgattgttgattgacaagcaatcagagatgtttgaatgcattcgggttccccaatcctcgagcattccagcctaagatttcatgatgattggcaaggttgtgaagcaaccatcgccggccagtcaaaagaatcaatagaatcctcattcgtagaaactacaggttcaggaacaagttcagaggtgaagtgggaggttggttgtcctccaaccccacgacatcgcttgaggattttcctcatagaaacaacatcacatcgtctcttagaggtggcatatggtagtgtattttctttgtcagtggttacaggtgttctttatggggtatgttggggtctgtagcagcagtagtagttgatgttgaaggggtataaatgatggtattagatgatagtatcagtggtttaagagaagggattggaagagtggatggaatagaaggtggtaggtggcgaaaatattatgagacaaaccagaagaactcaaatcaggtacataaacatgggaaaaatcagcaacataactagttgaaatagggagaccgaggtttggtttggcatggtttggagaagtgggtggtacaacttttggatggaagggtgccccaagaatatttttgcctttatgagttggtaagcttgagatgggggtggagtgtaagacaatattttggtgtgaaaaagagttggctggggttgataaggaggaggacgatgggtctgttgcgtgtttaaggagtggctgtgatgagatggatgcgtagccaaaaatgcagagcttgtcatagagttggtagtgggtttggcatgagaaagggggtcctcatttccaaatatgacccttggttgaggcatgctacgtgtgcttaaacgtggaacagcgaaggacaatgattgccgagccaaccttgttagaagtggcaatgcattgcctttagagaaatcagtacgataacgatcataaccatttgtggggagtttggcacctttaagccaaggcctgtatgggaggtcatcatcatttccattgtcgattctttccataaacatagtacaatgttcaaaagggtgtccaagaatgccacactcgaagcaaaattcaagtaaatgctcataccggtaatcaatccaaaactcatccttaattgatggtaagcatatcatttggcctccgagaagtggttttgtcacacaatgtttgacccgaacacgaaggaaggggcctcaaccctcattagtggagtcctcaaacacttcaataattgtccaatagtattgccaagagcttcagccagagaagaagtcttactaaggaaagggaatctataaatctgaacccaaaatggtgtgaagatcaaatcttccttagagatattttgtagagaatttggcgtgagtaaaataattagttgattctgaaagtgctaaagtcctttattgagcactcttctcctgtcaccttcacaaccaaaggagatatggaacatgtctgctttgaattcaattattaccactgggaatcggcctccccaatgtcttggcatttgttcaaagaaacctggtttgtagataggcttagatgaaagaacacgggcaataagagagaaaggcaatttgtgtagggggttaggggtggtagcatcaggcaaagaaatgacgttcctctcatcatcagtaagagagaggtggagtgtagggtgtctaaaaacgggtccatgggttgatgcacgcactagaaaccagaaaaaataggggagagaaaagcagaggaaaaccaaaaaggtagtgatctggggaggagaagggcggaatggaggatggaaaagaggtgggaatagttacatgaggctggagaattcaaaaaaagtgaagaaaaggagaagaaaatcgttaaaacaaaaaaaagacagttaaaaatcaaaatttgacacagacccaaacagggaacctacaacaaacatatctattggtaaaacttaatatgtaatttcattgaattataacttgccattttgtttttttgaaaatataatttgccatactgcttcctcttcttttgttttttttaagagaataaattttgcattaagtatattctacatcttattatataatatggtacgtgggttattttagaaatacataaaaatatgattgtatagaattttacattttttaatatgttatatacagaaaatacagttttttaatgttttcatgttatttttatattatacttttgttaatttttttatttgattttttgtttattagttttatgttgtctagatatcatttaggtgttgttttcttgttatttttatattattcagtaaacaacgtaaaatataaaaaaaatagttcaacataaacgtaaatttattttttatcagtgttttgtgtaattttttttccttatctataccccaaaatgggtcgatcaatctcacaacatcccaaaagacttgttttgcggtattgtttgattgaattggattacaattcttccagtaatttttgtttttgtctgagatgaatgttttgcggatcttttcatacacgaatactacaaatctcactttttttccttttaccttgtttggttattttttgttgacaaattctttggtcaacattacccataaccacataaggcattcttaaatgactctgagatttaaactgaactgttcattcattatagaaactccctaattatgttagtttgtgcccatattatgtttgaagacatgtgattctttaccacgtacagaagtgacaatactttgactgagaatatcaatggtcaacactgaaattataccttccattcatcttaggaaccccctaattatgttagtgggttccactcttttgttttgatacatgattctcaactatgtacaaaagtgatagtactttaactgagaacataagtggtcaacattacccataaacccacaaggcattctcgaatgactttgggacctaattcgaaccttccattcatcttaaaaactccttgattttgttagtgggtgcccatattacgtctggatacataattctcaaccacataaaagtgacactactttcaccgagaacatcagtgatcaacactactcataaccacacaaggcagcctaaatgacactgggacagatactgaagctttcaccttaggaaccccctaattattttaatgggttcccctttccgtcaaaatacatgattctaaaccacgttcataagtgacactaggggtgttcatcaaaccgctcaaaccgcccgcactacaccgcaccgcaaaaaaaatgcagtttgtatttctttgtagtgcggtcgcagtttgaatttttcctaaaccggggagtgcggtgcaattttgaattgttaatatgcagttcaagctgcagcgcaccacacattataaaaataccaatttnnnnnnnnntttaggtccaatatatgaatgtccgaccgaaagtttactaaatattgtattgttgaaaaaatagtcaaaaaccgcaccacctgcaccgcgaacacccctaagtgacactactttggatgagaacatcactggtcaacactacccataatccacaaggtattcttgaatgaccctaggaccacaactgaatcttccattcatcttaaaaaaccccctaattatgttaatgggtgtccaccttccctctcgatacatgattctcaatgatgtacagaagttacactggtttgaccgagaacatcaatggtcaacactacccataattgcacaagtcattcccgaatgactttgggacctaaactggaccttccattcatcttgaaaccccctaattatgttagttttatttttcacaaaccgttttacaaagtatacagaaacattatgtaaacaagaaagtaagttttgacattcaataatataaaagccaaaaatagaattgaaactaacaaaacttctaatagcttgaatagtaactaagctatcagattcaaccaacaaattgtgaacatcattatctttaattcaactcaacacatcttttatgcccatgacctctattgatatagaaaattagtactcttaatcactaagagatgggccacattaatatggctaagaccccaatttagtcaaattaaatatacgtagacatacaaggaggtacctttactcatgagaagtgggtacaagggggtatgatagatcaaaactataggtatgttgcatgggatgcaaggtcacccccacctggatgaatccccatgtgcgaggtcccctctcgtaccctcttaggtctggaggtaccctttaatcatgagaagcgagtaaaagggggtatgcaagatcaaaactataggtatgttgcatgggatacaaggttacgcccacctggatgaagccccatgtgcgaggtcccctctcgtacgctcttaggtctccacctcgctaccacctcatgagagaggtcccccttgctaccctctctatgtgcgaggtatccacctcactaccacctcatgagcaaggtcccccctcactaccacctcgtaagcaaggtcccccgccccctcgctatcacctcaccacctcactcatgaaaagccccacgcaaggcctcccccacctcgcctaggtccatacaaggtccctaccatacgtagcgccgcttacctcatgtatgggaggcaatgtgcaaactacatactctctctctctctctctnnnnctctctctctctctctctatgtcaaatgacatatgagatgtactttctagctaactcaacacacaacgtactacatagctcttatacctcacttttaaatcaccaatatttataggtgtatgtcctctactcctcctatttattggaaacactttaactaagatcttatttactattaaaatatgctaaattaattttaatctaacatcctaatatagaaaagcctaaaacaattacataaacacataaagggattagtatatccttacagtggttgcagtagaattaattggctccttcaattctgttctctcacccttgatcttttctgtcacagagtgtgatcaagggctgaacttggattccccttcgggttgtaaaagactacaaaatcttccacactatcctaagtattgtattgatatgtgtggaaaatcactcaatactaaggaggatgaaattttattaagaaatctaagagaattttgaaattcaaagtgaatatagtataatagctcttaattttctatttgtcttacaaagagagagtcaaaacttgtcattgggttaagagttgtaatgttatatatagtgtaggtatagggttaggtttagaattaaattcttcaaaaatactatttttctattctaattgtttaaatgctaactttatctatttaataattataattaattatcaaaaattataattaattatcaaaaaaaataattaattatcaaaaaaattaccaaattatcaaaaaaattaccatttatttaaaaaaattaccatttattttaattattaattagaccctacaatgtgtcttaattaacaaataaactctaaattctttacttagaatcctaattgattaatgaaaattaattaattaagactacaaagtaatattatctcagctagtttggggaccatgggcctatatnatcaagctcccaataagtagttctagcatttaccgagtaatatttttcaatcttattaattcctcctgattccattatagattcagaatcccactcttgattatatagagcgctctattcaccaagaatagatatgctataagttatcctttgttttaatctaaataatcaatgatcctctatagataatctacattaaatagggactataattactgttttacctcttaatgtattttatccttaaaatacttagcttcttataaatgatatttcagtaaactaatataattactgaaatagaaggtcttccatttatgtttattagccaagctctaaggaaactatcatttcacttataaatagttataaaagctatagattccatttatatgattaacgctctcactctattgcactaccgtgttcc

SEQ ID NO: 14385 - DNA, 6107 bp, Cannabis sativa
  modified_base (86)..(89): a, c, t, g, unknown or other
agaagtctctcacggacatttcagctttcattgggaatctgaatacacgtgtccttttaaggaggagtctggtctcgagtttctannnnagagaaatctcactataacatgtaccatatttagtagtttgccaagtatggtaatttttgtgtctgtgtgacttgtttatactatatatggtgatttgtcatgtacggcaatttgtttaagatttcttcttagattcatcctgaaaatggtgtaaggtagcagtgacatccctagctccagaaatatcaaagataagtttttcaacaataaaattaaaattcgtcattttatttaatactatcattatgtagggtgttaactaaattttattttttttcccttataggtatattttctcactcacttgattttttaaagatcaaagatttaaggagagaagtttttattacaattcattttcttaaattaatataatgtgaggtagtagtgacactctcagttctaaagacttttaagataaattttttgcataacaataattatattttagaatatttttctagcattgaaatttaaattcctattttaatgaatattatcattaagtagagtgtggtgttaactaaattttatacatttttataagtgaattttatacatttttaataaatattatcattaagtagtgacactatcagttcaaaagacttctaagataacttttttgcataacaacaattatatttttggaatgtttttctagcactaaaatttaaattcctattttaatgaatattatcattaagtagagtgtgtgttagctaaattttatacatttttataagtgaatttgttacttcactcacttgattattcaagtattcaaagagtttcaactcaacagataagttataattatcacatgatattagatatttttttaattttattattcttcttgttttgatactaatatttttttctccttatttttagatttattggcaaaacagatacatttttagggatttcttttaagatattaaaattttattgtctaattttttgagcatttcttttttatgttagtcgcaacgttaatgttgtgactcataaattgatttaacatgccctaaaaatagactatagacttttttgaatggaaagaatctctttactctgtctctcgacgttcttttctctaacctataacggttacttttacccaaaagaaaaactataactttagtatagagctttcgtaattagacaaatgctatggtatgattaaatctattaaagaaataaaactttggtgggattaaaaaaaaaaattcctatatattggtgtcaatgtcaatcagccaatgcatcataatttcttaaagcaagagcgcgagcataaacaagcacataatttgagtggttatgaacatttctataacaaaaaggaaaatcattattattatataattaatttaaaattttagtcatagaaaatacatgccaaagatagagttgtaactttgctacggccatttagagtctcaatatttaacttgaatttgtctgtacaatcagataatatttcattttaatcctagtatgaaattttacaaaatttcagtcatgataagagtaaccgagtgcaatttcttcatggatgtcgcaccagagtgtcatacttcgcttgatgtaataatgtaataccgaaacagcctgtcccgctctaggcaatgttgcataaaataagatttttgaacaaatgttaagtctatggcctcccaaaattgtttggaggccgcaagcacagctgctcaatgaccccgggactaggttgtttctttattggttgcagcttgatctcaaaaagcttcggccatagctttccagtcactgcaaacattaatgagtttttgtgtaacgaataatgatacgtgtacctaaaatatgcaccgaatatttacaccaagcaacatgaaagtttttaatcaatcatatttatttaaactgtttagataccccaactggttttagaaatcggtgccacatcagtgtaatgtttttgtgcagattttaggagaattcacactcagattaattaaattgcttaccaaaaatgcgatttctgctcctatcccaagcaatgccatttagaacatctatatcctaaaaaagaaaagcaaataagttactaatagaataaatcaaaacaacattcagcatctgcttctcagaagtacagtattacacaaggtattttcattatatcagctcacccgattcccagaacggaccagtttctccctgtaaaggcaaaacgaaaaagagaaagaaaaagccatggacttggtaagaaaaccctttgatattctgagcacagaatttaatggagaccgaacaataataaagaaactgaaaaaataaaaacctcagctctggaagaagaatccatccaagcatgctaccatccccaggcgagattctagcaatgcagtctgtctacacaaaacttgttaaaaaagaaattacattaagaaaggcaatacagaacagctcaatgcataattttatctttctcagatatagcactaaaaaaaaataaaaactttctaattgcttattcgaaacttccaacaccaaaatggataataatattattgtaggttcccatgcatcctacaaacatgcacaaaaaacagataacacaaacattttcttacctaaactacagaacttgggaaaacacaatttctttaattcataaacacattatagttagctgaaatattggaatgccgctacatttgaagttaaggcatttgtggcatttctgattcactatcactgcaactgagctcaacaccctaatataggaaaaagtaaaacagcatagttatttaactgtaggtgatgaaaaaacttaccccccaaacatttgcccaaacttcgccatttatatactccagctcattaatgttatgtacttcatagccattgaatttgacgatatttttactgatgactggcatggaaaaaaggaaaatcaagcaacaaaagaaatgagcttatcagtacaaaacttaattgaacagctgaaccgccaccatcaaatggaggaaatcagatgcataactagatgtatcaagatgcataactatatatataatatatagtggagaaaattaccgctaccgtttctagcatgaaagtaaaaagaagaaaagaaagagcttagataaaatttaataccaacaaacctttcagtgttcgtgggtcaatcttgtacaatgttgatgtcccatcacttccaaacaacactttgtcatcagttgcgagtccccaaccgtctttcatctgatgagtaaatttcttgaactgggtaaaacataaagccatgaaactcatcaagacaacagcctggacatcaatctttaggcattctaaaaagaataattcgattcaatctctgcagtactatgtgctcctaacaagaaaagaacacagcaacagtaattcaaggaaaatggctaggaagctgttattttcttcatgttattgtagtaatgggaacaaacagccaaaaacataagtatggaaacaaaaaggaaaatggaagtatgagttaaagtaccaactttgcttaaattataacggtcatatatgaaaccagtttctgtcaaccaagttacttggaacagcctgcaaaagggcacataacttcttatcaacattgcatcaggatttgtcaaactataacatgtgtaatgataaaacaatggaaacggagtgctactaattattgacatttctccatttttcagttcaaaataatgtattaaactttctcttcacagaccttcggccaattagagtcaaaccctcaccaaaataggaactatccatctgttgaagaacattgacctgtcatacaaaaacaagatcaccacttttaaaacattggctcattgcaatagtacagccagtcactcagccacataaagttaatcacattgatgaactaaaaaataccaacagaatcacaaaaacaaactattgattatatctagcagcaacaaccatcacatcaaccataatatgtcattgacaaataaacttggagctacataatttcgaacagtaaattattatcacagatgactaagtaaaatacctttccggtttgaagagcaacctttcgcacagatgactggaataatagaaaagaataaggtcaaatgatgaaacatcaacagtaactcccactaataaaaggataaatgtaatttgatgtaatgaaaaatatacagcctaactataaatatacttgtacatgtatgaaacaatctacacccgtatgtatattagtttgtgaggccgaccacagaagcgttttgctacaaagataaaatcgaaaccattctacagagttcaggaaaccatagaaattatctattaaggtattgggtttacaacaacaaagggaaagaaaatatctttaataattttcaaatgtaggtaatcataaaacaacaagaggcttatgccaaaggaaaatcttagaaaattaaatggcacagctcacatgtccatataagccagttgactcaaacagggtgtcattgccagcatagacaagtccctgaaacccaaaataggcaaaagttaaccatataaaatattcaagttttgactcactcagaaaaacataacccataagattaagaattatgagtcctggaatctagtttttaattcgtgaaggtgtaatactattgcgtgaatcaatgaccaatgttttaaaatgatattaaatcttatgctgtgaatagagaatgaaaaacaaaaacaaaattccgaataatcaagcaaaaaagatctaaatgtcgcaagagattttacctgagtaaaggcttgagaatcatgagggaaatcattgacaacctcaatcgagtaaattgcaggagaagcagcatcgtgcttgagcacggtccacatgttggacgaaattcccagtgtaacaaccacgcaaagcatgaggaaaacggcaaatatcagagagcctcttctgaaactcgaatgaattgatccaattgccatgggagatttgggattggagttgaggcgcttattgaggtttttctttctaagcgatcctttggacatggtgttcggaattagtcatggatcaacggtcagtgacgggaataggtcaagctttggaaggtggggtgtgtattgcgcccagagattgcagagacccaaatggccactataatacgccggtgtcgttgattagttggttgactaacttgaaagagcaggtccagctggtattgggtgaggagttctccagctgattatcattttaattaggctaattaggatttttggacactgaactttgacatgtaccaaattatgctccttaaacttttaaggtcgttaaaaatgtcccttaaattattgagattgtttgatttaatgacttttgtctaatttcattcaaatttactatttcagtgattgtttatgtactaaaccatgttatccagactttgatgtctaacaagtcatgcctttcgaactttgacatgtactaaattatgcccctaaactttcattcatattacacttttttactaaaattggaaaaaagttcttaaatccaacaatctcaatagttcaagggcatttttaacgaccttaaaaattcaggagcatgatttggtacgcgtcaaagttcagggggcaaaaatcttaattagccttttaattaagataacttatttataagaataattatttatttaaaagttttgctttttttatgaacaatttaattgaaaatggatattttttatttttacaatttaaaatattttttttttatatatttttaccaaattctacatagaaatttctattgcaattagtggagcaacctaaattgcaaccaaaaattgtatagcaacccacataaaacccacctaaaaaactactttaaaaacttaaaccgtaaattagaagaaaaaaaataataataataaaacaaatagtatataatattacattattaaaaactctaaactagccactagtcaagatttcataag

SEQ ID NO: 14386 - DNA, 1818 bp, Cannabis sativa
ttggtttgcattgagatctgccatgattgtagcaaaatcttgagagacaggaaccatgtatccggttgtctcaatagtagccattgtgctagcaataacaggggggatcgtaataggagtggatgttgcaattgttcaggaagagacatgacattattgatgtgagtatttggatcagagatgatcgggtatggcaaagagggggatggctaatgagaagggttgtcaagatccacaacatttccattatttggccaagccgagaaggatggaggggaactagatccaatatggccacaggtaaaagagctattatgggggtgtatgtgccatgtaacatcccaacggtgtggttcttggctgatgaaaatgttgaatcccaaaatcagatgttggttcattataaggttgttcggagatgatttggtgtgtacgagcacgaggattttgagggggagccagggatatgggattggtaacatgagggcgaagacgagttcgagtactagcaatataaaaggggtttgaggttatgcgaatttttgctcctaaggtgtgatcatattgaagcaagggtggggcagaggaagagtcacacttagccaaaaaatcagggcaatgattcacaatgtgactaagggacccacagaaatgacaaaagtcagggagattttcaaaacgcaattccaaccaaacaggggcagccatgccttggaaagggaaccggttccatggcgaagaggttgagtgacatcaatttcaatacggaccccaagtttccttgagagaggcagtgtcaacctcaatgaaacgtcccaaaacttccccaagtttcctagcaagagctctagaacgtttaagaaaggggatactcgaaacttggatcccgaagggagttgaagtgagcatatcggctgggataacagaaccagcttcgagaggggacattacaataagcttatagtcaaagtgccatggctgtataatgagaacacgcctacggtcaccgaaacactcgaattcgaccgtgaaaaaattcggttctttttcaaggatattgatagaaaaacgctcaggccacatttcacttagatgcttttttaaagcctagggatttaaatgacgagtggtcagaagcttgacagcgagaaaagcagaaggctcttctcgattttcatattcaggcaactcagagggttcagagaaagagtggatttttgtttcaattttagtaaggttgagatttgtagaaagtgtattggtcaggtcttccatgctagcaattgatagtgaccaagcaaagtgggatactgaaaggggatcaggaggatatgctatttgaggatgatgttcgtgtaaaattagtacctgatgtaaagccacactttgccttttatagtagggacaagcattgatcagtatctccaagagggaactcccagaagggaataaattcctcatgtcagacagggtaatgatataaaagaaaatagcagtggctcctaattcgaatctaggggttctagggcgagtatagaggtcacctaaaggggtaggactaatgatttcccaaggaggcgcagaggggggtggatttcctaatttagtatcaactaaggcaaagtggaggagtaaatagggatgtttaatgtagagggataaatgcagaaatgatgataaacccaagtggtaatgaacagatgggacacaaagtgagaagtaatggttgaggtgagagttacctgttttagggaagaaagatgcaatgaaagctttgttgggttttatgccctaaataaatctcatttcatataatca

SEQ ID NO: 14387 - DNA, 5555 bp, Cannabis sativa
gtcccgttattgtacttttacagaattgtaattcgcgatgtacattagatgggtctcaggatatatttatactttttaatcctaattaccccagatcaatctcaaccgtcagatcaaataactccctcatctgacggctgtcgtacatcacgaattacaatccgtgaaagtacaataacgagacaaaatcatatccctaaaattgtaattgtaaatatacttgcagtaacagaacagaaatagaaaattaattaggcagaatttagaaacttacacaagagaatgaaatcaattaaaataattgactaaatatataaatttagactttctctaataatttatcacaaccctttgtaatccacattgcaaatctgatctctgaaccacacaaagtagtgaattttcttcaactattgatgtgtgtttacttcctctcaaagtaagacttaaacaattttttttccaaaaatatatgctcacttctttacgaaatgagacttcaaaaagtcttctcccaaagatccacacttgttcaaagcttccattcaacatattctatgaatagtacgagatcataataagaaaattaaaaattttataaatgtaacactcttctcacaaaaatagatataaaaatatgatactataagagataaaaaatatttgagtaatctctatacccgatttatataatatagaaacataaaaacaatcacagacacgttttcaaagttctacaagacttttttaaagaaaatcgttgatttactatatcaaattttgattctagtgccgcaaagaagaaaataaaagttatttaatttgctatatacataccaaaaactaaattaacatttaaagaaaaacaaatcatatttttaaaaaataagcaactttccataaaaaaaattcttaacaagtttcctaaaagctgtaaatacatctcttcttaaagaaaaagagcaatcaaactcataaaattaacacaagaaaatttattttaattacatttaacacaaaatttcacatttttatgtttggatgaatgtgtgaccgctaattccagtatattcgaatcatggaagccacgtgtcccttaggaaactcacgcacgtgatacgaaacagaaaagtttatcgtaccagaccttgaactgcccaaagaaaaagacacctcatcctctgagaaaacgacacgtgtcatcgcacgacaatctagtactacaaagaactgtcaactcgcccgagttatataactcagctgacctctttcttcaactgagtcaccactctcaactcactccttactcgttagctcttcttcttcttcttctcaacaatttatagtaagtcaaactcgttgaagtttcttctttccttttcatttgactaaccgaattcagatattttctccgattagttttcggtttccgctactttcttattttcttcctttaaatttggagctaacgtactatctctctgtttctcatttgagttttcgagagattttcttctccaaagcttcgatttttagctggtgggtattgtttacagctaatgatctctgagaatattacagagttttttctaaaactgattttctttttctttttacagagctagcttcgccggaaaaaatggcgacgatcacagcttcaagttttgtgtcaagaacttcttctagtgtcgccggccatggaagttcgggatcggagactaaggcgaatttggctcagaggaattaccaaacaatgactcacagtggattaagatctctgaacaatctgggtatgttaaagtgtcgatctttacaaactccggtgaccggaaaagctatgaaaaaagttgaggagactgagaaaaacgacaagtcgtttgggaaaattgtttgtgggaaaggaatgtcgttggtgtttgtttcggctgaggttggtccatggtctaaaactggtggacttggtgatgttcttggtggtcttcctccggccatggctgtaagtttctaatttctttacaaaaattttggatggatcatttgttttttgatagttaaagttttgatttttaggcaaatgggcatagagttatgacgatttcaccacgatatgatcagtacaaggatgcatgggacacttctgttcttgctgatgtaagttatattttctgtttgtttctcgagaaagttggtctaagaaaataaagggattatttgattaaaattgcagattaaagttggtgacagagttgaaacagttggattctttcattgtcataaacgaggagttgatagagtgtttgtggatcatccctggtttcttgagaaggtataatttgagcttaattaatttagttttgattaattaattagtgttttaaggtttggattagtgtatttaattaatgatgattaaaacaggtatggggtaaaactggatctaaaatctatggccctatcactggaaaagattacaaggataaccaattacgcttcagtttgttgtgccttgtaagtttattattattattaatactagtgttccttaatttattatttttctaaagccaataataataataatattaataatattagtgtaatattcacacagaaccatttttttcttttcttttttggtgtaaattaaaattagactaatttttattatggtttttaaagtataagtttgtaaaaatatgttcattttttttaaaaaaaaaaaaaaaatcaaaaatcatatttttactctttatagtatctggttacccaaaaatatatggttactcttacttgatttttttatattttttaattttttcttcaattttctcgtcaaataattttttttattgaaaaaaatatatttttatacaaaaaaatttaaaaagtcataaaatttttaaattctccttaaaactataggaaaaagtttctaagtaatatatggtttttatatattttgtttatgatttttaagttaattttggttttcaggcagctttagaggctccaaggattctaaatctggacaataatgaatattattctggaccttatggtattggacttatttctctaaataaaaattagaactttttaattagtaagtaattaaaaatcattccttttaaactcataataatttcatgtatcaggagaggatgttgtgttcattgctaatgattggcacactgctcttcttccatgttaccttaaatctgtataccaacctaagggaatttacaaaaatgccaaggtaattagtgattaattattcatcttttaattcatcattaattaaaataaattgattaattctttctttattataatattataggttacattctgcatccataatatagcctaccaaggaagatttggctttacagatttctcacttctcaatttacctgatcacttcaagagttctttcgacttcgttgacgggtacgtacatactttcttaagagtcatatcgttgttggtgcaattaaaaattgagtcttacatgttttaatttaatgagaaatgctaaaaaaacaccacactgaaggtgttatatcggtattggtgcaattgagtattaagtcgtacctaattcaatttaagagtaaatagtgatataagtacctaaagttttaagtttgtaagtgacataaacttaatatttatttttagcgacataagtacacaatatatgtaaaacagtaatttttctctaattttgttaatacaaactctgttttgaatttattaaaggaacacttagaagtatctgatactacatgtttctgtctagacctaatgatctagaatctggaccttatatgtagctcgtttaaaaaaataacagaatttattttacaaacattgaatacttatgccgttaaaaataaacatcgagattatcctacttacaaacttaaaactttaagtacttataccgctatttaactttcaatttattagttgttatgaaatttcactaaccatttataagatatcacgttaaaatagtgttagacaccaccatagttacttaataacaatactctttttgtttagaactctaatagggtgtctagatgtctagaaggttaaaaaatatatcactttattttgcgaattttacactttgatgttgttagttttgcaaattcatctcatacttttctaacatgtatatttgagtatgcatatctaagtatttttgttttaattaaggtatgagaagcctgttaagggaagaaagataaactggatgaaaggtggaatacttgaatcagacagagttgtaactgtgagtccttactatgcaaaagaactcatttcaggagaagacagaggttgtgaattagataacatacttcgaaacactggtattactggtattgtaaatggtatggatgatcaagaatggaatccctccactgataaatacctcgcaatcaaatacgatgtcaatactgtaagatcctaagatttatttttacttaagttattatgtttgtagtacttaaatatctaagttatgtttttttagcagagaaagtacttaaattattatgtttataacacttaagcgtctaaattgttttgttaacgggccaaagtactcaaattgatcagatacttaacgctactttaaaaataatttggatactatagtgtcacaaacatatatggggcttgcgtcctaggtctggggtctaagcctgggtgtgaatttcaaagctcggggttcgggtcaggggtcaggaataattcaaggtttagggcggatttaggttcggggtctgggagtgggatttgggtccgaggcaaatctaggtctagggtttgagtctgggttcaggttagaggtcagcaaacataactactttagtattttcgccgttaattgataatttaaatatttaagtgctataaagataataatttaggtactttctccacaaatatctctttttttcaacgagattctataagattctgattctttttttcattattttttaatattaggtgtttgatgctaagcctgtattaaaagaaactctacaagcagaagttgggttacctgtggacaccaaaataccagtgatatgttttgttggtagattagaagaacaaaaaggtccagatattcttgtggaagccattgatcaaatcattgatgaagatgttcaaataatcattcttgtaagtgcataataatcattattacttttacttaccacttagaatgaaaaaaaaaagaagaagaattaatgagttgattttgtttccagggaactgggaaaaagtatttggagaaaatgattgttgaagtagagaagaaatatcctaacaaagttagagccataacaaaattcaatgtcccattggctcatgtaatgattgcaggttctgattttattgccattccaagtagatttgagccttgtggtcttattcaacttcaagctatgagaaatggaacagtaagcactacacaaaactttattgttcatctttttggaaaattttattgtgtatcaactttgtacttt

SEQ ID NO: 14388 - DNA, 8240 bp, Cannabis sativa
aaaaaaaaaaaaaaaaaactacctcaaaataataagccagaacaataataaaacaaccgttaaaaaatattaaaactatgaatacaatataaaacaaaaaatacaaaatacataacaacaacaacaaaaaattaaaataaaatgcgtacaacacatagatcagagattaagggcccagaacatcaacatcaaaaaagaaaaagaaaatcctaaaataactgaaaaacaacataaatactttcaatactttgagtatcttacaatcttcatcatcaaattcgaaattagagtttgaatcttaaatgatcggtttcgaacgttttaattttctcttttttagagaatgaacaactaatttctttttggaagctatagaagatgtagggctatggggttttctttgaaatttttgttacccattgctaatttactaacaaaattaaaagaaaaaagagaggaagaagaagaagacttgaaacaaaaatagaaagtaataaaaaaaaatagactatctatgaaaatatcaacaataaacgtggaaacttggagaaatttagcttttaatcatcatttaaaaagaaaactaaaaaatattagaaaagagttgaatgggatgaagaaaaattaaaaaatgagaagaagaaagagatgatgaaaaaaaagaagaagaagaataaactgaaagaaaagaaagaagaaaaaaaaagatggagattgatgtttatcaatattttaattttttttttaaaaaaaagaaaaagtttcaaaattgtcactactaaacacaatataaacacaacttttttgtacattatagtatataagggggtacaatatttttgtaagaaataccgtgttacaataaaaataaaaatcaaaaaagtcagtatatgatgtaaaaacctcttagaataaacagttctactcatgtaaaaaaaaaaaaaaaatacacccacccaattaattctgtttaaatcaaactataatattttctcaaaaaaaaaaaaaaattgataggatgtatgtttttactataatgtatatatcatataagaaaaattaagttataattttttgtcaaaaaatatagatacgatcttagatcttactaatagagagctcataaatttaagggagaccaatacatattagaaaaataaaaaaaaatatttaattaatttttacatgtaatttaagaaaaataaaataaaaaattggaggggtggggcagcaaagcccaaacccagggccccgaccccaaaaattctttaacaaaaacgctttaaatttatttttttaaaaatattaaattttatatttttattattatttattaaaaaatatctaatttattttttaagataccacattttatatttttttaaaaaatctaattttattattgttaacaaagattttcgttaactaaattaatagcctttttgaaataaatatactactgaaacaaacatataattaataaaaactagatattttacgtgattttgtagttaaaatctacattcttcacgagtccttattattagggatctttttttagtatagaatacaatatcagtatttaaataaggatattttttctctcaaatttgtcgtccctttttccatagattctgcccctatttctaggcacataagttcgtagttattctctttaggattggttcaaatataactgttcatgaaacgtgtataatccccacgtttcatttaatcacacatgggataatatctaataactacccaaccgctctttattttcattctctagacggttattgttgacttggaaggttgtatctcgtcagatgtgagttttccttcttgtccatcttgtcaggaaaaaatgctaagtgttgaagaataattcatctcacaatattcctttattggtattaataatgtgaggtgatctccatgctatgtgtatcgcgaggcgactgagtgttactacatttactctgctcgtgcaggagggtatcctcttctaactgagtttatcccgagacagatatatatctcgtcaataccagtttaatagttattattcttgtcttgcataagactaagcatccaacgagtttaaacattatctatcaaacttatatcgaattgggacgagttatttatatcgcatttaatgatagaccattattatattattagtgttgattcacgttccttctgtaggacacgtgtcagcttctggtacataattttgggcataacaattgcccctaagaagtacatttttaattaaaaagaactttttggatgattacaagggtataatcgtattaacccatttttgaaaaattgcatgcttttatttttggcagttcagaacttcgaggcacatcattagcatttaatactctgaccgttcccgtttgaaatgttcccatccgttagatcagatttcttttgatctaacaatgatcagtaattgggtataaaattggaagtgaaatttcatttcgccatttttgtgtttcaaaccttcaaagctttctgtagaaaaattttccgattgccctttctcaaccttccatgccctcgttttcccttacatttttcttgcgtattacatctaaccaatcttccagttctagaactcaccaggacccagcttctcaatcttcgagacttcgtctgcaaagatctttgttgcccagaattcttcaacaagacactaagtggcacactctcttttctttgtgatgatttttctattttgtcttcataattaggttagttttcccttatttgcattgttttgctgttttaggtaattttgatttcgtttgtctgaatatctttagggctgggaatatttttaggttattcgattcgtagattttctgggttgagtttgtgttctgtttttctagaaattatcatattgttatttataaatatatcctaattcgttccacaaatcacaatcccaaaatttttagaatcagattgtcctcaaatttctgccattaaattcaaacccaaaaccattcttgaattaatatgaaaagatttgggatcatctcgttaaaactagtcaagaagaaacctcaggccgatataggcgatatttacaagaaataattaaggttaaacgccactttttacgagaagctgcttggcttgagcctcaaaatttatttgtcattcccttagcgaggcttttgtttttacctctagtcactattgctttttcaccaggtaacttagaatttgaaatcatgacttcaaaagctcaaaaatccaagaccccccaagatcccacagttactttcgaggtagagctcatcgaatccaaagttacatctataggagcttatgttagcgaggtactgaagtcttgtggtatcaagtatgaacaaggatcccgagttaggtccgtcactctgggggaattcagttgttttccccatgaacgtgtaattcgagaagaaggctgcagtactagcgagccatctaggataggcgcttgtagtcttaaacatataagagctagagcagtacaccctcttaaggattaatacaaggaattctacaactacctcgggattgctccctttcaactaattccaaattcttaaagaattttggctagcctaaaagttgtataccaaattttgaagtgggagtgcccaaccccactacaaattttatacttttattctgtaaaggcctgtcccacaagaagagaggagcaggtggcttctattacctcgggacccacacaaatgatcaaaggatcattgtgcggtttcctaacaaaaccgagttcaaggacgactttttttgggtagtaggcctcgctcctatcaacacaactaccttttaaataatacataagttttttgcctcatctcaaaaacttggttttgagtttttaactttttaattgtaggcacttattttgtttatgttgtattgacagcggttacgaggaggcctattgggactctagaaatttaaaaaaagacataaaatccttctcagtcttccctttagtttgcgatcagttgatttcttactccatgaagataatttcaagacttgaaatcttcttaacattgaccaagccacccgtgacttcaaagttctgaagtatgctgatcggtataaggttccagtccctgctgatgaggaagacattgattatgtggctcgcacccagttcttgaagaacttaacccctcgaaaaactaaagaagatgcctaccaaggtaataattttagtatttatggttggtctcctaccgtacttagggccaaacgcacaaccttagttaaatttagggatagccagtacaacttttatatctggaactgcgtagatcgaatagctcataggtttgatagttggtatcccaaatatcatgtccagttaagttgtgatagctcctacttcaaaattgtcgaatagtatggtacaaacttggatagggcaagccatctggattgggatttgtctcccctaaacacctttgatttattcatgatcactggttctagggagtttagtaattattgtagatcttcctcatcatcagatgattatggtaattttttgagtgggagattatctttccacatttactttatttattttatgcaagtgttgaccctgtattttgcctcgcagatatggattttgagaacctccttaccagctcaggcaaaaaaggaaaaaatcgaattgctgctttagagacttcttcaggggcgaatctagtgccattaaagagaccaaggaaaaccacggccaataagaaacatgcctcgagttaaatggttatcgaactagcagatcatcaagtaacatccccagctctagctgaagcacaagtcttaggatttgttcaacaggttaaattctcaggttctcaacccgggatggtgcttctggaaccctcttgcccctgccaagtcctacaggcattgctgggtcacaagcttgctcagagtttgctacttcctgctggcgccattacaaatccttccaacaggatgactgggacttgattaacaatggcaactttgaaaatttattaaagagaagtctaaatcttactctctcgattagtctttttcttcatctcatattttcactttattttcttcctttgtcatccttctcctgacatatctttactgcatgcatctcatttgtctcacttggcacaccaaagaagccttcagagaattgaaatattggaattcaagcttcacaagtccattgaacaacatgaagttgttgcgaggcaatagaatgattcttaagtagaaaacacccggttgatgaaggaagtagaggagcagaagaggaatcataaggctgagtttgaaagttctcaaaaagatgccaaggatcaccgcaaagctcaccaaaaagtctatgaagaacttaacaaggccaacaaaaaacttgagggtgtcgaggccaatgccaaagataggtgcaatattgttgccaaacgctctatctatggagcttggttggccaatcccaatatggacttaagtttcctagagagtggtgctgaggagatgctggcttattgcgagcagaccaatggggatgaagatgttttcgaggaagaagtcgaagaagaagaagatgaagctactaaatctccaactatttagatttattttttaaccatgaccctttggcctagataatagtttgccccttgtggcatttttgtaaaacttttgctttgttggatggccaacatagctaatttaaatatattaacttttatgcctttatcctgcttctttcaagttatatatatttgtttattgcatttcaattcacaatctaaacattttttctctcaatttagcttagaacactctttgggttacacgtattttaatgccatcttctttgagtttcacgagtagttaataatctaccacgtttttcacgagcagtttacaatctatcatgttatacgcgagcagtttataatctgctattttatatgcaagaaaactttaaatatattgaatagttttttctatatctactttgaatatttttttattgctaatatgaacagttaatcctctattcacattctatcttaagtattgtttttcaagacacatgtgtacctcgtttacaatacgtgctataattatgcgagccattatttactcacctcgaacataactttttgtgttttattagaaataatctcacttataacttttattttaattctttgtttctaagaaaaggttttttgactttatactatccaatagatagttttaaccaattatcctttccttcatgaaaaaattttaatttttagatttttggtattacagtatataattctaggtgaaatctagttatcatacacatatatatgccccccaagtaattttaaaggaaagaagctttgtaattacttgaaaaaattcaattttattcataatgattaatcattacagaaataaatacagcatttatatattactggtaatacgatcgtaaatgttcactgttctaataattctttattagcgagccgttaagaaaagctaatttataaaccccggttcctacgaaagcttcaatgacatatggaccttcccagtttgggttaaacactcttgcagttggatctcgcgtatttgcaaatacccgtctcaacaccaaatctcctactttaaacaactttttcaaactctcttgttaaagtatcttattattcagtatttgtaagctgaattggtaatttgtggctcattgcttttttttttttcaagtaggtccaaggacattttcaaaagctcttggttttgctcctgattgtagaattcacgcatgtgggtcgtaatgttaacttctactggtaacattgcttccgagtcgaatgccaatgagaacggagtgtgtcccgtcgttgttttctctgtagttatatgggcacaaagcacttgtagtagttcgtcgacccatcttcctttagcagcatcaaatttcttcttaataatatcttttaaggttttattaacaacttctacttgtccattttcctgaggcctcgatactgatgagaagcttctaataatttcattcctttcacagaactcagtgaataattctccatcaaactgagtcccattgtcaaatactattttgattggaatgccaaacctgtaaatgatgttcttgataacaaaatcgagaacttttttacaagttatagaaactagaggtttagcctctgtccactttgtgaagaagttgactgctacaactgcatattttgctcctccttgccttgtgggtaaagccccaatcatatttataccccatattgcaaatgggtatggcgaggtcatcattcttaactcggttggtggtaagcgagttatatgtaaaaacctttggcatttatcgcatctcttaacaaactcttgtgtgtctttattgattgttggccagtaatatccttgacagataatcttcttggattggctctgtcaacctgcatgatctccacagaagctttcatggatctctttgattatttaatttgcttctactagtaacacacatcataagagtggcatggaataacccctcctgtataatttcccctcgaccatcgtatagcgatgtattgagtataagagtttgtctgcctcagttttatctgtaggaagttctccacttacaagatacttgacaattggagtcatccatgttggtgaagtatctatcatctcaatttcttccttctcacatatgcttggatcatctaagacctctaccagtaccaaatttaacttatcgaggtcaaattaagatgctagttttgctagtgcatctgcattagagttttgttctattgggatgtattcaattttgaaataatcaaacttttccaagtacttccgaactttctctaaatatttagctatttttaggcctttcgcttggtattctcccaagacttagtttacaattagctgcgagtcactatagcatgtaagattttttatctttagtgcctcaactattcttaaacctgccaacaaagcctcgtattcagcctcgctgttagaagtatcaaattgaaatctcagtgcatagtgaaacttaaagccttttggtgatattaatgttacccctgcacccgaaccctgctcgttggatgcagcatccacgtataacttctaggttt

SEQ ID NO: 14389 - DNA, 12015 bp, Cannabis sativa
  modified_base (51)..(53): a, c, t, g, unknown or other
  modified_base (79)..(95): a, c, t, g, unknown or other
taaggtttcttaaactcttatgtatttattttattgttttagaaattcatnnnaggatgttaataaaacatacttggtnnnnnnnnnnnnnnnnngtaaaatatttccaacagtcaccctataccaggcttccgaggtgcctcttagagcaccttctccagatatgtccctatgttcatctggaaggtttcgtttattccatctcgtgaatgcaggagaccttggatccaagtaagcctctatctggaggcgagtcttttgggctagaggtaggcttgggccacctctccgtctaggccagatctatccttgtagaaaggtgttgggccgagccgtcatgagccaatcctactttggaaacgctacgtgtctcgtctccagaaacatagataacatgtaggatttaggaagaaagaaaaagaatagaaagtgggattatagcatctctaatggagtagtaaataagtggtgtattgttattttttagcacttctcaataaaaagcttctccaatagtgtgctataagttatgccaagtttaacacatgctaaaaattggaccaaatttggcacacaataaatgctacttttttatttacatttttaccattaattattaatgaaatactttaatacatatattttatttacaatattgtcattagtaatttttttaaatatttaatttattatttgtcattaatgatactttactttttagaccaatagacctcttaaaatgttattgtgcattggagtaacatagcaaatattgtgctaaatataaagtttgtttattttttgtgccaaatttagcacaatatttacatcttgcattagagatggtcttatgagagtattttgaggttaaggtgaacatgtggtaattttttagagggtgacaaaatgttaaatattttttaattttagtattaatttatacattaataatcaaattaacatgtctttaatttatttatatgtacatgattctcacatgatattttaaatttgagtggaaaaagacagacattgagtgttgatgaggtcatgcatacatgaaattttgttaatatagatgtggctagctaatattgattattcaattcaaacaacacccatttttctttttctttttaaaatttttcggctaaagaagagaagagatgtgtaattagtcaaagtattaaaagcgtgttaggttgttaataataatattaataataataatgattgattgttcaactctcatcccaataacttgaaaacattttacacctactaccttccctttcctttcctttccctaaagtctaaagtctaaacccatattatttattttaataacaaaaaaatgtaattatatatgataattgtgataattaattatttaattaatgttcatgttcatccaccgcaaaaaacaagcccccaccccccataattaaatatatataatatataagaaaggtggccatttcatttcatttaatatatgataaagaaaattcattgtcattctcaaaaattgcattttaattgaaaagaagacaatatgtacaaacattagatttaaatagaacaacaaaaacaagtgatgatgatgatggtggtggtggtgatttaatattaaaaatttgattgattatacacaaattaaacttagtaataaaagattgtaaaatattaataattaattaaggatgagaatgaggatgatgatcaagagaaatagaagtacgtttaatgaagtctaagcaatctgcaatggcttcggcatagaatgagttagagcgttgaatgatatgtctgttcttgtagttgttgtagtaactgttgctgttgtaactgttgttgttgttgttgttgtaactgttgttgtaacttttgttgttgttgttgttgttgttgttgtggagtttgatcttcatcatcatcacctcctcctcctcctcataattatgactcttcttagtctttttgttgttgttaattaggaaaagagaaagagagtactttctcaatagcctgaagaaggttgtgaatctggcacgtaatcttgacactgttaatctcttcatgtgtagcctcaaccctcttcttctactactactactactactgcaactgcaactgttattccccactaccttgctatagtacctcatgatcttctccaataatgaataatgaataatgaataatgaaggaatgatacaacaataaagagagagagagaggagtgaagacctatatattttgggatgatgctatgctatgctatgctattatttaataaagaagtataagagagaaagagaggttttggtggtggtatggtggggcctccactctctcaaaaaacaccaaaaaataaaaaaagaagaggctgttttcaaattaggtgactttcctaaggaagcagcctattttgttagaccaatttcatattactattataataagatatttgctgtgtggtgtgagacaacacaacacatagtacacattaaaatcatatggattttgtgtgattgcatgtctttctttccctttaattgccaatatgttaattctcttgtaaccaacacaacacaacacagcacaggagagaacagatcagatagatagatagatattctgttggtccaacaaagattgactttcttctttttggtaagagtggctaacctttcttccaccttccaaacaacatcacagggaaggaaggacacacctcacctcacacactcactctctcaacttcttgccctgttttttggatactaaacatacatatattataatttataagaacaaaaatataagtatgggattaaccacaacctcaaccaccaccacctacactacacaacgcagcacaacttcactagaaagaaagaattctatttagataaaaactaaacaagggaataagggatctcccatcccaatataacttatcaaaaatcaagtcctattgaccaatatctattccatttcgtaaaaacaattaactaaatataactttaaaaacgccacatgaggtgtggctagtcttatgagatgagatgaccaagataaacgtgtcattagtcaaagccctccaagtggcatccctttttaatttaattaaactaaacttttgggagttgacctccctgcctgccattcattcccctttgctaaaaaattgtccaaatcaaatggttccaaaagaaagaaatacaaagtattcattcttccacggaataaaatgtacaaattattcaaaacataaataacgtttaaatgtgaacaaattacacaaatgaagttgaactacaaagcacagttaggcctaaactaaactataactgggtcgaggtctgaggtctgaggttaccaacgcaacatcatgctaaaactcctcctgtttctactttagactttactattattgaggttggagagaccggaacaaaaaaataaagaaaggtggtttgtaaggaacaatcaatccttatacgttgctactccgacaactcaaatggaacacgaataaatagttgcccgtgcagagtcaccactgccgatgtttgatgtgggtcgattcttgatggcaggctcacgacctgataacacaaaaacaaacccatgtttctcttatgaaaaatcatacttatttgaaataaaatacatcagaagcaaaagaggagacaaatattataccttcttgaaaggtgtcacaccccacggattgtcagcatgttcgggttcaccacttataaccagccgtcccgcaggatcagattggactcgcacctgaggttgagtatcgtacaaataagataagaaaatggatggttgaccaaatatgtgacgtgcacaagcaagaagaggttatcatttctccacaaagtcaaactttgaagaagcaaaatacaattacaagcctattaattttttataaatcatgtggagacacacacactaacaggcatctacatttctaatcctctcaaaagagtccagccatttaaagcacagaaaatctcaatataatcacccaatgcaaaagtcaaggcaaaaggaaggggaagtttgctaaaggcaacttgccgacatagcggttgacagaatacaacaacaaatttattaaagatttcaatgtcaaagaatatctataaggagaagaacgagaaatttattaaaatgtaaaacttacctcctcgcgtagaagtcctggaactaatgcatatacctcaaagcaatctttctgttatacatcacaaatcccattctaattagctcttagttttcggaaacataataatttcatccaaacaacaggtatttggaacttacagttctttgcacattgatcttcacccattcagctggaggtccagcatcaaccactgcaatgtccaacctaaccatacagaatcataaaaacaataaattcaatgcaacctttgccataaccccgcccacacaacaaattcttgatgtactcagtaaaatgtaacatgaatcttaactgagactttgatgctttagtgcgtgctgcttttaccacgtgatctgtgtaaggaggcttcttacgtttaagtaaacctggtgccaatgtacaaaagattttaattattgaaaattcatcagtagtcataatgcaaacactgttttaggcagtcagttctgttgagcggtcatatacctatatttttcagttgtttttcacgcttctgcatggatatagaacttttgtcctgaataaagttgcaaatgtgtaattatgttattgaaaagttgttaagggaaaaataaagtaaaaaacaatcagcacaagaacccatatatccaccaccgtactttaataatggggtcactgacttcaccattaccaagaagacgctgtgagtgccaaccctgcatagcacgtgcagcagcatcccttcgtgctctacctgaacctgaagcctaatagcaagggagtaagacacacacacacatatagcgagagagagagagagagttcaaagaaactaaagtattagaagttagcaacagatttagacccgtaaatctctagtgggtaaacttcactaggaatcttagtactagataatcaaaagtcaaaatcagaacttacctgagtatcaacaatgacaggctctgcatgggaagaaacaggtatattaagctcacctccacttgttttatgcctttcataatccaagagtgcctgaaaaatcacaaaatagcaacatttcgaactaataaatgtaaacccaaataggtactaaactatttttcagaagatcaaagactagagagggttcaaaacatagagttataataaatagaacacataggatttttttaccaaactatgactattgtagagttttaatccccttgtaaaataaattatctaaactatagtttgaattacaaatatgcaccaccccgtcagttgcatttcattcattttctctaaccattttctaatgtggccactggccatatgtatacttacaatacaagcgtctatttaactaattttaacaaactgaaatcaagtacaatagtgttaagcatgcacacattagctctaagaaaaaatacagattctcagagtttgtcattagactaatatgtatgcatagatttttcaccgcgactcttgagctgcaccagattagtactaggtcagtgcacatttgcaattatttctattgttcaggggatttttttcacaaaaaaataaaaataaaaagttcagagggcaaaactatacaagattcatagttcaggataaaaataaataaaagtcagaaacaagggtccaatgttccaatacatatatgtcaagcaccaaaaaatggtagtatgacatttttcaggaattcaggcttcagatttatgccatatgttccttaatacaatagcaattataagtcaattgttcaaattagaaacaactcaaatttgtttctcttcatcagttcatgtccgtatgtaataaagaaagaaccccggataaagaaccagtgataaagtagaatgtttgccattgattttcttttcttacccatctgttaaattagcctagctggagtatgaacccaaacttcttaaacacaacagacacacccaaccacatgtaataaaaaatatattccagttaaagtatagtaatattatatttatttttccttctacacttttcaataagatcacgaactgtggacttgagacatttttcaagacaatgagaaagatgttaaatttgtagttaacacaatgtctccacacactgttaggatgtagtagactaaatgcaagcacttccaaaattccaataagttcaaccattctgaactcaccttctcataaaaaccacgaaatgtccaagaaactgttgtgcatgtcctgcagaaggattgaaagagagattatctaattaaaaagagccagtaataagaatttaattatacattaagaataagaatatgcattttttcttactttgggggtttgaaggactcccccacttgccgccacagcttacatgtagtcacctatcaaaaagtaagcacagagtttgaattatatctattgatgaaccccaattaaactattaattcaaatgtaattcccctatgatccataagtgtccagttccaaaactctccaccacatatttacattacaatacatgtaattttgaaattttaagaagtaaactaatcagcagagagagaatagtgacataccttgtcatagccacctaatttagtcacagctctccaaagcctatcccaaatataaaacaaatacacaattagaaaataaaaaattaaaaaaatagaattaagagatgcaataaacgagcacagactcacttgaggcaatttagaccttctccatagaacttgggaggtttgaattccatggccctctctctaaagaaattttcgagctccttcataaagtttgactggtcctcttctgtccctgattcatttccttcatacatgtgttggtctaaaagaaaagcgtgttttgaggtgggctcagctataagaacaccatttccatttccatttccaggttcaggtttcatatcagaagaggatttagaaacaggctcatctccaggttggtgaagaggtacttcagaagcttcagttttgggtggaagtggaagtggaagaggggtgtgagtaggagaaacagcagttttttgttcatcccgaggttggttttgatcttgggctggagttggagtttgagtttcagtttccaaaaccagactagattcttcttgtccatgcccaacaccgtcatcttcgttcttctccttggaattagtcatatttttttttactattgagacaataaattaaacaaggttgagactttaaaatttcatctaagaagaaacaaagcagtgattttgaaattgtatatttttgaatcagattaggttcatgtgcaggtgggaatttcgtaaaacaaaaaaagattggaacttgaaagagggaataacgtaggtacctacctggttgaggttgattgtcgggagagaattaaagcaggtccaccagaagcaagcaaacacagccggtgaatggtaaaaaaaccctattttttgttgttgtaaattaaaaaggaagaagaagaagaatgtgtgattgtattgaaactgcgtttgaattttgtggatagtctactctcatagatacattcacatcatcatcatcatcatcatcatcgtcataataataataatcacaaattcatatttttggatttacattatcaaacggattgtaatttcaataccagatcacgacgtcggcaactctcggtcccgcaactctctctctctctctctctctctctctctctctctcgtcaaagtactaaacaagttatttctattctaacccttcaacttataaaagttttgcaattcagtccttcaactacaaaatgttacaagaaagtcccttattactaatttctactctccactagataagagattgtggtaaccaatatcattataatgtgaggagacaaaaaggttggatttgatcgaatgcccacgtaaacgtaatggtgtaatttactactagatgtcattataatgaaattgatgaaattattgaattctaatattttagtacattttattgtattgtgctatattatattatattaacattaactaatacaatataatatttggtattaatttgtattaacaacttgtctaggattacattaactttaccataaactcgaccccaactcgtttggagtctggggtcgggtcgagattcaatatctagggctgggttgagatccaagatctagggccgggtcaaggtcagggtttggggccaagttcgggttcgggtcctggtatgattcaaggtttgggtctgaggttgggatctaggtccgagtccgagggccggttcaggtctaggtttgggttcaggtccaaagtcagggtcctgagttgggtctatggtccaagtcagggtccatgtccagcgttggggccaggtttgggtctagactcgcatccgagtccaaggttcaggattgaggtcggagtccccatccccgaaccctttgtaaatttataatataagttaatactgataatttattatgtattaaataatacaattcacattatattaaaatttatgatcacaataattaatacagtataatgttttatgcaaacataatattacttgccatttaatataatataatttaccaaaccagctcatagttggcaatacaacacaaaaagggcaaattttagagtagttggaagttgaaaggccaactcatcttatatgatctattattgctcttgatagatttataggcttggtcccttctgttaacagtgtcaagtgttattaacaacaccttacctaaatagttataaaaaatgctttccatcaatctattgtagatttattattaataatatgatggtgtggaaatgttatttgcttggtttggtgatgatgctgagagtaagagtagtgagtgaggagaccaatatgtactatctacaatggttaataacgcattgatctcatcatcaactttcctctctttactttaataacaataattaatttacttgtccaactaccaaaccaactactaactaccaactaccaaatactaagtacctatctgagctttcttttctttcccacattccaaccttactgttccaaggacaaaaacatcttttaataagaccaattgagaagatatatacttcataaatgaaaaaccactgtctaacttttatacaaattcttcttgaacaacatgaacagatgaaactaataaatatgtaaacagggcattttgcacaatcatattggaataaaaccatcagtaggcaaatgacttgtgagctttttattcctttctttgtattttcatatgtgtttgttaactaactttaacgaccataacacatacacaaacttgctccgtgaaactgatgacttttagaacaaatgaaaattttagcagagaagagcagcaacaataaattaagatttgatgatcaaaggactttcaactcaaggtccggatgcccaactcgacttttgtgcttttcgaagagctgttcaagttgttttacaaactgagcatgcacttcagagacctgaaaattaacaaggccagatgaaaaaaaaaaggtttttgtattggacaactttaaacataaagtaaaacaccagctttctttagctttagcgttcagaatattcggtgaaaaatagactgctcacaatgcaaactaacattctttttgccaaagaccctgcttttatgcggggtctctatactataatagcattccatacctcttccatggtaggctgtggagttttcttcagttcaattggtttgcccacaaccacatgcattggatttctgtaaggtaaaggagatctgcaaaacaataaccagaatatggttggtactcataaactaaacttgccttttgataagttatctgaatcaagcacattcaaactcattctttgaatactaaaagtaagcttagattatgcatttccttactgagtatagtatcatcctcctactaaatctattatgaatatatttctgaggaacattgtgaagaaactacagacttttatattcagataaatactccaagaaccaaagagtccggtgtataattcaatacaagttatgctattcttcaagaaaacaagaatagtcattggagaatcagaatgtcatacatgaaggtattggtatcagcatgcaatagaataggtcaacttcccaaaagtgatacttctatttatttagaatacatagacagatttagctgccaaattagttcactaaatacaagtgagactgtaaacataaagaaaggtgtcaaagtaaggagaaagaccacaaagtaaaataacacacatgaattttgatgtaacatacccgaaaattccccagaagaaaataggggtgaacttgattgctctagaaaacttgagaaataacttcccaccaggcttccaccacttgtaaacatttgactgaacaacaatttttgaagattcataaggaaaggaaagcttcaccaaatatatataattggaagtgaaaaaaatcatccctttccagtccaagattagatatatatgcttgcttagaagttgaagacaatttagtacctggccaaaacagaatacaggaaccaggggtagccccatctccattgctatgcgaacgaatcctcttctagacttcaagaatgcgatctgcactacacattaagagagttgagacttacttactacattggccatggagccagaaccaccaaacaaagagataagaaagagttggctttagattacctcagaaccatggtccatatgaaatgtctcttgcactccacctgggactaagatgcaactataaccagcagctaagtgagagacaaagttgttccttgttgctggagtaagacccaaccatgtccatatatgtctcaagaatggtgtgtagaacaccttaaagcatgaacatgaacatgaattgttgaattcagatttagcaaaactaataagtaagagagaaagaaagcgttggttggtagtcttacagcactgcttgcaaggactttaatttttggaagaggcataaagccagtaaggtcagcaagtgcaaccacaccaatgggcaaaactgaatggggttcataaccaaacactgaaacaaacaaaccaacaaaccaaactttatttactttacagaaaagaaatgaaaagaaaagaaaagtaattggagagttagtttaattaccataagcacggttgggatggaaggcatgaatatcctctacatgaagagttaggggaaaataagcacaagcgtacttacaaatgaatctgtcaattttcaaagtttgattatttatggaatgaagaataagaaaagggaaaagaaagagttttgagtattgagttgccttgagagttttcggccatatttgcttttatcatcgatgggaatgatgacgaggagaagtaggaaaacaaagaccctgaaagcaaaaaagacaaacacttttagcttaatccaacgcccaatgcccaatgcccaatgcatgtacataaaagaagagaaagagaaagagaaagagttgagattacataagagaatattgtagaggaaggaagaggaaggagaagaggatgagagccacgttgaaatgaatggcacccagccacagactcatcgctaccactgatttcactccattttcagacgacgaccccttaaagattttaacttgttcattcagattctgattctgattctgattatccagcaccatctttcttcctcgtgttgattgagtgatgttatactatatctacgactacgactatgtctatgtctatatatgattgatttaatcgaatc

SEQ ID NO: 14390 - DNA, 14660 bp, Cannabis sativa
  modified_base (14552)..(14556): a, c, t, g, unknown or other
atatagttagtagtcttagtagacagaaagtcgtattcatatctttcaaactccatgttatacgatacaaaatgtacaacaaaggagaaattaatactttcttcagaagtgaattagtgttaccgtattacctaattaactttcattcattatttcactagatttggaaaaactatttaatgtgaacttgatttgatgtttcaaatgaaatggctgttacggttatgttgtccatatctactaaaattatcaactaaactctgtaacactgttacatgtttttctactaaaattctctaaaaagacaaatccatgatcagtttcgctgcatagtagttaagacttattttgttttctagtcaataaaattaaaacgtgaaagataaaattaagacccaaacaagataacttaaattatttgtaagcgtaattatcccattttattatgtgctctttttaatagttttcaaatatatatattctaatcgtatctaaaattcagcctacgttttgggttattgtgtttggtggacctagcttggatgagatttaatgaatataaaatgttagtgatcacatgaagaattacctctcagaaatgcaaaaagtcattgtattttctagaaatccaacattcagattaaaagttaaaactatttataatagataaacaccgatgatagaaaattaaagacaaattgaggcacgacataattttattttattttaagtgacactttgtatttatattttgaatgtgatcactggtaatgtagtattaaaaattatttataattaatgatataaattgcatatataatttttgtgtttattttatgagctctctctttgtctttatatagatccgccattccgcctatgttaagcccttttgcaaagacacatctggccatctttgaggataactccgtcctaaatctgtgaggattatgcactattagtttaagagaaaataaaatttatctcaaggatggctatatgattagctacatatatcatatgaatgtgacagcataccacaactttggttataaaatagtagacaatactagctagtgcgtgtgtgtaacatttatcaaaaacatgatataaatccgagcactgatttagaattctcaccaaaccaacaatgaaagttatcataacgactttctcaagacatgagaaaatgggaatagtactaatttttatgtgaaaatgtttggctcattgatcaaggaccggccttcttagatcttttgaccccacaaaatctattaaattattatcgaattattaatcacatccaaacctctcaatcgaatactaaatgaaaaagcatttgattagcaacatatgaagtaagttagagccgtttgtaaatttggaactcataattgatttttgagaacggtaaaactaataataagctaaaattaggaattaggaaaataacatgtatatacaataaaagtacatcaaaaactcataaaattaatcttaatagtagtaaattttcatgaatctacttgctatatattcgtgtaagtttcaacaacatataaaaatgacaaataccgttgtgttgaaacttggaacacaatatattattatttatatatataaatatataatatttctctgtttttttttccctttttcctatgagagcatgcagcatctccacaatacacatgccttgagttggaactgatagtgattcattatatggcaaaaattgaatcaagaggcacaaacagtccaccatggacacgccatgcatgcatgctttaggcttcagcaataaccatccttcaacatggaccaaccgtccatatcggcccaactatgccagcaggcttgcgtggcccatcaaaaattctgaatcacgtgtctagtgctgggattttgatgggttggcttacgtaaacttcaactttttgacaaaaaataatagaaactaaatggagtataaattgattttaaaaaaaatagagcataatttttttcaaaaaaaaaaaaggctttaccatttaattaagaataattaacatttttgtcctttaaattttcgaaattacctcatcttacttcttaaaatatacaacttgttaaacattctccttgaattgtagcagctacatgataaaatattattttttattttaaaccgatttatttctctaattaattgattccaattacagtttagtaaacgcgctattaataaataaaatgagaaactgctaaccaattacaatacgtcacatcggtatagtattgagcaccttaagttatctaatagcaatactcgtaaaaaatattccatcaagaagaatgtaatctaatatctagtctccaaacacgcccatatggctataagttttcaatttacaaacagagcattagcccacttgcttgctttagattgaataaaggaacaagttcgtccaaatagatcattattaagataaaaaaattgtaataggggctcgatgcatggaaacacaaattgagtactgttaaagctataagttttatctataccatgcataacttttctatttcacattattaaaactctattttaatatattttttatccattttaaatgttttaaggttttagccatatgttacagagaatatatggatgtttcaatagattaacaatggacctaaagaagagaatattttcttctttttattttgggatgaatcatttgagaagattgaatgaaacagaaatctaactttatacaagccacataaattccacattcacaagataaagtggaccccttatttatcaattctctttctccttggtggtttattagagataatcatatacaaacagagaacaagccaatctctatagggccatagcggtttactttacatggatgcaatgatcaccagcaaagcaatggacttcaacgagcaaaaactctcactttttagtttcccagctgacttttgcttctcaactctcctttttcccttagccatgttagaaggcaaagccatcgttggtacaagccatgcagcaagaagctcttcattttatctatttctgccatggcatcctcgccttcttactaatcaggttggcaatagttcaaacactgaagagaacttgatccctgagatggaggaggctgtgcagaaatatactctgtttgtatctcattatatacctattattactttcaggtttgtcattttaaaacaaacaatatccaagtagtgattctgattctgattgctcttctttttcaccatcatcatattgacattcagtagcatgagggagtgaattcccatctttatatgtggaaacatttctcatatatctgcaggaggtaaaaatatattacatcaaaaacagaaaaaaaatgaaaaataacagtagaatgcttaacattgtaccactattaggagtgaggagtgttataaagttgcacaaaccctccacgatcattgataagtgcatctaattgagggtacaaaatttcaaggccaagatagatcaagaccatgctaaagaaaacgtcaaattgtagtaatttgagatagaactggaatgcatgtgatatcatatggtaatgttcagtcatccactgatgctaaaaatctactagcacaatgagaaagaatgtgctgagttggaatcccattctaactaaggatccttttttttttttttttgccatagtgaacgaaaaccattcacttgcagaagcacagcaaacgcaagattaattccaattccatttatcatggaaatatcccgaggaacttgtgtgcatgggcgtgtgtgtgtgagagagagagattactattacgttttctgaaacttcagagagtaagaacaaaaggcggagcatcctttctaggcccagcaacagagcggtaaacataaactttattagcaaccatgtccccactcccttcatcgttgatcacttcaacattcagcctaggcatctctctggccaagagttgacagccactctttgtgaccttgcaagcggacatccaaagtgacctcatggactcatacttctctatacccgaaagaagagcttcattcccaaatggggaatctctaatctcaagtttcctcaactttgaacaaccactcagcacacaccgcattccccaatcactgctaccagcaaatgccactgaaagggtttccagatttttggcatacttcccaatatactcaaacgttaagtcagtcaataaacctgaaacggcaagtctctggagcttagtgcaagtcttcaccactgcaccaaaagcttcatccataggctcgtttgtcaagtaatctggctttccaggctccattatgcatagacgaaagtgagtgaacccaggacagttctttacaatggatgccactgcagcatttgtcatctgcctgcaaaagtagagtacataatggagtttggggcagccaaatgatactgccagaaatccagattcagtcaccccatggataacctccgggtcaaaggggttatcaggaaaaacacgaagttcttcaagcaagggacagtgagttccgatagcctcaagtcccttgtcttccaccgtgtcaagaacctgtaacaagagtttgtcatcaaaaactagcaatagagagcctcatctttctccttccataacataatagtaattaacaatttaagataaacgaagtgaaaaagattgaaaaaagagatgttacccaaaggcgacgaagatttgggcagtgagacagaagacttgcaaactcggtgcttcgaacaacagcataactaaaatttagaaaagttacgttcgtacaagcaggatacagagccgggagaaataaggctttagtttcccataggccagagagtgtatgtagattcttgcaattgttaaaggcactttcaagctctgaatgctgattggcagtgaggtcttgaatgaacataccagtaccaagctccattaatcttggagcatggctaataagcttttgtaattgttccaagttaatatttttattaaccttcaaagtcttgagcgatttgcacctaatgacaagtctctcaagagcatcaaaacagacatcagaatttaggttggcgaagtttagtgtttccaatgatgtgaaggactcagggaagcaactcaaccaactgccacttctgtcgtccacatcattgtcctgtatgtccagctcaaccaagtttctgcaacaaactcatgatcatagagtttgaataagttaaaaaaaaatgatgaaattttaataacgcccactatatagtacaatgacagattttatatatgttgctgtttgtaaatcataatgaccaaaacaaactattaatcattaaacatattcttgttccatctatttgcacgataaagattaaaaatcatgtaaaaaaagaaaagggaagggaacagaataagatcgtgcgtatgcagatacaagaatcatatcgtcataatcttccactggccactgcttaattgcagaatcctttcctgtagaacacaacattgtactattctctctccctctctctctctctctctttatcaattaaacgagaacccatttcccaaaaccatagaactaaaagtaaaaccactcactgttctcggtacgcagatcagatcttacacgttttttatatataccaatcaaagagaatgactgtaagaaggaaaaagaaaattacttgcaatgagtggcaatggcggcaaggccatcagtactgaagccatcacagctcaaaagtgaaagagctttgaaattagggaatgaatgagccaggaactccaagctctcgtccctaacactcattctcttaagcctcagctcctcaagattcgggtacttgacggcgaaaaccgacaaccatgattgaacatctgctccccaattgcgaggaaccaaattgaagtccgagaatcgaggcttccctttcagggttacgctccgaatgtttggaaatcgtcgcgccaagatttctggcgacactgagtagcagtttccgatgaagacgcaggtccgagaccatctctcggcattgtaccagtccttgcagaccagagaaagtgagctcctgtccttgcgggactttatcagacccaaaactccctccaaaacctcaccagggaagtgttttgactccgccgattccttctttctctttgaatccattgagctaatttccattaacaactaactttctaaaagggatgaattaattaatagtgtgatataaaaggtgagatctttcttcaatgcaaacattctgaattttattccctggaataaagtaaaagattttactttattataaagcttaggacaacggctattgggtataaaatggatacaattgttatcttcattttttttttttttcttttaaaggattatttatttatattttttcaaaaagaagatcaacttgggtcagaattgaaagtaggaaaattaaagaaggttccaacttatgaaaaagagactttagaaaatatataaatatattaaacgtggagattcagaaaataatgaaatcagttagataaataaaattactggcgacgccatggatggacttaggaaagcttagatattcctgtgaaaagtaagaatgataaatttgaaagcagtgagatacgaagaaaagagaaggcaaggggaaaataaagaatagcagagaaaattgataatttgttgaaataattataatagttcataattataatcttgtgattaaaactttaatgatagtaagtaatcaaatttcccgacctagacccatgacagaacctgcacccatgtgcgttttgcgcaccgtcttttggcgtattttagtacaattggtttttcactttcatttggtgaaagttttttttatgtgaaaaaggggatcacgtggagatgtagattatttcctaactttttcagtcattttgatatgagcatcattattaagcatcattagtgtctagcacctttaaaatgtgttgtcagctagcgatactccttaaaaactattatattaaactatatagaacctgatactaaattagacaaattgttatattgacacgtaagagggtgtttggcaccactagtgtcttttaacatttctcttttgataattaagaccatgtgtcagttataagagttttatatttcaacgaattttatttggtgaaagttttagctataaataggtaattgccatctcagctcatattttttaaaatttgtaattatatagttagtatcgtgtccactcataataaagagatacaaatcatattatatcgtgtcaatatttaaaaggatgactccaacacgacctataaacttacatattagaatcatgtttggactcgtaccgtattttactcaagtcgtttcgtttttcatttagtcggcccatattatgtctatttttcttttattaagatgtatgacattatagttatttccaatcaatttatttatactataggtgttcaaaactgaacaaaatgtacattttgaccattttttaaaaaattaataataatattttacgattctgatagttctttaagggtaaataaataacataggagtggcattagataagtaaataggagcagtccatatccataacacaagaaactaaattgggtggtagggtgtgagttagttgtgtgagtagtgacatgacaagattatattgaagagagtgagagggcaataaattgttgtcaaattaatcttttttggagaggagaataaaggaccacacaaaaataacaattattaattctacaaaactcattaaaattgatgcacttttaggggctgcgacaagaattggttggttttgaaaggaaaaaaagtaatgaaaagagggttttcggataagagaaaccatttaatgtgactctctcccactctttctccatcctcatcttgttgctaattattttctagcatgattgtagttcttgtcgtagattgcctaactaaaataaataatatacgacatattaatttagacataaagataagacaaatatgcaatgattggtacctcataatcaaactttaataaaatttaaaattgactcagatttaagttatgaatgtgtgtcagaataaattttactaataaaagcttataaaattaaacttcaatctaagttttacattttcacccgcaattcactaaacacgtcaaagtttgtgtttagagtcaatagattaatcttgttgagtatgcagtgaatgtgtatataaaaatgattatcactccattaacaacatgaaacatgagatactttgaaaaggaattattttcagatacacaaatataatgaaaaaattataaaaaatatgattgtatagaattaattttaaattttttttatagtttttataattttatttacaaaaaatataatttttttatgttatagtcttgttaaattgttattaattttttgttgttattttaatattgtttggatattatttttctattatttttatgtaatttttttattatttttataaaaaaattgtaaaaatattaaaaaaaaaaattaaacctaaaaagtataattttttttaaaaaaaatagtattttatgtaattattttttttcaaaaaaagtgtctatgggacccaacaaatcccttggttatttgaaatagatgaagtgcttaccttgcctcaaatggttgtgaacttttttggattgattaataatcttttccgtttccgtgaagcaaatatatagaattgattaataatcttttctgttttgtattgattaataatcttttctgtggacgaaactatgtgcacccatgaccccctaaaaaataatcctatataatgtatatacataatgttttgtaatttaattgtttgccccctcttattttgatttatttatgattggcccctcttagtttcatgttctagttcttccgctggactccactaaaaaagatagcttttccgtgaaattgattaattccatttacttaaaaatcatgacttctgaaatttaatagcaaaaatggactataattggtattttaaaaagcttgttaagcttagaaacaccgttgatattcaggcccttcatgacgctagtagaaaaggtaaattcaaggttatctttctttcatctctgctactaaagtttgctattctaaagctgtttggaacaagtgttcctaaacgtgattttatctcttgataagctatcaacaactgtcttctaaagcgtgatcatctcaataagattatggtgctcccctcttttttgagtgtgtttttaccaagaaagtgattaagcaagttcaatgttggtttggctcttttttggcccgtgcatttccaagtctggaaagctagtgttaaaatatctttgaaagctagagtgaaggggaaactctctaaacttagtaaaagggtgaagatgtaatttcattgatcaactctttcttatccttcttactcttagtgcagcttgtttgtacaatttggtgattgttcgacggacatgagataatattatgtatttgcatgaaaaaaaaaactaataaaacaattacatttaaataaattagctgatactaaagtcttaaatagaaatgttggggatcctattagacagctcaaatattattgaaacaaaaagaatacagcacaacaaaaagtataaaattctaaagccaaaacttctacataaaacggaaattttgaacttactacaaaatttataaataaaagaatgggagtttgtcgtcttttgattcttgataagtaaattttacaaaggtcaaaatcaaaatatagagattgaaacattattgcaacagcagctcactactgtttttgaatatagtaatgagaatctaatttaagaaaaccaaaacttttttcttattattattgtcaaaaattgcaaacatgctttttcccaaagcaatcttggaaaggtttattcatgtcaacaagctcatatgcggctagagtctcttccataaatgaaacgccttgtccagtccgaaaccacgagtgctctgttacgccagctgacttgtttgctgaaccattgaaacacaaaaggatgcataaaaactatgcattttcttccaaaatttaaaataataataattactaacccaaaagcgaaacttaccttgcatacacagaataccagagccactgagagctcttcccaatagaaacccaatctccaggaagttgggctgctgtttgctctccccccagtggagcaaattgcccaagatgtttgtaccttttagaaaggatcagacacaataaaaatgaatgactatactgaatatggtgtgaagtggggaaaaaggatattcactacaatttgtttagttcagagaattgttctttcatcttcagtacatcactgtcagcatgataatttcaccactagtataaatgaccatacacagcaaaaaattaaatgggttcagttggtacctgaaggggcggaatctgtgacgacctgatcccctgaacctgagaggaccttctggatttttttcacactcttccaaacggttgagacatttagctaggtaaacaccttgctgagctgcaacctgaaatggcggatgataaacggtaagttcacacttattcaataatcaatgctggaatctacaagtaaagggaggaaatgataactatattagtacctgagctgtagctggaagaaatttcatctgggaatccacttgagaaagagctgctttaaattcttcaatattcagttctatggattcttttgaaacatccccctttgattccttcaaaaggtcaacaatatcacgcatctgcttgctcttcagataaagatccacctgaggatatctttcacagatgtcagcaaggacttcttgaaattctttcgcagtaagtgttcctgagttgtccttgtccgccttggaaaatatggctgaaatatcttcctgtgatgcatttagaatgaacacaattaactctccctcaacacatgccgaatcaacagatggaacagttttaacattatctaatcatcacatctatatttcttttatggacaaacttatttcttccggtaaaaggataagtacagtcatactcaatttcttgaggaaaattggcaaaggatactactttttcccatcatagaagaaaacaacagagttcagtaattggaaaaggagaagacaattgtgtatggaagactatacttatatgacattgacagggaacacttcaaggaaaaaattcatcaaccagcaagattgatctataagacaaaaataagggcacgtaccatgacttttcgttgattgatggtagcacaatcaccaagggcatatacattgtcacatccctcaactcgtagccattcatcagttgccagggctcgcctattagcctgtatgcaattcaacaatacttgtttagcagaaaaaattcaaacaaaacagcaaaaaatttagcatatttgtagaacgacactcacctgaccaacttgcatcataaaatcttttatcacagggcgcgttccaataccagttgaccatagaaccattccataaggtatggtagaaatttcccctgttttcatttctttggtagatatctctttatcagatactttgataaccattgatcctgttttcacatcaatgccttctctttgaaacttttgttcagcaaaagctgtaattcttttatcaaacctacaagtacatgagatcaatagtcagatccaagaattcatatcacatgcttcactttaaaagtattttaatttcaacttctacaatataaatcaatttatgcttccgtcaccccactgactaaatcgaaacattagaataagtttgtttgtgctgcttaaatagaatcatctaggtaggaaacgatataaaagccttgaaaggcattctacaatatagctacttagaaattgatcatctcagtgacagtagttcctcagcaaatttaaaatttaaaattttacttacattccaagaatatgacctcctgcctctagtagagttatttttacaagatctttcaccccgggatatagtttgaccaaatcctcattaacataatcatgaagctctgcagcaaactccacaccggttgggccgccgccaacaatagcaaaatgaagaatcctcttcttctcttcattgctcacagttggtagacaggccctttcaaaacagtcaataacagttcttctgatcttttgagcatcctcaacttcctgcatgagaattttcataatatgcatatagtaatgactgtcccttagtacgcaaaacatatcatattaaagtgtttgctctgccaaatgtccaaaaagacagaaaccaaacatttttcgtttggcaaaatcacaaagaataccttcaagaagtgacagtgctccatcacgccaggggtgttaaaagtattcacattggctccaatacctattacaagcacgtcatagtccaaaacgaattcttcttgtccattcaaattgttgttttgattagatcggcaatagattttcttgttttttgcatcaattttgatacattcagcttcacagaattgaacatctacatttttctgattcaggaaaaaatccaacttttgctcagtaactcagctaactactatctcacaacaatacaaaattataacattctgagcggcagaaaaagatatcaatgataataaatcaaattttgcattcctaaaattaggacaaaagctactccttttcaagacagcaattatgtaattctaaacagttgaaacacataggtaagtccactaccttcctgacaatgttgcgaacaggttccacaatgctgcgagcttccactgtaccacatgtcacacttggaagcaaaggggtgaaagcaaaataattgcgaggcgatacaacctgaacctcataggagggattactcagattcctcaggaaacttgttccagcccagccagtgccaagtacaacgactttctttttcttactatccacctcagatacatttgtgatttgggggctattaacttggtttgcctcggcatatgccacaagccctccaccactgcaaacaaatatcaaaaaacacaagccaagtaaagaattaatataagaaacaacaaattataatcattccattgtttcaaatctcacaaataaataataatctctttacgcatgcataatataaacaaagatagaaaataaaaaatccacatatggtttaaattacaggactcaaaagcaaatgtaatagtaaccaacgaatttgaatcgaatatatgctcatagagaaaagtcccatttttctggagggtggtaaataataactactaataccatagtgcagttactgtataatcaacaaaacctacgtacgtttaatttcattagatttcaacagctctcataaataataagaaaatctaataccaacaacaaatatacatatataaatatataattcttataaccaaatcaaaataacaaataaaaataacttttaaaattcccaaaatcaaatctatactaacaccttcagcatcaaggagaaaaaataaacttaaaccgaacagagtatcctgaagaaaaatacaaatattaaacagaacaagtaagacaaatcgtagaatacctgacagtgacgaccacaagcagtttcgagagcgatggattgtcattgaaagctttagaaactctctgaaaaacggtggaacctctcatttcttttcctctctttgatccacaaaaaccgagagagagagaggggggaagaaactggtttttagagagagaaagtaatagttatgtatttatatatgtgtagtggaatctgtgaaggagaggtagaggaggaacgtgatgcacttcgtgacaatggttggttccagactcgtagctttgcccctcccctggtcgtattttgccctttttcttttcttgttatgcctttcttgacttggcgagcaagaaaaatgagacacgtgtcgtagggttaggactagaagcatttcccatattagttttttgacatgtaggatagtgggtgggccctataatgtgctggaagccgcgtgatcattttcatcagtctcctcatcatgtgatcgaacggtctgttctagtaggtctaaatctgattaaagaatccaattttttcggagaattgaaaaacgtgatattttggaatatagttgcgtaattaatattacacaactgaaaaaaaaaattatgattatattattccttattaggtcagtcggtgtgtctcccgatttggaaaaaaaaaagaaggaaattacccaatattattttcttaatttacgatttggattttaaagtagttgtagtgctaattgcaataaggatttttgtatgaaattttatgtagaattttgtaaaaatgtaaaaaaaaaaattatttttaagtgtaaaaataannnnnaaattaaaaaaaaaattgaaattgacaatttaatatgcttttgttctctaatttgacctttacaagattgcatgttattatgttatatataaaaaaaaaaaaaa

SEQ ID NO: 14391 - DNA, 2970 bp, Cannabis sativa
tttttttttttttaaaaaagggtagcaagaaaaatcatttcatcatgaataccaagcaaatcaagttttctatataattgattctaaatggtcaattgttttacaagtcttagagcgataatttttagaaaatgaaaatcataaagaagatgacttatgtcatgatagttttattgttgaatacacaaacaagttgaggaaagaagatgatggtgaatatattagaaatgattttactgaaggaatatgggtagatggtgaatccaaaaaaaaaaaaagaaggaaacatgctcagtgagtaacttatgctgttgttgagtactaatttattaacttgtgtttttgttgaatgctaatgaattaacttgttgagtcttaatgtattaatctatgttattattgagtactagtgtattaacttatattgttgttgcagatgagtaatgcaaaagatgaaaacaggcaaaagaagcgaggcgcaacacaaaagaacaatataaacgatttgaaatctaagggagtcaagaaaaaccttgagtataatgataaaggacaacctataggtgataattatggagagatgcaatcttacatcggagttagaacgagaaaaacagtctctctaaatgctggtgattggaggcgtgtctcgatcaccttgaagaataaaatatgggaagatgtgtcggtaaggcacctcttcttaatacattgatgtagtttaatgcaatatttatattttactaatcatttcctttgtattttcagggtgctttcaatattgacgagggtatgaagaagaaagtattacgtgatgcaggaagaatgatgaaagattttaagtcgaaaatgactagcaactacatctatcccatggcagaagcgggtatgattgaacaactctctgttactccatgcaagtatccagagattgaccatgcagactggattgaatttgttaagcaccgtctatctcctgagtttcaggtactattatgtatgatttcttatgttaaaaacaatgaaaagtgttgaaaacttaccttatattatattatgtaggccttgaggaacgtacaatgtaaaagagctcttcaaaatcaatcatggcatcgaacatctcgtagagggatgcataatgttagagaagacttagtaagtaatttgtatcactagttttgcattcaataactagaacacaccaacatcaattaattatttgatggttttgtagaaaaaagaactaggtgttgatcatgttgagcgctgtgaagtttggataagatcacgagaaaagaagaagtccatggtcacagatttggacggacaaattaaagaaagaattgtaagtgtttcaaagtattgtaagaatgaactaattagcctttatgttgtcaatttcatcttggtttgtttcccagaatgagctgaaggagaaagttagtagtggcgaagttgtagttaagggccgggatgacatcctaacgctagctttagggacacctgagcacccaggtcgtgttagagctgctgggtatgatattaacgtaagcatataaactttattcttcattattttagtttctaattaatttggttcgttacattgtaggtcatctgccaccatttcttcctggtttggaagaaaaaaaaggcagccagtggccaaatatattagtgagatggatgcagaaattgagaggcttaaagcagaaattgatgcgctaaagagggaaaccaaacaagcagaccaacttcagaatgtggaagaagagtacaatgatgaagatcaggtatggattgattcttgaatttgttactcttattaggtacattaatattgaattaaaaatttacttcatagcagggtcctctactaaagaaacctcgtttggaaacaagtgcgtcgaagggaagagggaaacagaaatgtaactccatttccagtccacatcctcgtgctggaggtggtgaaagatgttcggcgatagcttctgatggagctgctatagatctcacacaccaagacacaccgccaagaacaactaagagcaaagctcgaaagcctcacaaaacgctcacacacacttaccactgaaaagtatgtatccaactcattgagctcttttatttgaaaaaaaatgtaatacaatttgataaacgactaactaattacatgccataaaaacataagcatcatgatagacattcatttgagccttccatttatggtgagggaatattgtagagtgcgtaaattgaatgtagtagtgaacattcatgtggaggttcaactatgttatttggaaagaggtgtccttggactttaattataccttgggacaggaatgaaactaatatatgatgttctgcttctttgtgatctatttaatatcattatgtttgggtattcctgataatagaagaaacttttacatgtttgggtattccctaatagtagaagaaactttgctaagttatttaaaaatactttacatacaagtacaaagttagtattcaagagctgaagcaacggttaattacaacctcagtgttggttttgacatcagatcaagaaaagtttgtggtctattatgaggcagccagataagatttgaggtgcattacaatcccagtggtggctttggctgaaacggttggatgcattgctgaagcatttacacgtattagaagctactctggaataattgtaaacactgacaaatcaaatatctacctagcaggggttaatgagattgagaagcatgggatcagttgtaatgtgcctttaaaagaaggtgcatggcctataaagtatttggatatgtgccttagaccaaccaaatataaacaagaagatttgaaaatgaaggtgttatatatttgttatttaacaaatatataataaagattaaaatgtggcatattatatattaatatgagattaatatatattatgtgttggaggtt

SEQ ID NO: 14392 - DNA, 12693 bp, Cannabis sativa
  modified_base (52)..(54): a, c, t, g, unknown or other
agtatcgctagccaattgcaagtcgacacatttagaaggtgctaggcaccannngtgcccaatagcaatgctctattatttattatttattattttacatataaaagggataagacaaaagaccaaccgccaaccagaacgacgcacgcactaatattctattctattctccctccaaaattttgtctcctccaactcccactcctcactctgccgtccgccttcctaattacttattattatttatttcaaaaaaacaaaatgagagagagaaaagctcacacaaacctctgaatctcattccttacctttcttcttcttctttgatcagccatgtccttctcctccatcatcgcaccactctcttccggcctcgctgtacttcctcgctccggaaaccatgttcctcacgacttggttttgttgagattggcctctcatcactctcaattcagacatgtttcttttccgatagctagggttagtgtccgagttccacgcgcctcctcggtggtggttgatgatcaagtggcggagagaaacggggaatggaaagagaaaggaggagttcttagagttggagttgtttgcggtggtccttctgctgagcgagggatttctcttaattcagctagatcagttattgatcacatacaggtaatcttcgttttgctctgttttttcttttttctttaattgtaatttaaaagttgaatattatgtcgtgttgaatataatctttagtacagttttactccagagaagaggaaaagttacttggaaagttgtttcttaagaatttgaaaatgatgccactgtctttatagtgttgtttggcttcgaagaaagtagaggagaaaacatatttagactaatatgaagtttcttggttggttttttctgtaacagggtgatgatctgcatgtcagttgctactacattgattgtgattataatgcgtatgcaatatcatctgctcaggtttgatttgattgaacattcagtacttctcttttatgttgtcttttttagcttactagctaagtccttggttcacacttagtatgtactacattctagagactttgagctttaatttgtggcgtttagctgtttgttgaaacttcttgtccttctagatgaaattgtactgttgcctaattcagtcagtgaacatttggctttccttttcttgatacttttcagttagtgctttaaaaatcagtttttgtttcggctaaatatatgctatgcttgttgaacttttacctatagtaggactagtgaaagtttaaaatctgttttgtgtccggtgctcgggctttgttggaattcgattaggttgacagattgtcatttgttgctctcaagttatctttttgtgtttataggacaataccttacctgtgaaaatttcttgttgtgatatttgagcgtttcttttatttttgttctgtattgatttcaggtatactcaaacactccatcagattttgactttaaacttgaaaggtatggatgggttttcttgactataaagtttaatcattttacaaccagaacttttaagattgctaatttgtttcatccacagccttgcccagggtttccagtctttgtctgattttgctgaacatctagctgcctctgtggacatagtgttccctgttatacacggtcaatttggtgaagatggtggcattcaggtgttgcttagcataattttttgatttgatttattttttattacaatatatatcttcaagtatacgcattttttcttttatatttgtctaaaatttctcttgtattcttttgaaacaactttaaattaataggatatgtttttattgctttgacttatttgttccaggagttgctggaaaaatataatattccttttgttggcacaggttcgagtgagtgtcgtcaggcatttgataaagtaagattgactttgatattataattaaacttagtttccttacaagttataacatgtgattttcttgtatttaagtggattttatcttagcgtgtttaagttccttatagctccattgagatagtatatttataaatacgaaccatgttttgatatttctgctatctactagaaggctacactaaaatttttgacaaatatatattatactatgtcctactaaggtacattttgagtcaattactagtatgcttaacttgggtgcatgctaccttcctcgtttgttcaaaatgattagcaccaagcagtactttacctgtaatttctgtgagctgattgtactctaccattaccctggaatgacactgaatatatcaacatttcataatatattcgatagctagtgtactgatataccttataaatatacttttgcaatgttaaatttgtcaatttgttggcacgagcctttggtctttctaacataaagagtctcagatacaatttgtgttacctacaagaactcccttgattgtactctactgatacttgtaccataatttgtaacatttcttgtatcaacctattgcagtacaatgcctcattggaactcagcagacaaggcttcgtcacagtacctagctatttagtgcaggtaccatctcaactgaatagtatttcaataattataacaattttgtgatatttatgctgtacttcttgagcttaatttattctctacttagttgatttgttacaattttgcatacaatgcagaacaatgaagcaaatgaatatgaactgtcagagtggtttgcaagaaatcagctggacgctaattcaggaaaagttgtggtaatgcacattttactgttgtgattgaaaggtagcaccaatgatataactgtttaacatgttcagatttggccatctctatggttttattccaggtaaaaccagcacgagcaggttcaagccttggtgttaaagttgcatatggtgtggatgattctcttaagaaggctgaggcaattatatcagaggtactctcatttcataacagttacttttctggtgttttctataaaaactttaaatattgttaatgaaattgcagaatgattgtatgcaatggatgtgatagcaaaattttaagagaaaatttatttatatcaaaatttgatcatttttggcaggggattgataataaagtcctaattgaagtatttcttgaaggagggagtgaatttacagcaattgttcttgatgttgggtctggtttagattgccaacctgttgtacttctgccaactgaggtatgtgtgctcaattttattactaaaactaaatcttcgatgcttacgaaaaaacagtatacaaacgataccataatctctctctttctcaatctcctctctcttattgaagaaaagtggaaacttggcaaaaacaattacgttttagcttcatatgatttatgtttctgtaatatgttctcaatttgaaggtggagcttcaatttcatggtgaagttgatgtgagagagaaggatgcaattttcaactataggaggaagtatctcccaacacagcaggtagagcaaaatatctttaattttttagtcacatataggcatgcatttctacactcttacctgcgtagactgcataataataacatcatggttgtagtctatctattaaaggctgcacatgttgtcagctatatatttttgcagtgaataaatctcattcttgtatatcaaacaggttgcttatcatacgccacctcgttttcctattgatgttattgaaactattagagagggagcatctcttttgttccaacaactaggtttacgtgattttgcacgaattgatgggtggtttttgcctaattctgttaacgtatcatcattttcagagagtaattttgggaggactaaattcggtacaatagtatttactgacataaacctggtaagatagttgttagttattatagctggtttcattttttctctcagaagatttcctttaaatactttcttctttatttttttatgtgcttcagattagtggaatggagcagaccagctttttatttcaacaagcttccaaggtacttaaaaatgtcatttttttctttgtatggaagactgaaaaggacttaggttgttaatccttgatatgaatctcaattggaaatattatgaagttcttatatcacatagctgtttgcttgaaaggctttctgtactttttatccttgtaactccatgtattttgtgcctatgaatttgcatttgaaaaactcttctgtattcaggttgggttttcccattcaaacattcttcggggcatcatttaccgtgcctgctcacggtttcttgaacttgcatcattcaaaagtgtatcatctcatcttttgcctaaaagaacaaaaccatccctgcttagcgagccgcttccaaaacgtgaaggtgctcgcaaagtatttgtcatttttggaggagacacatcagagcgacaagtatctcttatgagtggtacaaatgtttggctcaatttgcaagcttttgatgatgtaagtaatatatctcgctgactcagtaggaaatagaaaaacagggaaagtaaagaaagtatttatttgtatttcatgaagttgcgaagtttcattctggatgtgcagtactcaaatatattttttcagagattcttcttttagttgatgttttgggactgccaatccatgatattttctgcagtttaattttgtttttttttttgttgcaattcttcattattttaaaaacattaatattgaatctgggaagatgtacctgtgatgatttttgtcattccttgctgtagaagaacggtcataaagcaaatggtccagcattttaggaattcgccattccagatatttagacaaaacattcttttttttttggttgctgataatcaagttcttttaaatacattgcacatcagtttttggtaccttatagataattgaagttgtttattctatcaatttgatactaaatgtagaatattgtcaatctgtcatttggctgtagcttgaagtgattccgtgtttgctagctcctacttctggatattcagctattgtagattcaaacgagaaggatgctgaagtaagatccaggacagtttggtcacttccgtatgttcctctttctcttgaatagataaataaaaaaatcataaaaattactagtgatataatgttatctgtttgaatgatgtttattgtttgtgtttgtcccttttcaataattttttcgtttgaattctcgtactagactccaccaaaaaggacttgtattgagcaaagtaaaactgattaatttcttgaaatagatacgttagtgattttccattgttgttgcatgcatctttacatgacaatatatttcagcattgttgtttattgattgcttggtcattttctttgtagattcagtgattcaaatacttatcttttatcatatgaaaagaatgtcgacatgtaaaaatatgtaaagctgataatggggcatcatgaaataaacttctgagatacgatacgaaaggatgcaatagcttcatctctcattatgacttttgtttttgtgtacagttactctctcgttctaagacacacaacagaggaagttcttggtgcatgcatagaagcaattgaaccagcccgggctgcattgacatctcacctacgtaacaaagtgatgaaagatcttacggaaggtcttaaggctcatagctggtttaaagggtttgatattagtgatgaacctccagtgagattttctttggagcagtggatcaaacatgccaaggaagttcaggctacagtgttcattgcaggttttccctcctcccaaacatggaacaacaaataatgcaatgaatagatataaaagaaaaatacatacgcatgataaataggagcgtagctccagacacaagtaccaattgtagttgtgtagttttcataactttttttaggactacaaagacttcctcatttgattaaaatctcagtttaagttacaaagtcatgaagtttctacttttccttaaataaaatcaaattatgcagtgcatggaggcattggtgaagatggtaggcttcaatcattgctggaggatgagggggttccttatacaggtataatctttgcaaaacttggtcgttgcgttggtttgaatttttctgatctgatttcactatgttttttcttgtctttctttttccttcctaaatgaaggtcctggagtgatggcttcaaagacttgtatggataaagttgcaacatctctttctcttagccatgtacgataatttttcttttcttgtatatcaagatatataatgttgcacacagatgcatacttttaatctcgatatagcttgcatattttgctagaaattgaagcattgtaatcttttgtcataaccagcttgcaaagtctggagttcttaccataaataaagaggtacgaacaaaagaggaacttctgagaagctctaggctagaaatgtggcatgatttgaccacaaagcttcattgcaaaacactatgtgttaaaccagcaagagatggatgctcaacaggggttgcaaggttatggtaggtccttattcatattttaaaacagtttattgtttctagtgatggtaggaattcaggtaaactcagctgtgttcatctcataaaaaggtttgactataattaatttgtttggaccctcctcaactaatattttgttactgcagctgtgcagaagacctagcagtgtatatagatgtattgagggagagccttttaaggattcctccaaatagtttgtcaaaggtatagatatgtttatataacttgctgactttggcgtaatttgtagcttttgataccagagttaaaaatcattcaccatctcatagcataatgaattggtttcctcaataatctttgaaaggctatagtaagtgttatttggactatgtagcgcacctgctcattttttcaatatatgctgtttcttatatgataaatttacaggctcatgggacgattgagatgccaaatcctcctccagaactcttgatctttgaaccttttattgagactgatgagataatcatttcatccaaatctactgatgaatatccgcaccgactcaagtggaaaggacagagtagatgggtggaagtaactgttggtgttataggaaaatgtggatctatgcgttctctgagtcctagtatcactgttaaggaaagtggtgatattttatcactggaggagaaatttcaaggtaaattttactcgcaatcgattttcaattttaaggatattctcgttcaaggctaaatgttattagcaatgattaccagcttgctttgtctagatattctagttttaagcaaacatctcttgtacataagtatttctgtgatactaataaagaaaaaaaaaaagaaagtatttctgtgatgatataacatttggctaaactacaaaaagtgaatagttcttccaatcttccactttctaagcattatatacgaaaaatgttactacaatgatttttttcttattattattttttaccatttactatagctaggtcctaagttctgaagtccatttcatcagtttaaaagaaatagggaccattgttgtaataatcctttgtgtacttaacttttaaatgagaacttcaaattatgcttttttacaggtggaactggcatcaatctgactccacctccattatccattatcaggtttatgaaatccctattccctaggaaacatatatacatatgttttctttttatatatgtaatagtaatatatttctatgaataattgttaagtggattgatgattaatgtttttcccttccttttcttttcttgtggagggagggaagcaatagagatgattttttcaaatacattttagaaataagtcttttgatgctaatgagacctaaatttttttaatccacttctgataatgtagctcaaatggtcaggcatgtagttgatagacacttgatatggagaaagaccaaatgtcttactaagggtaacaatggtgctaaggttttgagtgccttggaaactcccagcagaatactttgtacaaatcagtcaaaaattatgaaccctaagaataagttctcaagacttatttatgcattttttctaagagtctaagaccctcccaaccaatttctatagtttcctgcttcccaaatattgtagggtcatgcgaggatcttagtttcaagaaaagataatctatcccctccccttctcatgcatgcatgcattaacattgtattgaagctgtgatttagagctcattcatctgtgttttttgacttatttgttttgaggttagttgtctatatgttctgttgaagtattggttattctcatctaaaaactactaccgcagtgggttttatttatttttccttaatcttttcttcccccaaatgtgctgtacatttctctcctcattttgtaatcttctgctccttttcctccatgaattagcgatgaggcattaacgagatgtaaacagcgtattgaactaattgcaaacacactgcaactagaaggattttcacgaattgatgcatttgtaaatgcagacagcggagaggtatactttcatcttacatttaaatatttcctatagacaagagttagcagattttttgtttttgttttcttaactcctttctttcttaaagtcttcactttgaggctaaggagttgttttgtctcctataataaaactaatatatgcacaaattgtagtctgtgcattaacatccaccttaataaatctcttctttttttttttctttttgttttttatttctcacaacaaattgttggttcatttggtagtgtatgagataccaaattcacacaaggtcaaacattatatctaacaccaccaagttaacttgctcttcactattttccaatttcattttatgcaggtgttgattatagaagtcaatactgttcctggaatgactccttctactgttctgattcatcaggtacaattcggatctcttgcatttttaggcttctattttgtaggggtgattgtttgataattcaaatggacttcgggtgaaaatccatccaaatgctgcagaaacattacaaaaactattttcagttctaattgcttgaacatattatgttttgttgtatttcaggcattatcggaagaacctccaatgtatcctcacaaattctttcgtacactacttgatttgggttcagagaggtctttgtaattgtaaacgtaccagttccgctattgcttcttcaggatgcttttctatctgtattcttctgaatttatatgttaccagttgttttttcttttgtattctcttttatgtaattatagtttcaaataataacaacaacaatattttaccctctagttggaaaaaaaaattgttcatatgttgttatgtccgttgttaccattaaattatattaagagaagaaaacaatcattcatatcttgtactcaatattttagagtttttcttatgtaatggctcaaatttgaatctgtctttctttggaatgaaagtgaccccttttagaaacaaaacaaggggcacagtggaatacatgtatagtataattaaagagaaattgctgatccagcttcttgtggtggaaacaaaagctgtaatttttcttttgtttctcaggttatgtgtgattatatttaatatgcttactttccttttctttttagtcacagtactcttacattaaatttgtcacgtacgtgacatgtttttacttttatttggaaaaaaggaaccaaatgcaagaaccaccccaacagcacaagaccaaaacgaaagggactcgaaaaattaccagcaaagaagatgagcagattatggagagcaaggattattatccaccataatcattcctcaggtttgtttggaactttttaccaaactattaagtttactaaataataatcttttttattagcattttgttttgttatgtaaagttcatgtaaccaatttcattgacattctgtctattattttatttagaaagaaagccaaagttgaaaggagcacttctcaattcttgaaattgaactatttgaaaatttggaagtggggtctcaactctcaaatcaaagaataagggtgtgattccagaacaaaagaaatgggaatagtctcttattaacggtacatcttttcaaaacacaacaaacgacaaagtcttgaaaaggtgtctttactattccaacgtctattatattttattattattactttctttttcaaagaaaaaaaaaacttcaacgttcttctacatagatgatacaaaaacgaaagcttcaaactttgaaaggctttgaaaggcacggccaacttttattattattattattatttcttctgtcccttatgccatgccaagcaaccatggctctaacccctgacgtaggtaattcttctctccattttatgacactttcactttctgggttttttttcttctttctaacttgcctttaactgttaatttaatgtataatttggattaaacataagatgggtaatactttttttctctgggtaattgaaaagcattttcctttcttaatattatagtcttggcttttatttggttgttagttagagacataattttatatttgctctgaattgtcaaaaaagaattctatttatgaatgagtattgtgtttgatcattatatttttagattattgcatgagaagttccttgtaattcgtgttgagattaaagagtagcttcacatggttatcagcaaaagatgaggtgagactccaaaatattaagttttattccttaaatttggcaggttttgaaggtctggagaaattgtcaattggatagggcttttggatttttttcttgaatgatagtaaagctgtcaatattaagaagccctattaagaaaactgcagtggttttgagctttttgggtttaaaatttattgcaatttgaagtgctgattcagtaacttcaaccatgaatgggggtgacttgacaacagttccagatagtcaagtttctccatcacccaagttcctgaaaattgcagatgaaagagaagaaatctcgggttttagaggacatttcaatcggattgcttctcataaagttgattgggaaactttgaagaaatgcagcaaaatatggatcaagaaccctctgaatatggcccttcttttatggattacctgtgttgctatctcaggagcaattctttttctcgtaatgacaggaatgttaaacaatgtcctgactaagaaatccgaaagagatgcttggttcgaggtcagtaatcaaatcatcaatgctctttttactctcatgagtttgtaccaacacccaaagcgtttccaccaccttgttcttctgtgtaggtggaaaccaaaggatgtatcaatgctcagaaagatttacagcaaaaatggtacttataagcctcatgaaagggctcatatgctggttgttattgtactacttcatgtgaattgctttgctcaatatgccttatgtggtctcaacttaggatacaaaaaatttgaaaggcctaatataggtgttgttatctgccttgttatagcaatggcagcccaagcaattgcaggtgtttactgtattgtaagtcctcttggaaaggagtataatttcgaattcgatgaagaagcacaggatcaaaaactcaccaatggtgttcctcagttaaagagctcaagcctaatccctttagagaatgagcctgaatggaaaggggggttacttgatttaaccaatgatggtgtttcaatgacaaatctctatttgttatgcggtttttgtgtgtttggatataacatggaaagacttggatttggtaacatgtatgttcatattgcaacttttttcctcttctgcacagctccattgttgatcttcggcttggctgccactcactttgataatgtcactataagggaagctcttggtgtaaccggtattgtgctgtgcgtgtttggtttactctatggcggtttctggagaatccaaatgaggaagaaatttaacttaccgtcgaatcgcttgtgttgtggtaaccctgcagttacagattgtgctcagtggcttttctgttgttggtgttctcttgctcaagaatttcgaacagcgaatcattatgacatggtggacaataagttccgccagcgtgctgctgtctcgcctttacaagatggcgatgacagagcgattcaattaagcatttctagcccttccattcttgttggggaagaaggctgtttgcagagtccaatggttaaagacatagttattataaacaaccctatgaagccacctgtagtaccatcaacaattcaaagagaagatattaccattttgtagtgatattattgtaatgagcattacattttataccttaaagtgctcaatatcatattgacatgacactgtataattggttagcagttttttatataatttattaaattaaaatgtatgaaattcaatattaaagtgaactaataacagtatgtcatcatcttgtatggtgtttagtactttaaggtatttcttagcaatttttaatgtattat

SEQ ID NO: 14393 - DNA, 2941 bp, Cannabis sativa
aaaagttcttgtaaattaacttgaatcaactacagcattgggcaggttgaaaatgcacgctgccacctcttttctcatggccaactaccagatcaatctgaattgcagaaattgaaatcactagagaagcatttaaaacaatgcgcagatgcccggaagcttggtgattggaagagcgtgataagggaatcagatgcagccttggcaattggggcggactcctctcctcaggtataaaaactacatcagcaagctttttaccttctgacttatgatgatggcaaaaacaaatttaaactataactcattggactgcattctgcagcttttttcttgcaaagcagaagcctttttgaagcttcatcagcttgaagaagccgagttgagcctcttaaacattcacaagtttgaagattatccttcttcgtgtttacaatccaaatttgctggcatggttgtggaagcttatttgtactttgttcgagctcaagttgatatggcattgggaaggtaagctcaaaagcataaacttgagaaagcaaaactagtattgggttttggataagtaagaacgagtagtagatttcttgcaggtttgagaatgctgtggcagcagctgagaaggctggcgtaattgactacagtaaccttgaaatttcaatggtgttaaaaaatgtgaaaatggtggcaagagctcgttctcgtggtaacgaacttttcagctcaggaagatttgcagatgcttgttcagcttatggagaaggcttagaatatgatattcccaactctgttctatattgcaatagagctgtgtgctggtctaagcttggaatttgggaaaagtcagtcttggattgtaaccaagcactcaagattcagccaaataacaccaaggcccttcttcgcagggctgtctcaaatgcaaaggtaattggattgttcttctaactatgccaaatggattttttatagtctttgcttgactgtttgacatgttttatgtatagctggaacgatgggcagaagctgtgagagactatgaggtcttgaggaggttacttcctggagacaatgaagttgccgagtctcttcaccgtgctcaagttgcgctgaagagatcttacggtggtggtctacaaaacaagaagttcgacggggaagtagaggaaatttctagtctagataaattcaaagctgcaatttcttcaccttgtgagttcaagcccttattgttctctttgggttttaatcaaatctttcctttttgactgaaaactaactcttaactttcaggtttttcggttgtccatttcaaggtctcttccgatgaacagtgtgaagaaatatccccattcataaatatgttgtgcgttagatacccttctgttaaattctttaaggtaatcaaaagtcattgcaactgccaatttggtctctgtttaatgtacatatatatatatatatatatgattctcattgaagttgagaaacaaacacacacatatgtacggtcctcaaataatgatcctgaattcctgattatgttttcaaactatgtttttagtggcctcaaatggggacacaagtgcaagagcagtggaagaaggatctcatacatccatacttgtactctttagaaaacattataaattatttatttttcagttttattaaattttgttccattggttttgcaggtggatgtggaagagagctcgacggtggcaaaggccgaaaatattagatcagtaccaacatttaaaatctacaagaatggtgagaaagtgaaggagatgatccgcccaaatcatcagtttttggaggagtcagtaaggagctgtactagtaataataatatggttctctagaaggctttgtccattattgtgtcctcttttgaatatcaaccaattggtttattttcatactaggattactagtctctttacctgtgacataaccaggtacataaattgtttcatatagttttttttccaacgcacagaatccctttagagagagaagaaaaagaagaaaaaaaaaagagagaagagagaagagagtagattgtttttgtttcacatatttggtggcggaattatatattctttccaattattaatttgctctgttgggttaatgttttttctcccattggattccattgcactcaagttttccaatttttaatcttgtatttatttataatgttgaagagaaatgttaaaagagcatctttggtgtctaacatcactacgaaactaacatattttaattttaataatttttgtaacaaatggctaacttcactaaggtgcaattttattgatgctgctcacatacattgcaacaatgatggtttattggttgaaattcagagaaagagaagatttatgcgtccctgaaaagttcaaaggcgcggtttattaaaagggtcaatagtttttattttattttttttggaaactaaaaatggtcaatagtttaaggagggaaaaagctattttttttagaaatttctaaagagaaaatatagggttgggttgtgtcttggtagtacaaagttaaaccatgtaaaatttgagagaaaactgggtgttgaatatttcaccgggtctcacgactgatgatgacccatgggagatttccactttgggtgtgtttcaggtcaaacttatttctttaaaccaaattagcagtctcttaagttagaatggaattatgttttttattttttaatattttactttgggctggtttgtacaatttattaaacttattattttgggactcgttttaagatgaagttcctggaatgaatcattaatttgacctttttactttccacccaagtccaacaaccaatccaattctgactcagcagccgacaccattttatttttatttatttatttatgaaattaattttcttatttttttt

SEQ ID NO: 14394 - DNA, 10513 bp, Cannabis sativa
  modified_base (27)..(44): a, c, t, g, unknown or other
aatttagggtcctatttgtactatttnnnnnnnnnnnnnnnnnnttttgtcatttaacaaaatacaagatccaattagtaacttttgtaaacacaaaaacagagggtccaaaatagtatttacccaattttgagaaaaaaatagtaaagtaactggattggatatgcataataaagcaagggaattactgagtagtgtagtgtcctgtgtcccgccttggctcccgcattttcaaatttaaacaaagctctttgttccttgcctctgcattaccgttgttctgttatatcatattgttgccttctctctctgtctttaacaatggagatggaagttgaagaacaacctccatgtccttctccatcaccctacatgttttcctcttcgcttttcaaagacatttcaaatttcaaaaccccaaaacgtccttcttctcacaaacccaacttccattccccttccactcaattcttcaccgcttccaaacagacccctcggacttgttcttcctcgtcttttcgcagtcggccttctctggctccaccctccaaccggatcaagaccgctcgtaaactcaaagccctcgaatttgaacagtcacaatcctctcgtaagacccagattgagagtgaacgctctctgaaatcgctagccaagtccctcaatgtttggcttaattttctgtttgaaaatccggcttcgtgtggctgttatttgtcgaccaatggcgggaatggagatcaaattgaccaagtcccggctaaagggaagagagataattatccgggcatgggggttcgggttgacgctgcgtggcggaaccctaagcgtcagagagatttgtcatggcgagcagtggagggcaaggataaggaaaatgggatgaagttttcgacttccgggtgtttgagtcttcaatcttcgttgaaagatgtgtgtagtttggaagatttgaggcagcgaatgcgggtttatttaagcttgggcggttgcaaggagatttttgatgttatgactcgggtgttcaaggtttggtttctcatttctctaacaatgtgattcacattcagtattgttaactatgtgatgccctttaattgatatttgtttttttgaatcagcatattgatgaagggaggttgaaaatgaaggcacactgccctttagtaaccgatgttggtctaagagataaagccatcagaacccttttgtgttacaatccaatttggcttcgtattggcttatacattattctcggtggagaatctttgttgtctgagggagatgttaaatttgatgaagaaatagcatttttgagaatggttattgagaaacagttctttatgcatgctgatctagcaaaatcatatgcttataacaagatggttgagggtgtatacaggccagggtattatgaagctttaggaagtgttgtactgaagagatttttgttgcttgttcttgttcttgatagagctaaaagtcagagcagcctgtcacttgagtatggtattgatggagttgatggaggttcccctttattgtttacagctcaatctacttgtaaatcaactcgtcaggtgatccatggtaattaccatttggttctcatgtataaatttaaatatttttctttctttattaatgttaatttatcctctgtaggttgacattgctctcttttctgttccaaattagattttttgtcatcggatattatgcttggagaaggtaatgttcttgcacatctgatgatagtagggtacaaagtatcttatcagcaggtatgtggttttccattaacaatgtttatagttgcatttgtcttagtatatttttaggtctgttcattgacttctaatatttattaagttatttctaattgatgatgggcataggcatggggtcaactagatggttgtgaataatatgtgtactttgtttttcagaatcctcttgtcgagtacgattttcaagtgaaagatttatttgttgatcttcaagatggtgtccgcctctgtagagctactcagctcttgctggatgactcctccatacttacggttgttcctttgttctttcctgaatgtaaacaaattaatttttttatttttaatgttattgttttttaatttcaagcttaattatgtgagcagagattggtagttccatcagatactcgcaagaagtctttggcaaattgtcgcgttgtgctgcaatatcttaagaaggccggtgtagctttatgtgatgatgatggagtggagattatggtagatgatgttactgacggcgataaggagttaactctctccttgctttggaacatgtttgttcatttgcaggtctgtgcttacatttattattgggtattatttaggtgtttattacctaactaatttttaccacttctgtaaaacctgcagcttcctcttttgatgaagaaagcagcgttaattgaggaaatttgcaaaattcgtggacctgatatggtacttgtgaatgatgagctttctatttatttttattttttttttgcattgtgtggtgaatgatacagctctatcatttttctacccaacaggaacacttgaacacttccagtaccactcctttggaattgttattaagttggattcaggtattggtctttcctcccatttgataaatttttcctgtcaggaaaagttcaaaattttgcctctcttttttgtttactagatttccattaccactctttttgttcattgtgacttcaggcaatttgtcagaagtatgattgcaagattgacaatttttcaactttagttgatgggaaagccatatggtgcttacttgattattattgtcgcaaggaactttcttgctcatgttcattaaaggtgttgtattgtattctattggtctttgccttatttatacttagacaattgaagcttcccttgttctatacttattttggtaatttgtttcaggattcttgtagatcaaatacagaagagtctattgttttagttgctgattacccagatgcagtccacaactttttattatcgcagaaattgacaactttgttgggaaactttcctgaggtaagtgtttaagctccacatcaattaaatacatatggtgaattaagtcatattatgttgaagctagtgaggtttctaacaagttaactagtgtcaggaaatgatgcaccgaaagctttccatagctgtacctgcttcttatagtagctggaatctgtttactattcttttcaacattctagtgattctgttaagctgggaaacaaattaatgcttgttgcttttagtgaatattgtagattaatgctggattgttcaataatacttattatttgttttgttcaacaggttctacaaatcagcgacatacttgaatttaatggtgcatgtaatgataagagtgtagtgatcctattggtgttcctagcatcacaattaattgtcaagagaaatatggtaacactgaagtgctagtgttgtgatttcagtttctttgtctcatgcttaagatatttaaaagtattgtttcattgtcaggatcaactgaattttcataaactcttgggttgtaactgtcaaagtccagggagaaggtattcttgtgtggagcagtgtagtcctgaagtagtacaaaccaaagacaatgctcatggccaaaatgctgaaggttatatcattttttataactggtggctttttttttttaagtgtaactcattattatgtagtatctttcttaccttttttacagtttcaatcaagtagttactattaaattttttattccttgaagagccactaggccaagtaccatttccctttcaatcaaggtttttttattgatttggattttatattcactttcaaaaaattatttgtgtttcacaggccataaatttctatatttatttaaaacctgcttagcctttatttaatctttttgctttcctactaacagatgctgcaagaaaatttaaagccatccaggcttggtggcaagatatgacagagaggaattatccttctgttgcaaaaccagctgcatctatttttcagcatttatcagtaaacatagacaacaccaactctcagagaggtaataattttaattgtaagctaagaagcaggactcagtgtttgtgttgtgggctacttgtcaatgtcatggatcagtttatcttttattattatatttataagctttgttctgttctttttcttatttggcatcttgacctttttatttccatttgagttgatgtctctatcctaagttatgatctttctccttccaactgagcaatttatgtaatgccaacagaaaatgctgccaaaatcatacaatctcacttcaggcgggtgattcagcggcgcaacttcttaaagatgttaaatgctgcttcacttttgcaaattgtttttcgggctttgttaattgcgaggaataaaccaccatgcataagttttacttctgttcaagtacaggaatctccgcgtggtactttttcatttccatttggttcattattaacagtatgcattaaatatcttacttaggccatttggttaattagaaaggcgcaagcagaatatcttactaactcacgctcttcggttaattagaaaaatggaagcagtctgaatactggaagagatatgccccattcattatggacaggcatcattttgtcaagctaaggaagtcagcattgtttatccagcacgtggccaggagttggattgcccggagacattatagtcctgatattgtaattagtgatgtagcaaatcctgatctagtcaatgcttccatgatcattcaaaaataccttcgtgggtggttagcaaggtctaggtacattcgtggggctgttccaatagagacacctttatattcacacctagagaatggtgcatatgatcttcagatggtttcagctgctaatgttcactttgctatggaggaatctaatttttgcaactctttccaaaatcaacactttgcagcaacccaaattcagagtcattttcgtggttggttgttgagaagaagttttcaaagtcaaaggcaagcaatattgaaaatccaaagtgcttttcgaatgtctagatgtttgaaggcttatctacaaaacagaactttaattaaatcagcaactattattcaatcttctgtgcgtcgatggatttcccttagggaggcttgtagacggagacatctcattgttacaattcaggtaactatggtttgctagtattattttgtacctcttattgacttcaatcttgaatgttgttagctaaccttgcaattgtattcatcatttctagtacttatacccctttgtatgagtaatagttgtaacatgtaatgtttctactttgcttaaattattttagagacattgtcgaggttggctggtaagaaggaacttcttgtcccagagaagggctgtattaatgattcaaagtgctattcggggtttgagatgccgcaaggaattttatggccacaaagaagcttgtaggcgtaggcatatcattgttataattcaggtaactttgcctcgctagtgtagttgtggagctctaactgacttcaatcttgaatgttttaggcctaaccttttatgtgaaattgtattcctcgtttctggtatttatactcctctatgatgtaatagttgtatgtaatgtttcttcttggccttaataattttagagacattgtcgagggtggttggcaagaaggaacttcttgtcccagagaagggctgtattaatgattcaaagtgctgttcgaggtttgagatgccgtaaggaattttatggccacagagaagcttgtaggcgtatgcatttcattgttacaattcaggtagctatgctttgctagtgtagttgtggagctctaactgacttaaatcttgaatgtgttagaggcttaaccttttgtgaaattgtattcctcgtttctggtgtttatactcctctataatgtaatagttgtgtgtaatttttcttcttcgccttaataatttcagcgacattgccgaggttggttagcaagaaggaacttcttgtcccagagaagggctgtattaatgattcaaagtgctattcgaggtttgagatgccgtaaggaattttatggccacagagaagcttgtaggcttatgcacatcattgttacaattcaggtaactttgctttgctagtgtagttgtggagctcttactgacttcaatcttgaatgtgttaggtctaaccttttgtgtgaaattttattactcgtttttggtatttatactcctctataattgtagtagttgtatgtaatatttcttctatgccttaatgatttcagagacattgtcgaggatggttggcaagaagggacttcttgtcccagagaggggctgtattaatgattcaaagtgctattcgaggtttgagatgccgtaaggaattttatggccacagagaagcttttaggcgtaggcatattgttacaattcaggtaattatgctttgctagtgtaactgtggagctcttattgacttcactcttgaatgttgttagcccaactttttgtgtgcatgtattcactgtataaagttattagatgtaatatgttatgtctcagtactttgcttaaatattttcagagacactgtcgaggttggttggtaaggagaaacttcttgtctcaaagaaaagctgttttgatgattcaaagtgttattcgaggtttgaaatacaggaaggtattttattgccatagagaagcttacagactgcatctcactgttacaattcaggtaactatgtttatatgcttatgtaacattggagctcttattgacttttatcttgaatgttgttagcctaaccctttctgtgcaataattgtaacatgtaatgtctctatttgctaaaataatttcagagacattgtcgaggatggttggtaagaagagatttcttgtcccaaagaagggctgtaataacgattcaaagtgctattcgaggtctgaaatgccggaagatattttactgtcaaagtcaggctatctctaaaattcaacattttgtcaggggccacataactcggaagaagctcataggtaacttgtctcaaattttcttttctctttcatttatttgtgttggtttccctatttgaaattgaatattatcgatttttggttgttgtaggtgtttcttccaaatatgcagtcctccctagtgctcatccgagttgtaaagtaaacttagctcttcgttctgttttaaaattacaaagatggtggaggggtgttttgtcacataaacataaaacgaagtctgcaataataattcagtcacatgttcgtggttggattgttaggaagaatgctactagagagaggcaacatatcattctgatacaagtaggatgttcatttttatcttcctttcttacgatgcttgctctactacactcgtgtcatttgctttgcataataatgacttcagttctgaacggatagtctggtttctttgtttagataggttgtgcaaattcaagttcatgaaggcatatttgcatgtcttgtttaagtaggctgatgggtttgattatgttcttttgttaaataacagtcctactggaagggttaccttgcacgaaaagattcgagagaacaactactggacttgcgcttaaggatgcaaaatacagccgcaaatgtagatgatggcatgcgcatcataaacagacttatagcagcactctcggaattgttgagcaagaaaagcattagtggcattcttcatacttgtgcaactttaggtgagaagagaaaagagatagaaacatctttttgttccatttatgtctaactccaataagtcattgatcatatgtagttttcaattgtcatatgaggttcttaaatcgtgtgtctgtgtgcagatatggctacacagtactctcaaaaatgctgtgagaagcttgtggaagcaggagccattaacactttgctgaagcttattcaatctgtcagtcgaagcatacccgatcaggaggttttaaagcatgcactctctactcttagaaaccttgcccgctatccccatctggttgaagtgatagttgactgtcatggatttatagaaactattctgttggagatgctaaggtgaatatgtcagtttccttgataattgagaactgtaggcttctttcatttctgaaaaaaaaaaggtctaacatctcttttactttttcagaaacaaagaggaaggatattttattgcttctgaactattgaggaaagtatgctcaactagtaagggtattgaagtcattcgtaagaaacccgccttcttgaaaaggctacacaatcttgttgaggaacttaccaggaacaggaaggcaattaaggagaagaggtgcctttaatgtttacatttatttgggtccaattactcaattcctgtaggctttcaaataagcatgtcatcataaacttaaatctgattacttctgccttgaaacaggaatgttcgaggaccgaatacgaaagaactaacagatagaagattaaaagaggcacttaatcttctcaaaatggcaactttaaatgaagaatgaatggtggtggtggtggtgttgttgtatattatgttgtgggacacggtctagtaatcgaacatgcacgttcgattgaaaggtagtgtttttacatgttttttagtcagaaactgaatgatgctgcagttagttaagtttagaatgtagtttaagatagattgttattgtaggatttgtttttgatttctttttattggtatgttagttgaaatgataatgtataaattggttagcattgtcctcttgtataatatcatattattttgcaaggagagtaacttaactgagataacatcatcaaaatggccttagcaatttgcagatctttaactgagataattgatcaagttgggtttttcaattatcaatcaatgaattgttttgacttttaactagataacatggtccccaccaagactgctccaataaaacaaacttatcttcttgagtactgaatggagattcagattccatctccaaaaatatctcaggcattcagattaaaatggtcccaccaccaatcaacactattttattttaaatatcttgaaatgcaagtataattgttagatagttaatcaaattatgtaaatcatattggtctatttagttacaacactccattaatggaaacaacagaattagcaaaaatacatatgttacattacctaataaagaacataataagcaatatgtaagtgtaactaagcagcccttgcaagagtttctaggcgttcaggcacatctgctgggtcaatacagaaaccccttctactgaaagatcttggaacagtaactgtcaaaactccatcttcatatccagctgatattccatcaatatctactctaccaggaagcctaaacttcctcatgaaggttcttgcaggttctgttgactcattaatggcctcagttcgaattatgaggtatcttgagtcctcaacttccacttttatctcctcttttcttacacctgcccacaatcaaacacatattagaaaaagcatatatcactcttaaggaaagaagaagaaaaggataattaccagggaggtctgctgaataaatgtgagagtctggagtttctgaccagttaacatggttttctgggacaaagttgtatggaaaaagatactggtttgaagaagttgttgcagagtatatcactggaagctccattgcttgattgagcaatattgatgatgatgattgatttgtggttgaagaggaggcagttggatgggcttttataggcccaacaagttgtcaagttggttgtgggcccttaagttgaggtttatgagtgagattgattaccattattatcatttgaaaaaaggaaattagatatctacgcttttgatgtaagttggaaaaaggaaaaaaaaatcaatattttataacaagacagaaaatgcttgacgtctgggaaaagtatgcagattttcttgaggtataggtgcctttcaccatcacaaatgagactaaattttacttggtcagtataagtttgtgtttttactgatgatacttatctttttagaacaatttcactttcagaaattgggaatgccagatcaggtttattattcaggagatgggagaacttaatagaaagtttaattaggatttttgttccctgaactttgacatgtaccaaatcatgttccctgaacttttaagatcgttgaaaatgccccttgagctatttagattgttggatttaaggatttttttctaattttagtaaaaaaatctaacatggattaaagtccagaggccatgatttagtatatgtcaaagtttgagggtcatgatttgatagatatcaaagtctgggga

SEQ ID NO: 14395 - DNA, 3695 bp, Cannabis sativa
gcctagagccatgagtatcatcagttggaatgctcgtggattggggagtaaacgagcattccgttctctctcccttttagtgaagcaataccgcccaacccttttgtatataatggagtctaaactccttgttggtgctttaaataagtttgctttgcatcttaattttcctaacggtttagaagtcccacgtgtcgggcttagtgggggtcttttgttgctctggacacgtgatgtcgatgtaaccttactttcatataatataagtcattttcactgttatcttaaatttcttaattttcctgctttcacttttactgctttttatggtgcaccatctccaataaataaaccccattcatggcagcttctcaatcgtcttggaagcacttctcgcttaactccctggctaatcatgggtgactttaatgattatctatccttgacggataaaatagggggtgacatgtcacgctctccctctgtacatttccaaacttttatagacgattatgagcttcaccctctccatcctcttggcagcccattcacttggactaaccgtcaaaagcaaccatctcacactcaagaaaggcttgattggtgtctttctaatgacgattgggatgcatccgttcccaaccctcgtcttcaacatggtgacttttttggttctgatcatcgacctttaattttatcccttcacttccagggtgctcaagctaaccatgcccctcgtttcatctttgacaagctctggatgtctgagccgggttttgaggattgccttcgacatgcttggtctcaaaccacacttacccaaagtcataaccctttgcttggactcaaagaaaaactgcacaactgttcctcacaacttaaaacatggaagaattcgttgggtcctcctcttcatgctcaaatccgagaagttcaatctaaactcacgaacgtgaactctatccccgcagccatccaacgcactccttgatcggggtagacaccttgagagccagttaaatcgtcttttgcttaaggaggaagagtattggcagcagcgatcacggataacctggctcaagcttggggataggaacactaagtattttcatcgtttcgcttctcagagacgtcgatctaaccaaattaaatctctcaatcgccctgacggttcagtggctaatgacatccactccattgttgcaactattgaatcttattttgctaatctcttccacagtcaataccctgcagaagccatcattgaacatgtgttagcaggtatcacagagaagctcactgttgaagaagtggatctcctccaagcttccttctctattgaggaaataaagcaatccgctttccaactgtccaatgataaagctccagggttagatggattcaatagttctttctttcaaaaaaattggcatgtggttgggcaggatgtcattaatgcagcgcaaggttttctaaatggggatgctgacctctctccgattaacaatacactccttgttcttatccctaaaaaaccaaatcctgaggcgattactgactatcggcctatcagtctttgttctactctctacaaaatcatttctcgggttttggttaatcgcctcaaacccattctcagtcgtataatctccccgactcaaagtgcgttccttcccaatcgcttaatctcagataacatcattattggacaagaggttatgcactctctcgctcatcgtaagacgggtcgtctgggatggatggctatcaaattagatatggccaaggcttttgatcgtgtggaatggccctttattcgccgtgtaatggagaagctcgggtttcctcaaaagttcatctcactgatcatggcttgcgtttccatcgcaaccttctctttctccttaaccaacaagttcttggccatgttctgccttccagaggcattcggcaaggggaccccctttctccctatttgtttttgctgtgctctgaaggcctttcctctctaattcggtgcacagctcaacatccccagccccgaaaacattctctgggaatcaaaattgccagaaccgctcctcccgtttcacatctttttttcgctgatgatagccttcttttcagttctgcttcccctatcgctgcgaccgtcattaaacaaatcttaaccgactatagccaagcttctggtcagttggttaatttcaccaaatcagccatgttcttctccccgaataccagtgctgaaatgaaatccgccatcactaccatccttgacatccctattagaaatacctttgacaagtacttaggtcttcctcaaacttttggaagaacgaaaaaggatgcattcaattacatcaaatatcgggtttggcttcacctcaacaaatggaattccaagttcttttccaaagggggtaaagaaatccttttgaaatcagtcattcaagctataccctcctacgccatggcttgtttcaagcttcctgcttctttccacaaccagatcgaatcaatgatgtctcaattttggtggggaggttcggtgcatacacgcaaaatccattggaaaaactggtcttacctttgttattcaaaattccacgggggccttgggtttcgttctatgaaagctttcagtcaggtgatgttggctaaacaggcttggcggcttcttcagtctcctcactcctttgttgccactttacttaaagcccgatattttccaaataccaactttcttgactctggcaagggccataggccttcccttgtttggaacagtatctgttggggcaaagagcttctccagtcaggtcttcgcaaatcaattggtgatggtaccacggtctccattttcaatgatgcctggattccagggtatggtaaacttcattacctcaatcacacctcttatgcaaacatgacagtggcaaaccttttcacttccaataaggaatggaacctcacccttctccaaactatcttccccgtcgatgtgtgtcaggccatcatttcaatccctcttactagctttaccactcctgatacttactattggtcccttaccttacatggcacctacactgtcaactctggttatcaccaagcccatagcattctgcaccaaaatgacccttcaccctcgaataataccattacccaatcatggtggaagcaaatgtggtctcttcctttagcccctaaactgaagcactttctttggcgagcttgtcatgacattttacctacccgccataatctttttaaccgcaaagttttacataatacatgttgttgtcgatgtttttatcatgatgagactctagaacatgctcttttcagatgtgtaactgtccaagaggtatggaatttaaccatttttcatgaatttattgataaaaatgcttctctcaactgtttggacttactttatcttgctgccactacatataatggtagagactatcatttctttttgtgtctgctatggaagctgtggaattgcaggaacaattggatatattctgggttgtcttcttctccttcacaggttctgcactgggttgaggactacttagatcaatatcaaagttgcaacactgggtgttctcatcttcgttcatcccaagacttaccttcattgacatctaccgatgagccatgcactcattcctatcgacttcggc

SEQ ID NO: 14396 - DNA, 12314 bp, Cannabis sativa
cacgatctctgactccttcccttacctgaaattccaaatctaccctttcgatgactccgccgtctccggtctgatctccacctcgattcgctccgccctggactgcccactcaactacgcccgcagctacttggccgacctactcccaatctgcgtacggcgcgtcgtttatctcgactccgacctaatcctcgtcgacgacattgccaagctggcggccaccgagctcggagagaactctgtgctcgccgcgccggaatactgcaacgctaatttcacctcttattttaccccaacattttggtcaaacccgtctctgtctttgaccttcgctaacaggaaaccctgttatttcaataccggagtgatggtgatcgatctggaccgttggagaggtggagatcacacgaacaagatcgaggaatggatggagctccagaagaggatgaggatctacgagttgggttctctaccgccttttctactggttttcgccggtagcattgcttcggtcgaccaccgttggaaccagcacggtctcggaggtgataatttccggggactttgccgggatcttcatcccggtccggtcagcctcttgcattggagtgggaaaggtaagccgtgggcccgcctcgatgcgaaccggccctgcccattggatgctctttgggctccctacgacctcttacagactccatttgttttggattcttaattcatttcattcagtaaaaatccaaatttgaaaaaaataaataattaagtaattacaaaaaaaaaaagactgttaatattttttatttttttggtggggaatgaatttgtgtgcatggttcgttggtaattagatttttatttttactttaatttgtagattataggggaagtgaggggaaattacacataactacatctactctacatattgtgtaaaaaaaaatatattgggcataaaaatatcatatatatatttcaataaaacaaggtgctgtaatttgtatagcagaaaagaaagctattttgagtggtacaattttgtgattttttttcaatgaataatgacattaataataatatttccatacttttgttatttgtcgatataattcctgtatgacttttattcaaaacatttagcgtaattatcataatgaaatatgattaatcgaattatcttcttatatataagtcttttacactattgatttattgtgttaatgtacactaaactaataaatatatatatatatataaatattaactctaagaacataaatacttattctcataatttgtatttattactatttctattttttttttgtttagactattaaattataccatttttgcaccaaattactactacattaacaaactgaaaaaattaacggaatgcaatcaaaatgacacatttgaattaattactttctttattcaaaactgtaataataatgaaaaaaataaacttcaataatattctacaagaggtatatcgttcgggagaaaattttatatttgtacttttcaaaaaaattttgttgtaattgttatttgtgtaatgcttaactctgatcattgttgtgtaatcgctctaattatagtgtaataactaattattgaagtatatcatagttcaacttcaatatattgaaatatcattaaacttaagctagtttttatatgatgttattcaaaattattacttagtttcgaatatagatacataatgttcgttaagttgcttactagttaagtattttgtatacaaatatctattatatatgatattatattatagtatattatagtaatatatttgcggtgaaattttttgaaatttttttaatatttataattattacacatattattttaataaaaataatagcaacaaaaatactttattttatgattttgttaagacgtattattttttggccattaagtattaactcaaaaatacttagcgatatattattgaattatgtggtaaataaactagataaatatgttatttttgagctaacacttaacaataaaatagaactataacaaaatcgtaaaataaaatattttattatgattatatgtatatgtaacaatcataaatattaaagagaattggccacaaatatattatatgtgaaggtattcaatatatatatgctttggtacgtgaaagtatgattaaactttttctccactcaataattggagacatacaatacagtctgttattattatgcgaatgaatatacaagtagtagagccattaattaatctagctataatgttttatctcactttattatacgattgtggttgatttaattggattatgtgtctggaaaaggaatgtgccagctaaacatatattagtctttttttcctttattaattaaccaattaaaaagacgtaaccattaacagttacaaaaggacaaaaatgtgtggttatactttgtaccaatatatatgtcgtagaatacaacattataattgtatacatatatacaattcccttttggctagagaataatagtcacaaattgataataacttattatatatataaactaaggatctcaatattattaatatctctggattatatgtagaatacctcgttcaaacaaccaaagagttacaaaggaattgggaaatctgctttgaggagtaagaaaatttatcaattctaactaacactaactttgcaatttaaagcaaaacataaatgcttataatttagatcaccctcatcaatcaagattttaatagtatagaatagatcatcaagctcgagcctttaacattggcacaatctgattctaaggtcatgaaatttagcaagcaacaagcccatcaaaatagcccacaactcatctttgactcatcaccagaagcaacatcactattattgtctcaaccagtgtccttaaagttgacgttagcatcaaaattgatcttcacctcctggtagggataatttggcctttcaaggatataggggcattaattagcaacaagaaaatcaaatatataatcggaagttgatcactttagaaagcaaagagaaggcgtcagagtcacgagtacattatttaatcagcttccaaaactctattttcgactgaccatctgaatgaatttcaagacaagaaagaacaatgctagtgggaagtcaaaagttgcaaagttttcaaaaaaagaaatgttaatttttcgaggcatccagaagaaattccaccaactcttagttttatgcatatctgaggcttcaactttgattttgaaatccatagcaactttgtactcccttctgtcttatcattaagcattccattttcaactggtaattcaaggattatagaagcatcatcatcattgaataatagtctaataaaaagctcctcccaggcagctaccatcattgatatcaacaaggtatagtttgtcatagatcttaaagctaaatggcttagggagccaaggatcctaaaagattctaacatcttgtaaaacaccttgttaaatagttctgagaaaagaatccttaggagctaaccaaaccaggagtgttaaaagggtgcattccattaacaaacgaataaacatcctcaattaaaattaagaagcaaagttgtaatgctcctcctccaaactttgaagttctcaagtgatggatcaccgaaaacaagatgcaccttgttgataaaggtagtatacatcaatccattaaaattatcttcatctgtgtagtcctatacctacagtctcataataattacacttgacatttctaaaatgatgtaggattgcacaacttacatagtattttctcatataaatcacgttgttaacactattaactaatcctagttagttttctgttagcttagattagttaagtatgtttagttagttaaggtagttagtgagtttgtacaaagcttattgtactctttttttcataaactcatatataaatacaatggtttacactggttaagtcaacttttgctaagctgattaattcagtgcttttctttcttgcttttctctctgctttctttctctacatggtatcagaagtcttgaccaacgaccatgtcttcgtctacttccgatcctcaagctacttaggctcctgccatgactcctacaactcaaggtacttaggcccctgccatgtatcctgctgccactggatcttggaatcctttctccaattctttgtccatctcttacaatcatcctggatcgtgtgaacttcctttcttggaagtcacaagtaattcctactgtcatttgacatgatttcgatgagatctagttcacaggggttcctcctcccaggaatcttcttgttggtgtttctaatctagagtaccttcaagggcaacacaaggatcaattacttctctcatggctgcgatcatccccgtctgaaagcattctcacttctgttgccaactacaaaacttctttctctatttggcgcactcttgaacaaaaatttgcctttcagaccaaagctcatcatcttcagctcaaggcctgttctcacatgttcaaaaaggtggtctgtccatctctgaattcattgataaagttcaagccattgcagactctctggccatagtaggttcccctgttgatgatcaagatctggtgttacaaattccctatggcctttgacccaagtttgatcctgtcgtctcagggatcacctcaagaagtgatgccttgactatcaaagaagtataggctctacttttgtctcatgaaagtcaaattgaatatcaccttgccatgagtgatctcacagtcaaaatgtaagctaatgtggcctttagaaatggtagatttgaaggtgtttgaccttttgccaataataatttcaccaattctaattatcagcaagctccaccaacaggctgaggtagtggttttccaagatttcccaatcatagggtggcgtgtaaagtgtgtattagattggacacactgcaactgtgtgtcattatcgttttgacaaaaactagacaacccccaaaccaggtaaccctactaattgtgcctttttcactgacttagaatgtgactgtgatcctcaggcatacaccactaatatggtgcaagactttggataagaagttcttggtattttgactcaggaactacaacacatgttacatttgaccataccaatttcgatgaaggaaagcccttcaatggtactgagacattggccattggtgatggtaagaaactttttatttctcacgtaggatctatcactgttccctctttcaatcagccttgtcctctgcatatgcaatctgtcttaaaatgttcctttcattacgaaaaaatcttgttagtgtctccaaactaactcaagataatgatatttttcttgaattttataaaaaattgttactttgtcaaggacaagacaacaaggtctatgctactcaaagggaaagttaaagatgggctctatgttattggtgatgcttctagtcattcaagccccacactacaatatcacattgctacctctgttagctctaattctgcttctagttgtaccacaacttctaattgtacaaatgagtgagttctgacaccaaacttttgtaatacaacttcaatgaataaaaatgttgtttcttatccttctgagcattctatttttcatgtttcaaaaccatcagatatcaatttatggcattgtaaactaggtcaccctgccctttccacacttcaaaagttactgcctttcttacctcatgttggctctctgaagaatgttcagttttacaatacttgccaacaagaaaaaagtcacagacttcccttcttagcatcttaaaatcgtgctagtcaacctctagaactcattcacatagacctttattgtccctctcatgaaccttcaaatgatggttttaggtattacattcatttcttggatgactatagtaaatcacttggatatatccacttacattaaaatcacgggcttttgatatgtttattcaattcaaaagtatggtggaaaaaaatttggactgcctattaaaagtgtgcaagcaaatggtggtggtgagtacaaaccttttactaggtctctaactgatcaagaaatcttgttttctcttccttgtccccatactcaccaacaaaatggtagagcagaaagaaagcatagacatatcactgagatagatcttaattaccttgcttgctcaagctaatttggatcttaaatactagtggcatggcatgccttgccttccaatgtgccacatttcatttactatcaacatgcttcctacacctgttctaagcaatatcagtccatatgggtgcctgtttagtgctaaacctgattgttctatcttgaaaccctttatatgtgcttgtttctctcatttaagaccttataactctcacaatctagatttcaggtctcaacaatgcttattttgagattacagtgtagtgatgttcattgctagaaatgtcatcttcaatgaacatcactacattgtaatctctcacagtagcccaacatatcaggtaaatcctaaacataattctcagtttgttcccactactagtttctcaactaaaccatgctctaatacttggtttgttaatattactcccaatgctgttattgagataatgttttccctaccaacatctaaaaccagccctaacttacctgtggcacaacctttactccatataccttcaccccacaagtgtccccacaccaatctatacctagtgcttctcccaatatagtgtctgcaccccaactaacttctgttcctcagtctcacatcggccaatctactgttgtgtctgaaccttaacctatcacacaaacaactattaccccttccaacccaccaactaataccattacagatgttatcccatccaaccctaatgaggaaaatcttgtctctacctcctctctggcccaaccattgtcttagataatacatgctcaactattgttaaaaggtcacatcccatggtaactaggtccaagaatggcataattaagccaaagcatatttggcaaccaaacaccctttaccagaatcactattgccttttaagccaagatctctttaaaatcctcttaaacatccacaatggtttaactctatgcaaacaaaagttcatgccttaaaaagagcaggcacatggacactggttcctaaggaacctggtatgcatatcattagaaacaagtgggtccattgggtaaaactaaatgcagatggttcattgaacaagtttaaatcaagactgggtgcaagagctaaggcttgctccaatcctatcagcaataccacaaaactatccttaagtgatggagaaccatttagagatcctactctctacgaaagaaccattagggctctctaatatcttactctaactagacttgatgttacccttgccatcaataaactcagccaatttcttaaagctctaactgtgtcacattgggaagcacgcaagaggttactgagatatcttaaaggcattatatttgatggtttattcctcacacctgatgctataatgaccttagaaatctactcagatggtttgtgttgatgatcgaagatcaataagaggttatgtgatctatttaggtgataatctaatctcttagtctgcaaagaggcaacaaattattgcttgctcaagcactgaaagtgaattttgtgctttagcaaacacaacagttgaaataaaatggattatttcttacttattgaattacatgttactttacctcattgttctgttatttgggtcgacaacctgagtgcaactgctctagcagccaaccctattttatatgcccgatcgaaacacatcgagattgatttatattttttcagagattaaattctaaaaaagaagttgtcagttcgttatgttccaagccttgatcaagtggctgacatgctcaccaaacattatttaagaatcgattcacctaccttaaatccaaactgaaaatggcttaaaccccttttcgtttgagggggatgttaaaactattaactaatcctagttagttttctgttagcttagattagttaagtgtgtttagttagttaaggtagttagtaagtttgttacaaagcttattgtactctggtttttataaactcatatataaatacagtggtttatactggttaagacaacttttgctaagttgattaattcagtacttttgtttctttcttttctctctgctttctttctctacacacatgactatttactgtaacaagagtgttgttcatatggattcagtgatcttcttaggacaactagtaaccttgttaatgcttttagagacttgcacactgactgaaactaattagaaatagtagaaaataatgttatgcacaagaatatcctcctcctgccagtatccatctcattaattgcaaatataattgaaacaaattaaaacagtactaaaactaaattcatctaatctaacctcatgaaatgtaaaaatatttgcctcttccattgtgagattagaagcattattgctagtctccactgccattgtctccatcattttgtttccaaataattcctctagtcaaatcatgtaatcctccatctcaagaggaatgaaatagtcagcttcttcatcaacctcatttgaatccacctcatttgaattctcactactcatgtcataaacatcttttgaggaaaaatgaattgaagcctctaaatcagatgatgaactaatggcaattggttcatgtaattcttcttaaataacaaccccttttgtaactacaaccataaactcatcctacttaacaaagaaattgtaaaatttatcatccacattaacatgccttggaggatacacaacaacattaggaaaaattgtgcagtttgtaggcaactcctcacatttacatttctccagtttagaagcttcttttgatttctgcatcttaacagcttcaggatcctccttccactccactaataaatatggatctggtggcaccaaatacagaaaagcatctgtatatttttacctattaaatcaagacaaacataatgagaacaaaaacataaatcatctcaagctcaaatataacaactaacaactaacttaggtaaatattatcaaatattatacctgccaatcctccaacttaaattcaatttcagccttatcaactaccataactcccatgttcaagtacttcccataaagcttgaataaaaaactaaaagaaaaactatattgaagcccacttgccatatccttcaaatcatgccttctaaaattttttaccttgcagtggtcaaaatagtcacaggtccctcccttatgtctcctgttttcacatggggaaaaccatctacccccatgtatgagtttcactgtaaattcaccatcttcaatccctataagagtaaatacaatatatattgatattgaaaataggcaaagctcaaactttatttgagacctaggcaaaaccccctaaataattaacccctcatgaaatagaaaaaaaaaacccccagccattaccatgtgcaaactaactttttaatgttaacaagcatgtgaagtaacaaaagcatgtatcccactgaacaagacaatagccctcgacaatcaatgagtaaaaattccttttttcataaatttattttttactcaatattcaaacaatatttaatactcatctaaccatttcaccaaacacacttaaacccattataaaaactcattcttcctgctctaagccctaggcgaactaaaaccctaaaaatcaccatttacaaaaaaaaaaaaaaaaaataaaaaaacctagaaatttccacaatttcgcactgtttagaaagctttgcaagtggggggtcgtcggaacctcgcctccaatattgcattgcactcgtacacactctactcctcaatagtagcagaaatagttgttcctcctcactcacgtctgtgtttcaaagtgtccactctcttttatcaatcaaaggaaatggagaagatgtttggattttttctggttttatgtttcgaaaagattttaatacccttttttatttattttggagtttttattttttttaaagcattttgtttttattttattttcaagttttcttttaattaattttgtgattttaattatttatttggtgggttttagtttacacatggcatgcaacaattgacatgaatacccatttgatttgccacgtagaatgatttggcacttaaatggaagagaggtcacataatagtggagagcaaaacaaaattgaggttcaaatggttttatcacgaaaaattgggtttgtgggggttacgtaggggtgagcataaaatcgagaaaattaaaaaaaatgttcaaactgacttaccgaacaccgttggaaccgaaactgagggaaccgaaaaccaaaaaaattgctaacggttaaaaccgccattaaacgatcgttttttttttggggggtaataaaccgacccaaaaatcaaaactgaccgttatacatatatattaatttattaatttttttttactttatattatagttattaataatatatttttaattttattaatattaaagttaaaaaaataagataattagtttttgaataattattatatgttttcagttgtaacatgtagaataatagaataaattgaatcatattttaaaggaaaaaaaagttcggtttgggcggtttaaaccgatcaaattgaggttcaaaacggtcggttttaagataggttctagattggtcagtcggtttttaaattgcaccaatccagaccgaaaaccaaattctgaatttttatatagaaaaaaaccgaccaaatcggctaatgctcactcctagggttacgtaacacaaatattgggtttaggcaggttccaaaatcctaaagtatggtttttttcattttagtttggtgggtcacaattaattatatttgcaatatttatattatagattagttaaatatgtcaccagacccattgaaatacactctaattcaagtgtaatgtaaatatgtaatttttgaggggtgaaattacaaaaggctaccgagtagcagccttaacttgtgacatcactcaataagtatacatttatgtttgttattaagatgttttgattattttcataaaagcaaattaaatgttaattaaatgctccaacctactacaacataaacccaatataaagttgtgttgaaaacaaccttacttctttttcgacttaattatacaaatggggaagccactagccagaattcttagcagttaggtgaggcattcctttcttccactcattctcctaagttactaaaatcttacttctatttggatagatggtcaagacctttttcttatattattatttatatttatatgatcatcattgtactatttatgatgtttacattttagtgaattgcttatttttcagacattgatactatacacactgataatatatatgtatatataaaagaaaaaaaaaaaaagcaaaaagattcctatcttataataaagacctacctttacaggaaagacctaaaaaatgaaaaagaggtcctccacttggtagagagggttttgttatatatgatagtgatagggctataggctatatataatcgagaaagattcccacattattaatggctttcaaactttaaatcagtgtagttgtcaggttcaggaagcacatttggatgtattggatttggatttttgagagcagcagccttaatttgccgttttaattggacaaaaatcatgaaactgatgcaattgtcttctgtcttcttcagagatttaaaaacacttttcatgcattaatccattctttgttgctgtctgtttgatcatatgctgcttaattcaattgaacacgcatttcatgtcatatctaaccagcagatattttattattattattattattactattcatttatatgattaattaaaaatcgttaagctgaaatgaacaatcataatgggattaattaaacattttttttatttttatttttctttgttctttgtataagtttgatatataattgaagatattttattttcatgtgctttacaagctggtaagcacataaaacgtggtcaagttattagaatatttttattatggaaattattttctaattaagaaaatgattttctatttaaggaaa

SEQ ID NO: 14397 - DNA, 6649 bp, Cannabis sativa
tgtggtggctggtggcgtgggtgaggtcgttcgtgaggtatggtgtggaatgtggatgggggctgaatgttttttagggcttctgaaaagtgaaatgtaaatgatttagggttttttattttttcaattattaatttaatatatatatataaattgtaataaaaaaaataaaaaaaatatataatatatttataaaccgggttggcgagcgggttttcagggtcaacccgaaacccggtacccctaaaatctcaacccgcgaacccgcccgaagggtaccgagttgaacccgactcgctcgaaactttttttttaaaaaaaaaatttcgggttcgccggttcagtcaaaatgttcagtcctactctctagtccaatccagtctaatcctgcataccaaatgagccctaagagttaatacattgacttgtagactatacttggttaacagcgagtcatgtaaaaattcgtgtgttgtttctttggcaattttttacgttcattgatcaagtgtcattttcttttacattcttctaagttttcatcattttattgtcgttaacttaaaattgcatcaagaaatctattatttttaaaataaaaaaaattattatataaattaattgtaaaataaataatttaattataaatatttttaaaaaatattaaaaaaaaaacatatcatcatgaaaattaaattgttatgtatagaataaaacattcgaagggtgaaatatcgaaatagtagatggagttgccaaataccaataaccaaatatatagagaataacaacttttgctttcttttaaaaagaagctaggcacttaaataattgggccacaatccctcactttggatggtttttcaatccccacttccttgactttgcatcttttatttccaccatatatttatgtctcttgctttcacatcattttgttaattcaattatgttgtctttttacttctcttgatcatctgttatttaaattgtgagaatcactcattcggcctaatatatacctaccaacaaattccaaaattaaccaaattttttgtattaaaaatatcgcctaattaagtgctttccttatgttgatttgtttttcctaatgtttgtaatattgtttttttcttactttgtgcgtttagcatttgaataatgatcctcaatgtgtcactatagactaccttatatgatggtaatgtaaatacttcatttgaatagtatgatgtaaatatatatttactttgtcacatttagcatttgctacataacaagatatcgtattactagtgtaataaagttttaatgcttatatatttttatttaacaatttattataagtgtttacaactatttctaatactttacattttttttctaagaaatacgaaacactattggtgagcacatggagactaaccttccaaaaattaaaaagaaatccttacaagagtgattcaaaccccacctagccaagacatcagccgaattgttcttaactaggcacccaaacaatctcaacaaacttataagacaacaaagacattccaatgcggtgcagaagaagtcttcacagcattagcgatctattgacaatctgtgacaagatccacatcattgagaccaagtctccccagcacctctaaaccacatcaggcagcaaagagttcactatgtaataccgacataggtgttaactaagaggtgtataaagccaaaatacctctagagttacggttataaaatagataattttttgacatgatacgaaattggtacaagagcataggagggtcgagcatgatcggacacaaaaaattatgagtttgggcacgacacaatacgatgctataaatttgtatgaaataataaaaaaaaaaattgtgtgcttaagtaggaaataccatgacaaatctgaaaatgcaaaacgcgtaaacacaaataatctaattttgaaagcacaacatgttaaaaacattataacagtaataataataatttaagtatttgttaatgaatattcaaattagtaattctaattgtgtgtaattttttgtaaaatattattaaaaaattatatataaataaataaaattatataaaaaataactataatttaacatacatgaaaaagtacacaaatttgagctagtatgaaataataggtttttttttttttttttttaagtgtatgaaataatagattgatctaaataaagtgctatacaaatttgagcgatacgacacatgtcatattcttttatgacatgacatgacacgacacgattttttttatggcaagatacatatttatttagagcattactattaatgttatttatttatttatttgaaattaaatactagtaaatagtaatgttactcaatagtaataatattttgtaaatataagacttttgaaggaagtgaacttttacttttgttttacaaacaacagaaaaaaaaagttttgcttcgtaattggatttttctcaataaatatgatgatgacaaatgcattcaaaattcgagggaacaaatcaaaataacatggatctgcaaacaaatacaaatataggaataggattatattttaaaaattgaaggtgcagatgctcttcgtgtggaactggggcactgaatttcaaccttaccagaatgctctaattttacactttgacaatgatatccaacaatcataaactgtggggcctaataactgtggtagttatttcaaaagaaaaggatagatttgtctttccgctcacaatgtgggacccaaagggccaggtgtgtctacagtctgatatttgtggagtcgtgcaattagtacgtcctttcgtgggtcccacttccctcttcacctttagattcttcattttcacgattacgatcctacggtcacaaacgggtcaactacgcatcatattttgtcttttggtatttaccccttccctacttctaaaaaaatattgtattttgtggtcaacttaaaaattataattttttttgaaagcaacttaaaaattataattaattggctttttttctaaataggttatttccctatatggataacaataaggaaaaaaataatacactatgaaaactaattttatggcataattatttggcaaatatttctttaattaagcatatatatgggaagttaattttaatctatggtttaaatagacccaaaattagctgctacatttatgttctaatttacaactattagaagatatatatgtatatatttaggtattcaatttcaaacgagtattaattcacctgacaaaaaaaaaaaaaaactagtattaactaattattaaaggctagcaaaaatgaaaagattaactttagctctttttaaggcttaattggttgtaaacatggttaccggactatcctaattcggttggtttgtttaaattttggcagatttgtaatcttttcaaggaatcttttatattaaaataaaataaattggccgactacctgagtagattttctctaattttttgttattactactattaagcttacaaattatattttttcttcataattttgccgtttttattttagaattgattaatgtagatagcaataaaataatataataataacaataaatgataaaaatgcaaaccacaataaaaagacgatatttagtaccttgaatagttttcgtaggagaatgtgtgtctatggacacgtatataaggtataaaattgaggttgataccttcacatccacatggacatgttcgagacctgttattggttgtcccaagaattttctcctcttatatacacgacacctcagctgtcggctaaatctttacatataaagatccaaaaacccaaattcatccacgtgtccgatccccctctccaatcaccgtacacgtgtccaacacattttcacctcctaataatttaccttcactgaacaaacccactcccacaatgcgataaagcctcatttatttacaaaaagatatggtttcttttctctccaaacaaaccgcttattgtgttcaaagctataaacaccaacttttacacacgtacacaaaacctccttactaagcttgtttttttgatttataatcaacggtgatgatcaaaagtcattaagatatctagttgtgtacaaaacaagaaaaaccctagttatatacactatatatctaggcctcttcttattataaatctctctctctctctctctctctctgtgtggctatataaccaaaatttgttccttggttcggttcggtatattggtatgcgtttcgtatcatcatgacgactaacgtaccaatgtccctgaggttttcttcttcactaactttaaccaagcaagccatgggagcctccgatacttggcctttttctttcgttttcttgtaaaggccggcttgtttttggaaaacccaggtctgtaatcagttactctctattagatcctcttttatatatatagcttatacaaatattgtagattaaataaaaatgggtagtggagaaaaaagcctaaagttatttcagcttattcatcacaataacggtcaccaccatgggaccaaaaataagggtgtaatcagagacgttccaaaagggtgtttggcaatcatagtgggatcacaaaatgaagaacaacagagatttgtggtgcctgtgatgtactttaatcaccctttgttcatgcaattgttgaaggaggctgaagaagaatatggatttgatcaaaagggaactatcaccattccttgccacgtggaggagtttaggtacgttcaaggcttgattgatagggaaaaatcctatcaccaccatcacaaccaccaccatcttcatcatgttactgcttgctttagggtttgaaataaatttaatcttttttttttgtaaatttggggaattattgttttttttttttattttcctttttctttttccctatttagttggatggtgatgacaaatgtgatgttttcatgacggaaaaaatgttgaaattaaagacattgctttttagcagtttattagtgatttctttcactttttgaaaagaaagaaaggaaagaaacgtttctaatcatcaatgtggccgttttttttctttttttttttctaaatctttaattttaatttctttctgctttactattaatattgaatgttatgatgaggaattgactgctttccaataattaacgataaggtgtatcgtttatttttgtttttgttttataaaatggacaaatagcaaagtatggtaggccctaaattggtttgctttgaagccatacatacatcatgtatattataccactttacatctatgtattaatatatgaatgaattgataagcattattattgtaatttgttatgatatccttttcaagtcaataatattacttccaataattttatatttattttttaaaataactagaggctgttacacctaacccatccattataagaattaagaataccacataaatagttattaacaataaaattatgcatttgtttattatgcttcgtgtaaaccatcaacagaagacatggaattgaataactgtgttggtagtaattacgattcagctggtactatagctaataataacttcttatatgtatatatgattttgagagtgtaattaagatagatatatatatatatatatagtcagaataaagtcaaagacatgggagtaggttcatgcatgagctccacgtttggggatcagttcttattgaatatgagcaaccaaacaaacaacgaggtggccaattttgtcagaaataaatatatgaataatatatatattcacattaaagaagttaagtcaattcagagtttttacatcttaggattcacaaaggctcacctcactgccaaattttcgaagctttaattgtcatagtaaccagcactgagtacacagtacatgtgggccttaatttttagtttcgactatgtggttctattccacagtcaggctttagatttcttaatatatattacaatatataatttggaatttaaactcacaattttcaatatacccgcattctcttataactatttgagccactagtctcaagtaattaaatttcttaataagttaattatattataagaattattacatcaaaaatacaaattgacattttatttacaaaaatacttttataagatgtggacaacatttatactttttatgtgcttttaattactaaaacatctcttacaatattacttacacaatcaacaaagattgttgggtagttgaccaaatattgtatgagacgaaggtaaagttgctaggtagttgctgaatggttgactgaatgttgcatcagatatatgaaggtttccatcccaggaagcatgaatcgtgagttgttgaaactgtaatgcaacagttatatctgttgcaagccaactagagtgcaacttaattgcaaataataatacgtgaatatgtatatatgtaagaaactgctatttgtcagtatttatttttttgtcactgatcgataattacttatactttaatagtaatatgtggagaaataattgttaacaaaatgtttatgcaactgtaatacaactg

SEQ ID NO: 14398 - DNA, 3680 bp, Cannabis sativa
aaccatccatataccattaactccattttcatgtcccttaagttatggtgtacatcattgttattcactggatttgcgtattgctggggattaaaagagtattcaataccacattgactgaccaagattttcaaagtatgtctgaaaactacttacaccaataccaaaggcctaaaaaaattaaaaagagaaaaaaaaaaaaaaaccaagttacaagtgcctaacacaatgagaaatgctaaagggaaccaatggtgcttagcacctttatgaggtgtaatatcgctattggtacaatacaatatgctctaatacaatgcaatcaaaattttatggttttataatttgtctaattcatctaattatttatggtatcacatatagtccagttattaagttcattctgatatatgtttaattagatatcttaattttgaacaaaaatgcagactttattgaatgaaagttatctgccatcaaaagggcaagaaaatcagtgaaacatcccttcccctaaaaatatgatcagcactagaacaaacactacgaaccaaaaaattggtcaccttattcgcagattgcttaacaaaaattagttgcttacattatctaaatcgtgcaatacccatttacagtcagaaacaagcaaaccaaaaggcgagctgatcatatcagtaggactatgaacatagcatgcaccaacaccttacaatccaatctccatccccaccttgtaggtgtatcgctgttgtttgagccaactaagtgcttctcttactctcattgcttcataaacaagcagcagcactctacatcagtatgagtcttcgaagtagcatgatcagagtttgtctatgttcccttgcaagcaagccaaccaaaaccgaaaaatccaatccctgcgaaaacatatgcatctgcattgaccttaatcttattgacatcataaacagacttcgtctgagcaactctataatctgccaaatagaccaacacaccatagcaactcaaccaactctctccatagactcccactgaacaatagctcctcaaaccaactatgaaggggtgtttgttatgggggtttagattcttggaaatgtgaaaaggaatataaatccacacctatgtctagtatgatttttgtggagggttcatgtttgtgtgagtcccatctttgagtttatttttcgggtaatcttaaactcttctctatatcctctcaacttaaagccacgtacaactcttaccccaaacaccaggagcaaaaatattaacatgaaacacaagacaatccctcaaaacattaacatgtttgagctgaatactaaattaacttgtcatacagatttcattgtttctcttgatatttatataaatttatcaatgatatatgaaatacctactagaagaagtttaaaatgtaaattttcttcagaattttaatacttctctgtatctcaaagaaatcaaacataattgaattgttgctgtttttctctttcactatgccaaaatgacattttttggattatggttttcaatacaaacaaagtccatttggcccatgtggtagagtagagatagagactattaccattaatgtatatatctccttctgtgaatgtaatagccaatcaattcttcacctgtgaagctaaaaaagacatatacagaatatagagacaaatccactacactacaaaaattttagactatctcggcggttccgtgtgtaaccgccgagattggcccattttaaaaaataaaaacacccaaaacacgcccagtctgcctattctctctctctttctctttctctttccctcttcttctttattgttttccttctccgccgcccacccatctttccctcttcttttccttctgcccactcagccctctctctttccttctttccttcttttccacgcgcacgccatgggagcttggtaatgttttcttcatctttcccttttacttaattttttttttcttgtgttggtttgaaattgttataggtaaagtttttttttggtttgaaattgttataggttttgttttgtttttttttttaagaaaattaaattcttataaacaacaacaagagtttgatacatagataatcctcaatctaataacgattacgatatttttcatattgtataggtgcacttgataatcagcaagattcatttttgtaaaggaaatttaaatctgtttgatggtacaatgacttatttattttatttaataatattatggaaatgttagagaagtttgaatactttagatatttatctatagcgaagtaggttctgagattaaatatgtactgcggtcggatggttggaataatatgcatgttacaagagtttgaatatcttaaatattcatttatagtgaagtaggtcatgcgattaactgcggtcggatggatgatgattttgtatttgtcatgcattattttttgttgttaattgatagatgattttggtaaatgttgtataaatagaggaaactctgccaaattttttaaaaatttatgtgtttttaaatacttagtacttaaattgaaaaattagtttgaaaacttgatagattgatcgtttagcttacttataatatggtttaattattttaggtggctttagttagaaatggataagcaatggatgaaacgaaatagattgtctaaggaatatgaagaaggtgttgagtatttcattacatttgccataaaacatggcaacgaccctaatatgataccttgcccatgtctgaagtgtggaaattttaaaaaattgagtgatgtagaagtaagagaacacctttacagaaatggtatagatcactcatacaaaaattggatttggcatggtgagcgggtgtcccaaccaacttctctaaaaagaactcgaagagagcatgtattgaacaaggattgtgacaatgacatgattagcaatgtagaagaaaattttgcgaaatgctcaaaggacattcttaccgaagcattaggtaaacctgagcaccctggttgtgttcatggtaaaggaatatctgtgtgtcaaagagaggtgttcaaaaaacctctaaggagcacttatgcacaactactagaggaacgacgacaagataatcaagaaattaaacaggcattgaagagtttggaggaaaaattcaattctttagaggcccaactgaaaatgataataagccaatattctcaaactcaatcgcctcaagctcaatcaaacaatgcagttgattctcaatctgagagtgtagatgaaaatcagcctcggtatgcagatgacgtcgaacctaggtatggaaatgagcatcaacttgatttggttgatgatgctcatattcagcatgttgacgacattcgtactctagattcacatggctggtgggagaagaagagaagaagagggaaagagagagggctggctgggcagaaggaaaagagggaaagatgggtaggcggcggagaaggaaaagaataaaagaagaagagggaagagagagagagagaggcatgttttggggtctttttttttttaaaaaaaataggccaatcttgatggttacacacaaaaccgccgagataggggtgccgagatagtctaaagtttttgtagtgactggatttgtctctatattttgttttt

SEQ ID NO: 14399 - DNA, 2645 bp, Cannabis sativa
gtaaaatacctttggaataatggttaagtgcagatagaatcatgtaattcatattcatccaaattggacccctccaatacggaggatcatgctctgtgtttcgtttcatatacatagagctgtaaacaagattagattacttagtactgtggacagaaacaacaatcagggaacagttttgaaaattagcatagaagagtaagactggttttatactcaccttgatctggccagagaacgaattccaaaatcagtccataagatactcctatttgatataagatccagctgctttcccaaaatccatgattcctacaatgagaaaaaagttgagaaaaataaaaaccgagagagattttaatataattctgctacaatatcaattaaaatggcatttatcttttgatgacggcatgtggaactcacaggcggaatgatcttcctcatgaatgggaaaaggctcacatagccaatatgagggaccagtctcaacttggggttttctaaaacttcacgaacaagctctcgacttgcatagttgtttccattcatgatttctttccagcttaaacgaaccttgcataaccaaaccaacaaaaaaaaatcagagcatattttacaacaatgattaagagaagttaatgggacaggagaagttaacatgcgacaccgagaaactacattgaagtaaaagcaatgaatacccttataagcacataatacaaagaaagatgagaaatactaattcattaaaaatatatttgaagactagatacaatatagaggaccccataactagagttcatgtttacacatacattaatggaagaaaggcttatgcattttaaggatgaaaaaaatgttattacaaatcataccttttcagtatggtagccaaaatcaaaatatgcgccgtgtgcatcgtcaaagtgcatctgtacatcaagaacaattgagatgaaaaaacagcaatattaaattaggagcacaattctaagtatacatatagaaacatcaaatgaattccttaaaataccaacaccacttatttaagattgaaaaagaggttaagaaaatagaattgccaaaaattgagaataataaatcaggacaaacctcattcagaattttaaaatctgaaagacgcttggccgtgttaccgtattcctgcaccatattttaatataaaatattaatctggcattacacactagtactagtatttgatacatcaaatgttcactatcatacctttccaaattcatttttctcaaaaagctctgtaatagaatgcaaacaatccgctgcaagaagcatccagcatctaagatccaaatgacgctcatcctcggttgggtgtgaagctcgtgggtaatcatccaaaccagaagaaagtgtctgggggttcccaaaaaaacaagttctgtttaaaattgtcatctttgagaagaaagcagtcatcaaattaagagttttgatcttttaatcaaagcaagagaatgcacaaggatctttgtggcacatattaatcaagacacactactggacaaagtcttacactccaaaatggattgaatcatagaataggaggggatcaattctaagacacaattccatgttgaatttttgttccaaacttccgaaaatattagttaagtggaataggagtcgggaaacatgaataatagagaacactacacatctaaaaagtcaggctctacctgtaatgcctatacctaataacccctagcatatgatgcacacacgatagttcttctatataaacccaaacaaaatcaaatgtaagaagatagaagtcaaagaacctttggatttaattcccgtcttgtcatattatctcttccatgccaatagtagctgctcacttccttccctgtttttcacaatgaacaaaattttaaaccaatcaaatgattaagaataaaagaaatacttactacaacatgaaggacttcagtggaaaaaccaaaacatgcttctctatgtcatgtatgatgataaatatgtcctacaaatgtacataaactattgactaaacagaaaagtttcagatagtcatcacccttaaaattaaaataaagaaagataataaaatgcaatgaagcagcaggtagtcaaaaagggtacctgactgggatgtattgaaccattgaaaccatgcttcgaggcggacaaaagctcgctccaggaatgagattatctcgttgcgctcaacagaattaaatttgttttccttcaaaccatgaatcatatctaaaatttcaaaccagattagattatccttgcatcaaggcacaaatttataaataaaagaaaggaagaaaaaaatgttcttcagaaataaagagataatatttataactaaaaagataaattgctgaacaaatatgagcaacgaagttaatttaaagaaaaatgcagcacagtacataagaagatgttgtgtgtgaccaccaaaatctaatatcgaagagtcagattttaccctataaaagcattaccataaaaaaaacttaaattttcagtgagaaaaatgatctacaagtagactcattgagcagattaatcatttagtcccccgggaaagagaggagattaccatgtaacacaagaaataaagttgg

SEQ ID NO: 14400 - DNA, 3599 bp, Cannabis sativa
ctcaatctctcttctactggactaagtggagaaattcctcctcagcttggaaacctttccagcttggaggttttagatctttctggttcttttcatagcttaaaggtgaaaactttgaattgggttttgaatctttcttctttaagagtacttgatcttagcaacactaacatgagcttagccaatgattgggtgcatgtagtcaataatcttcctcacttgacaaacttgatactgtcattttgttatcttcccaatgtggctcttcctcaatcatctgctatttcccattttaactcttcaaaagatcttagagtcattgatttttctgcaaattcactaatgtccgagtctatattcccatggttgtttaattatagtcgtagccttgttcatcttgacctctctttttgcgaatcaagaggtgtcattccaaatggttttgaaaatatggcttcccttacatatcttgatctcacttccaatgatttagttggaatcattccagaatcatttgggaatttgatttcccttacatatctaagtcttcaatttaatcacttagatgggttccatcccaaatctttcaagaacatgacagcccttacacatcttgatcttagctacaatgacaacttaaaaggttccattccagaaggctttgggaatatggtttcccttacacatcttgatcttagctggaatcaaatagagactcttaatccaaaatcatttgagaatatgacttcccttaattatcttgatcttaatagaaatcgactcaaagggtccattccagaaaattttggaaacatggcttctcttgaatacctggatcttagtaataatactcttgaaggtgaaattccgaaatccatttggaaaatatgcaaattgcgagaaatgaaagcatttgacaatagacttagtggggagttgcattttgctgattcaccctctaaggaatgtgccaaatattctttagagtatttgaacttgaagcaaaatcacatcatgggaccattgcctgatttcaccttctatccctctttgattgacttatacctttcctcaaataaattcagtaaactatccaaaagtatgggtcatttatcaaagttgaagattttagatctttctgagaactctatcaaagatgttttatcagaaactcatttttcaaacctcttcaacttatcttctttggatttatcaactaacatagatcttgctatgaatatttcatttgattggattccaccttttcagttgttctacgttcatcttggttcttgcaagttgggtccacattttccaaaatggatccaaactcagaataagtactttgaacttaatgtttccaactcaggaattttaggttctgttccagactggttatgggatttcaatccttacttgagtcttcttgatttatccaataacaaaatcaatggaagttttcatgattttgagcaaggaatcaatatctcctgggacgacagatcacattttcctgatatagatttgagttcaaatcagtttgaaggctcaataccaagatttttactccaaatagctacttcactaaatcttttcaacaacaacttttcacaactgaattctctttgtaatatcacagactcaaatcatttaatctttctcgatgtttcatataacaaattgtctggtgagttacctgattgttggtcacaagcacactctttgagaattctagttttggcaaataatgagctatctggaaagattcccaactccattggtttcataaacaccatcaacatattgcatttgggaaagaacaatttgaactcagagttgccttcatcaatgaaaaattgcacagagttggtgatatttgatgttggagagaacaaattgatggggccaataccagcatggataggtacaagcctaacaaagcttcgtattcttagtgcaaggtccaacaacttcaatgggagcatacctttacaactatgtcatttagaggatcttcagttgttggacttgtcctcaaatgatctctctaaccaagttccaaattatcttggtaatattacagcaatgaaagaaactggggaccaaaatgtagcaataaaatatccttattcagctactcgtggccgagccggtgttcctttcgatttcaaccgtgaaaatttggtgttggtatggaaaggagcaatctctgagttcaaaaatgttggacttttgaagagcattgacttgtctagcaataaacttattggggagattcctaaagacatcactaaacttggtggactgatttccttaaacttgtcgagaaacaatctaagtggacatattcctcaagaaattggtgacttgaagtctttagatgttcttgatctatcaaagaactatttttctggacagattcctttgagtctctctcaagtggataggcttagcacattggatttttcgagcaataatttgtctggcgaaattcctaaaagtactcaacttcaatcccgtgatgcagttgcgtacatgggaaatcctcaactttgtggaattccacttctgaccaagtgtccaaatgaagaagagacaacaacttatgatgaagcaatggaaaatcatgatggagatgaatttattagcaaaggattttacataagcttagcacttggaattgtagttggattttggggattttgtgggactttaatcttcaacaagacttggagatatgcatatttcaagcagttgaacaacgttggagagtacttggctcacatatctgcagtagctctaaagaaaaagctattcgagacttttaaaagctagttggtaaaaacttttccctctaaagcttttggtgtatactcatattcatattattgaaaaattcgaaagaaagaagtgtactgatgcatctatatttgttttgatatctgaaataattttttagtcaaattttttgttgcaaaattttaaaaaaatttgaaaaaaattgacatggcaaaaataggattcaaacactgtgttgcatgggtgactattttttttatacgtgtgtaaaataaattgtttgaaaactactttctttctatattagaaattatttagaattttttaaaattttgtaagatatcctaaataattataacttatacaaaaattaaaaaaaaaaaattagactatttttttttttaaatgccgaaataagtagaagatgtatcaatgtatttattttaaagacatacattatagaaacaccttatattatttagtatgatgatattgaataagttttttttttttttaacacttcaacattttttcttgtgtgcagtggttgcgttcggttttaaagggtgtacttagagttttcttcatcaaatagtaagtaacctggttggtagtttgtaatattatagagaccagttaacttgtaatcttttatttctttctttcttttgaagattaatctgagtgttttgagtagcttgcattgtaaatgttattattcatgtctagcaatgtatgatagcataaattatgtagtttataatagaggagaggggagcactagtttatataagtcattt

SEQ ID NO: 14401 - DNA, 9592 bp, Cannabis sativa
tttcgagaaactgtcaagaaatatacgaacacatagaatactccacaaaatgatatctcgcgattttagcgaaaattatattaaaaaaagggtaaaatgggaagttcatgtaatcgaaggaattaattggtacaaattagtaaggggagtcaaaattgatatggggcattttatgaatcgtgaaatttccctttgctaaatggagtggtatatggtgacttgattcctttaagaggtatacaacaaggtgatttttttttcaccttatttttttccttatttgctctaaaggtctctctagacttttacaacatgaggaaggcattggctctttacaaggtcttaaagtatccaagtttgccctctcgttgtcacaccttttctttgttgatgacagtgtactcttctgtcgtgctactaaacaataagctcaggcaattaagcgatcgttggatacttacagcaatgcctctagccaagctataaaccctaataagtgtgttctctccttctttgacaacacaagaaagtaagatcaaagatacttccaagaactttttggcttgccaattcaacgttgtcatgaacaatacctcgtgctcccctcttttgcaggccatgaaaaaatgaaactttttagtggtattactaatccaattcggaaacttcttacctcatggaaagagcagctcttctcaattggtggaaaggaagttctcttaaaagtagttattcaagcaattcccacatatgccatgagttgtttcaggctcccagtcactttatgttgccaaattgaaagcaggattgctaggttctggtgggttcaacgtcatttggtaattccattcattggaaacattagaatttcctttgtaaagacaaaatccatgttggattaggctttcgaaatttcatactcaagctttcttgactaagcaagcttggcgacttctggaatttccacattctcttctcagtagaatacttcagcaaagatatcactcaaatgggaattttctagatgcttcacttggtaattcaccatctttaacttggagaagcattgtctggggtgaggaattactacaaaaaggtttaagatggagagttggtaatggttgtgatatttgctgcaaatcaaatccttggatactaggccatacgtgcttcactccttttttactttaaaggagctaacccgaatttgattgttgccgatttgattactcagaatagacaatgggacctagtggcattgcaatcaaattttcccaagctgatattgacagaattatcagtattccactgtccatttttccatctgctaatactttgatttggaattcttcatccacagtttcttagacagttaagtcaggctattcttttgttgttagcattgttgatgctgatctaggggacaacagtagctcttcaataactgatcactggtggaccacattttggaagccttctcttccttctaaggtttggatttttatgcggagaatttttcatatggctcttccagttgctgcagagctccatcgaaggcacattgctattgatcctatttgccctctatgcagaatacatcctgaaacaataactcatgccttatttttctacaacaaagctaaggaagtatggcgtctttctagtttaagtattgattttagtagtgcttgcttctcattatgtgaagattttctgctgcatctctcaatcaaccttcctacagcacaattcgaagagtttattgttctttgctggtgtatctagtttgaaagaaatgtcgaataccatggacaagttactaaaaaagcctgttgtagtgattatgtttgcatcctcatacctcgttgattacaaatcaactagagccattatacaacaccatgaatcgcgcactattactggagctgctgaattaggtgtacctcttggcagacatcctaagccaaaatggttagctcttcctacaggaacacttaagctaaatactgatgctacttttgacgaatccaaaaatagtattgcttttgtttcttatttgtgctgaaggattgtcttctatggtgtgtaaggcctcttctagggatttgcttaatggttttccatatggcaagttaggacatgtgacctctcatctcttttctacgaatgagttttcttcttcgatgttggtaaagattgtgtggcttggttcaagaatattccctttaattctggcaaagcttatgggcaaaaggttaattttgagaaatatgccatgtgtatgtgtcctaatgtaggaaatattgagaaaattttgctagctatgtctttgggtcccttgccatgagaaatatttggggttcctttattttgttgggatagagaaaaaagagtgtaatatggtattaaagaggaggtgtgcaaaaaattatttagttgaaagaacaagttgtattctatggggggcgtgaggtccttcttaagagtgtgatccaacctatccccatttatgttggaaattgtttatcaaaattcaatatttactaacatgtatgctgattataattttataatctaacaacctaaaatgaataatcctaaaaagattaaataaacacatataaagttaaaaaaccttacaataatggcaacgaaatataatgtcttcttccatttagttctctactcctttatcctttctgttacagagtattatcaagaactgaaccagaatattctctcctccgattttgttcatcacattcttccacaaaggcctaagtatcaacttgaatagtgtggactgatatttgaattacctttgaaaaatattgagactaagttttggctagtaaattttgaaatagaagaaagaagagaagagaaaaagttacctgacattatgaaacttaggttaattttctcttctcttcactttctttacataggtattcacttagggttagatgtagatgagatgggcttaaaataaagactagggttggagtctaactctagggccaaattcctcatgggctttagagttagatttttgacactttatttcaacgaatgaaactaaagtgtcttttctaattttagcacttatcttatctaattatttaaatactaattttattttcataattataaataattattaaataaaatacaatttaaatatatttattaattagactcacaaagagtactaattaatagataaactcctatttattttttcttccaaaaattggtgaaaattctcaaataagatgtagtttatttttcgaattctaattggacttgataaaccaattagttgagtccacaagatgatatatctataacaatgtggggaccatgggcctatgtaaccaagctcctaataagcagatcttaaaatttaccgagtaaatttccaacttagaaattcttcctgcctccactatagatttagaatcacactcctaattacatagaacactttatacacaatgtatagatacactatgaatttatccattatttcaatcacaagaataatttatcatctatagatagtttacatgaataaagacaaaattactgttttacccttcaatgtattttatccttacactaagctacttgtcaatggtatttttggaaactaatataattatcaaaatgagtgctccatttattgcgttaagccaagctctaaggaactattatttcacttttaataaacatagaagctataaatgttcatatcgataatcaacactcccactcaattggactactgggttcccaagatataaatattgagttggttctatggtaagctggtaacgaacaagtcaaagaacttgtgtaatacattcaaactagagcttaaccatcttaggattgagatcaaatactctatgatgaactaagtgatattgacttagaaaagatataatagtaattttataatatcttttccactgtcaatatcagtccagttcgatgtatagccgatatattcaatcctagtttactttactaatgtcttggaaaataaattccactaaacttagtttaagcaaattttatcgctgattatcacgttagtataaatccagtacactcataaattgtgggactaaataatttaaagcatataatcacaattactctccactgtgatgacatcactgtaattgtgaacaactatatgttcaagatttaaaaaagcttatatattaaatctataatcatgtataaaacatgtgaacaaagcctatgacaaggtctagatgtaatttctgatatttattgaaagtaaataagattacaataaaattggttttattttagggaataaaatcccaacaaactccctgttatccatgttttcatgcaagacatggcacatgacatttaatggaaaaggctcaattgatcctcttgagttagagtcctttaaaaggtgcacaatcgcttaaatgtttccacgagttgaaggatcattctgagcagagagatacgcggaaacatgctcgcaatagtgatttgcttcctaagaacgagataagaaatgtctctcccgaacccaaaagggcctagtagaaaggctcttttagggtggctccccaaatgtacaccagagatacccatggcggataccgaccctcatgggtgttcgtagatgtcaacttttttatgtgtcaagtcaccaaagtgacgatgatgattttcctgacaaaattttatcttgtctcctacatctagacatggcagtgcatgcaccaccaccatccttctaccatacggatattacagaatactgcttagaaaggagcaagcttagagtggcatgtgtctgttgctttgaaaggttgaacctttgtgtgacacatgtttgagtagtacaaaatggtacccattgtccagctacagcatgcacgagcataatgttacccataggaccaaccatccaactctatattgtatgtaatttaccccaataatgggatttgaccagagatcctaggcgagttgtggggggacccacatccatcacttagcctataaatacccccttaattttcatgaaaatgggtcaagcaaaaaacacaaagcaaaaactttgttaaatacatccttgatcttcttcttctttttaaaagagaaaccaaggataaagagttggggtttcctgcaattgtaaactcatcaatggtgcccctcgagcccaatagatggactcgtggactaaggttaattaacacttgaaccatgtaaaaaatcttcctctcttaattttttccatttactatttctttaactcttaaatattctaattttagaatatcttgataaatattttggtgctttcattgatagctaaagaaagattaaaaccattgttactaccatggtatccacatggaaaatagttcataaaaggacttctcaaggtagcctcaagatgatcacggaggaggtaaaccccctcttgccggagcatgcccaaccgagcaatgcgagatgtagggctacatccaacgtgaatgttccagaggaggacctaaacaaatagtgtgaccatgttggcaatgacaaagatattaagaaccatgaagagcaagaagttgatgatgagggttgcgtcaaaaatgggttttatgaagacagacactgttgcgagcacgatccttatgtaacaagagtttccaaggagttgtttgaaacttaacaaaagtcggctcgttaggaaagattctctcgaaagatggaaaaaaatgttggactacctccaaagtaagctcagagatttagacgaaggagattctaatgatgatccttcgatggaatatgttggaagaaacaccaaggagaaccccactggcgttagaacctctgctcctttgtaggacaagggaaaagcaaaagtgggtgatccaaaaaactcttgtgcccctgagcgtcctcaaaaatgcaaattaggttgataaggcctttcaagtatagaagatagctaacgcctttgggcttggacgtccttcgacccagaaagttcctgtggcaccgaaggggactagtacgaatgtacccaaacttaagggaaggaatgactgccctagtgattcgataaactaggatgatggggcagaagaatagtactctgataatatttggtccaccctggacctcagaaggcatttagacgcaaaatatgaaaaagctaagagtgagaatgcgaggtcacatggtaatgaactcagaaaccacttaaaaaacaaggtctgtggaaaggatctcccaaacagtgacacaaaacgattagaagagaaaatagtcgccttaataaagttagtccaaaaataaggggaggccctcattgattcgaacgatgaagacctgaaaccttgcatcaagaggatcatggaagcttcccccagagaactttgaaatgccacaaattgagttgtacgatagacgctcgtatcccaagactcacttagccaagtacaataagatgatgtaggtggccagtgtgagcgatgatgctaaatgcttgtgcttctcattgaccttcaccaggtttgtaaaagactggtggaaaaggctaaatcctaaaaggatttacaatcgatagtctggaatccgttcatagcggtccgagtgtatgacttggagatggggtccatcaccaatatcaagcaacaagtaagggaaatcctaagaagcttcatttagagaatgatggaagcggatgccaaaactaaggtaattgatgatatgaagcttgtagccttccaatttgggctcacagctggctccctgatatggggagaaatggaaagaaagagagccaaaaccctctttgaatttatggcaaaggtacaaggcttcattagtttagaagatgcttactagcaggcatttggggtccctctggcaccaaccttggtaacctcagttctcgaaattactttgtctgctcccgttctaggaacacagtatgcccctatgatctacggaccttctgtgtccatgcccgcatcaacataaacccatctctttgggtacgaagcaactcagactgggtgtagtgtgatgactcctagataataaaaagtgtaggcaccagagcaaaacctgagtaactcccaaaataagagaggaggaaaagattcgaaacaaggagaggcttcaaagaaatccaagaaggagtacgatcctaaatacattgagtacttcagtcttgtggaaactcataaaaatgtatacaaggtaacatgtaacatggttcactataggaagccccttagaatgccgcaagggggaaaattcaaaaaaaaaaaaaccccaaaaaatcgttgtttataccacaaagacgtgggacacaaaaaatgagtatgacttcttgaatgatgaaattgaaacgttgataagagcaggagatttggggaaatgggttaagattcccatcatatttttggacagggggtcattcacagacaggtgaatgattctgaacagcaggctactgcaaattctttgcatggagtaagtcaccctcaagttctcggaacatatccttcgacactccccgctcttccaactctagctgcggtggctttgatggctctgagacctatacatcccctaaggctagcaccaccactagttgacaggcatgtggtgacgatctcaggtaggctgaacctcatcagaagctccaaaaggacagctttcccttttccttccacaggagcagatggccgagcagggatatcaagttccctaatcctgatagcgtgttccactggtgcttggtcggttgggggagccttcttcttcttcttcttgctcgacctctcttgctctgaatattcttgagcatactgcttgggtctgttgcctcccttcaacttagcctcacgcttgagttgaatgagctctttctcttgctcagtaccaccagtccggtttggcttggcctttttcttgttctccttcagggcctcagcacaaagtcctctaggaagagattacacttaaaaaaattagcttcattggccaaccgagtgatgttccgagcatcttctggaagttgaagatttttttgtgccctctccctaagtcccaatgtgaaaggagggcagcagtatgaaggaatcttcaggaaccaattgtggacggtatccatgccctgaacgaagtactactcattcgcaaaatgtcctatttcgctgacatcagtgtccacagttcccttcaaccactcctcatccaatttagagaagtataagtacgccaacctactctgctttggagttgacttcaggtcgaaaaaccagttggtgtcgtgcggggatggctcaccccgttcttgcgaggcgtaaatgatgaatagggcagataaatatttaatgcccttcggggtgaactaggtcgggttgaggttgtagtaatccacaatcctattgaagtatggaagcaaaggcagcattgcaccttgcttggtatgaggatctaactaggcacaaaatcccttccttggactagttgcccggtgatttggagaagggaagaagcattcaacatttccaaagtagttgtgcttttccaaattcttcatcttggcttgggtgactacggacgaaggagaaacccaccgagcttttacggcaccttgctttctttaaggaactgcctcagtgtattcctcagtaacatagtcctcaccctctaccaagacttcaccggcctcgaacacgggttccccttcctcattgtaacttgcaaagggaaatctccaagcaactccctcctcctcagcttcagatggagaatcaagacatgcctcaccttgatcctccacctcttggacttcaatgtccccttcattgtcttcctcctcagtagcaggctgggcatgtttagtgcttggcatcatggaaagccgagccacgtgaggatcagttaaattagttttctacactgtctatttagcgcgggccatgattctatccctggacggcatttggttagtgtgcctagcaatggtcacagcaaagttggctataagtataccagcagcaacaggttgttggtgggtccacgagtatagtgtcaactatatctgcccggacgatgtatgtctagctagaaggcaaatatcgcctccacccctacctgagctcccaaatgaaacatccatagccctcacctacgatctagttgggataaaaatggtgtttcaccttgggttctagagagggtgtgtgttcgttgcttatctcccaatcctcaaaactcgagttagaaagactgtcacttgatgaggatggactagcacaaacatgagattgattcttgtacagaagttggagaagatcctggtcgatatgatgttctcctccctaaaactcactagggttcatctacaaaaggtaggacacaagatgagtatttggtcgggatatcgaacaaaaacaaataacatatactgaccaggtccaatcgaaggattaaaaggaggaattttccatgatttaggtttatcacccagaatttcaagacgtcaaattaagggttaattttcactaaa

SEQ ID NO: 14402 - DNA, 2939 bp, Cannabis sativa
aaatatcataaaaattatcgtatcctataaatattagttagtatgagtttagagaaaaattgtaaacacatatacattatacaacatacaaaatcaaatttccctttacaacactatgttgtatgcttggggaagcaaatctccttaaaaaaaaaagttttaaagcagcttaaaaaaaataaaataatcggggctggttcactaacgataaataaagagaagagactcccgagtctgcctcttctctctctctatctgaaaaacctaaaactcttttgtccctcaccgccggatccggctcaggctccggcttttctcgcggtcgagtcttattctgcattttctttctcgttgtcttgcgccatcccccctcactgtaagtttttttttttccttctcttctgttttaattatggcttattttgtatatccattgtcttgatgggatggacattttggttttgtcgaacgtgtatggatggcaatggctctgtgatttaatgaagtttcatggaattgattattgctttgctggaacaattttttcttctttctttcgtacttatttcattaaaatacatggagtattgctcaaataaattgttgaaactactgtaaagttcactgagaaaatcactactttcattcgcttgcttttaaatcttagaaacgaatgaatgctatgattttcagtatgtgtgcatgagtctttgattcagtcattttgcatgtacatgaatttcttccattttgggcctccaaccttagacaatgtcaattttttgtgacttctggtttgggcattgagtcccccctccccccccttttttttttctttctattcgatgagtagctttttcttccctaaatcccagtgttgacaggtgctaaaagtaagaaaaatgtttctgaaagtccagttgccatggaatgttgtaatccctgctgagaatttggataccaaaggattggtgcttcaaaagtccattatcgtccgtttgcttgatgagtttgctactaagaaagcaaccaaagatcttggataccttcttgctgtgacaactctagaccacataggagaagggaaagtaaggcaacactctggggatgtgcttttccctgtacggttcagttgtatcagtttcaagattttcaggggagagatagtggagggtgttgtacacaaggtgctcaagcatggagttttcttgaaatgtggtcccattgagaatgcttatctctcttctcttaagatgcccggttacacctatactgttggggaaaatccagtcttccacagtgacaagcagcccacaattgagaaaaatgtggtggttcgggtcattgttatagggaccaagtggcttgaagctgaaagggaatttcaagctttggtcagtgtggatggtgattatctcggcccccttgacaaggagtcttgaagattccttttatcttattatgtatataaactgttacatgttgcagctaattcctgtagtactactccttaacaagtttaactgtaagattttatatagcatgcaatatttttgtggatcgtgactgtttgcatattttaattcttgcttgcgtctgtttctgtcttttagttaagttgtggtaaatttgaagttgaacactttcttgctgtcatagttctgtagttgaggccttagaatgggaaaggattatatatttgacaaaccttacaagccatttgagcagtgtgtctgttcattacgttctttgttgtttgagtgtcttgagaccaaaatagtgcaattttttttttttttttctaaattgcaatttaggtgatgatcaagcttgaaattggttactcaacaagctacttttcttaccaatagaattagagctgttcttggttgtttgatagtactttacattgacaattgatgatacaaagttgaattctaataagatttgctagttgagtaaaggacttattgtgtaatatgaaacatagtggctggttctgggaggggaagggatcaaatcgtggaaaaaatagatattaaggagaaagtctctagatggtattgacaactatatttcttttgctaggaagagcccctaggaggggcaaacagaactgagataaaaacgaacagacaaaaaaaaaagaagagcatttttggacattttaattatgctgcccataatgtggtcaggtggacttttgctcaaaatctttctagtctaattttagttatctataatacgcctttatttcggaaggagaaaaacttgtcaatgctgaaaatgattgtaagcttggcaggagccattttttttatatatatatatttataggttttgaatgtagtatctcttttgttgtggttaatgtatagtgtttgccgaaataatctagataatattattattagcgttatgttatattttgtgtatattgttgttacttgaactatgcttcttactacttttgcaaaccaaatgtataaaaggtttgtgctgattggtctttcttttgctcgttaagcagccactataaaatatattgcttgcattggcctgctaacttctacaatagaagttactcagattgaacttctcccgttttagttcatgattactgggagttttaaaaaataggatggaataatgaacagaggaaaaaaaaaaccctcatcaactttaattaatacagtgttactagcaaataaattgcagtcaatttatacttcaggccagaagaagaataaactgctgcagacattgcaaaagtatcttatgttgggtgtgagatagctgctgggtgtcctgtctgtcgttgtcacaaatctatatgtttgtacgactccatacataatccttaaattcatgttttttttttcatatctattctatataaagtgtgcctgtataactgaattattggtttatgagaaatt

SEQ ID NO: 14403 - DNA, 4311 bp, Cannabis sativa
aaaatagagtatgtatacgagaaatttagatcctttttctcacatacataatttcaaagtgcatatcgatcttcaaggtattcaagatgattctcaatgccagatctttctagccacgctgttagaaacaacaaaacaatagtatatcaggctttcttcaggatctattgattcttggggagcgcgtgcaagggtattctatgactaattctcaccatcaaggcacatatatgagcccaatgattccatctgcattaagcaagagcaagattagtctttaaagaattacctacaatgattcttagaggaatccactcaaatgagggtacttagtaaagatgccaaagtcatggcaatggcggtaggacttggtgctgtgagtccattatggcagaacttgaaacttaaagcagtgtatatttttcaagaatttcaagatagagttgatggttttatcaagctcgaaaaggccaccaagaaggtcgatggtgttgatccactagcagttgcccattactctgtttattcactttctgagtctcgaatcgacatttatcaagaagaggaggagcgatcaacatctagtatctccactgaaccagattccccctttgtcttccaggatgacctgagcaaggggtagcaatgaagaatcaccctttgcttttgaagatgactcaaagtaaggggcaatagcaagggtactccctttgtttcctatgatgaccaggaatagggggcagtgaaaagacgtttcctgtaagttttaggatgatattgagcaagaaagcgacattaaggactcccaatggtaaaagagagaacctcatgttgtcgcagaagcgttagtatcttgaagatgcatagttggtacgttaatttttccaacttgattctagtgccagtaccaagacactagaccgggaagcatatgagacgatccataaaatcacactgttcttcaatagtccactttccactttgcaagtagatgagaagtcacctattgattcgaagagacccagtaatctctctctattcatcaattagatccacataatgaatatatgatggtccctacactagggtagcgaataagctttttttgaataaacgaaacatgtgttgctgcctcacttatgtttttcaaattatttagagaccagtgattgccgtctcataacactagattgttaacataaatgagacaccaaagtgtctaacaccactatgagtatgaggtgacccctataattagttagcggtttttttttataatttttattaaagtagaattagtaagacttgatactaaactacaacaatagtgatattacatctcacaagtgtgctagcctactatgcattatgggtgccctttaacattactatatatatatattttgatagaaattagtgtttggagtagggaagcatatggggcgggaaatcccccaatttaaaagaaaatgtaaaaatgattcccgcctcgctttccatttagacaaaaaattatcttcccattaagggtaagtccttgcaaacggggtccgccaccttgagaatctatagacctaaacgaattaaattttgaggtattatgagattcgaactcgtgccattatataatatattatatacatcaatttactaagatatgaatatttattttacaatgtacttaatttttcttaaataaaaatctaataaaactttttattatttattttatgtctccaaacaaaaaatataagctctaagtacgaaacccattccaatacagattaaaatatgtatgtctattttggaatctaacaaaatgttgaaaaatgccatttatttttcaacacacaaaaataaaaataaaatcacacactaaaagagtatcagaattggaaagatgcaacacacaaacatatgaccctacaattaatggaaacttacaaaattacactaaacccaaaggtgagttcatgtatgccacttgttacaatagctataaataacaatcctccatttctagacccttcatttcctatcatcccacgtgtcactccagatattctcatttcttcttctttatttatataccaacccttttctcatctcctcactcactcactcaaaatcttctactcttttttttttctcacaggggcatttcagtaatttaaacaccaccaccaccatcaccatggcaaccatggcatcatccactttcacagcctctcctcttaccaagtcctccatcttcgacactagctccttccatggaacaccagtggctccaccaccctcctcatcagttcggttccaacccaccgttaaggcgtcgtcctcctccgtttccatgtcatcaactggtggttcgaaccttccgtacgacctccagaacttccggttcgaaccgatcagagaatcgatcgtgtcaagggagatgacgaggcgttacatgatggacatgattacttatgccgataccgatgtggttgtggtcggagctggttcagctgggctatcttgcgcttatgagctgagtaagaaccccaatgttcaggtggctataattgagcaatctgttagccctggtggcggcgcgtggctcggtggccagcttttctccgccatggtattattatattattattattctaaccaaatatatatatatatatatatatttttgtatttattagcatttatttatttggtttaattatgaggcatttattacgtggcgaagtatgttatcttttttattatattttatttagaccacctgagattgatacctaaatatactatattaaaagatgtacttcaaaacaaatttttgtgtttaattatttatttttttttttatatacatataaaattcatgcacaatttctccatgcagatgggggatccaaatagtcagggtcagccaatataacggggccataagaaaaaaaaaaaaaaaattagattcttatatagaagaaaatgtagtattttttttaaaagtatgattacatgaatcactattttttttttaaaaaaaaaaaattacatttttatgattttttaaataaataacacaaaaacaataataaaactacataaaattatagtaaaaataatatttaaataacatcaaaacaacaataaaatataacccccagaataagaggagtacaacataaaaaaaaaaatagtataatcggtaaataaaattggaaaaatatttaaaattctctctatttttgtaatttttgtgtatttgtgaaataatctcttttttaaaatcagtaaaaaaaaattgtatttttgagcctagcccgcctatgttatagagttaggcctgcaaatagggcaagaatctgccatcaaaatggagaacaagcggggatggtgatcatttttttttttgtttttgaatgttaagtgggatcccatctcctccgccatgaggaatattgggaatgggatggacactcctcgttaatttctcgtcctgtgtgcatccttataagtttaataataaatacatgtttattttttttattattgttctttttgtttttataaaattcaatcaaactcatagcatcatgtggttagaaattttcatggttttgtcatagaatttttctcgaattttaatgtggtttttccttttagtgtttgagttttgggattaacttgttgagatttgttatatattagattgtgaggaaaccagcacaccttttccttgacgagcttggtattgcatacgatgagcaagacacatacgtggtgatcaagcacgctgccttgttcacctccaccatcatgagcaagcttttggccaggccaaacgtcaagctcttcaacgcggtggcagccgaggacctcattgtcaagggtgacagagttgcgggagtagtgaccaactgggctttggtgtcaatgaaccacgacacacaatcctgcatggatcctaatgtcatggaggccaaggttgtggtcagctcttgcggccacgacggtccttttggcgccactggtgtcaagaggctgagaagtattggcatgatcaagagtgttcctggaatgaaggcgctcgacatgaacgccgctgaggatgccattgtcgatctcactagggagattgtccctggaatgattgtcactggaatggaagttgctgagattgatggatcacctaggatggtaagtaactaattcttgcccatatttttatttaatcatcaattaggaaagatttattgtctaattgtgaaataattctgtccattcattttgttgtgaccacttgatacttta

SEQ ID NO: 14404 - DNA, 6362 bp, Cannabis sativa
ccgccgcagctgctgcggcggagagtcttgcgctttcttcggctaaagcatcacaaaaggctctgtgggttatgaagctatcctttctgcgtaacacaataacatatatatcaatgaattcaatcgtataattaaaattggtgatcacttgaaattattgtgttcttgcatgtgatgcatggaagcttacttaccatagaaaaatagtgatatgaaaaaaaaaaatgtttttttagtaaaaaaaaaaaagaaagttaaagtgtgtggctcagctcaatgtatatttggatacatgatgtcataaaggaaatggcaatgggtaatttttggtaaattgaatgaaacattaatattggtaagaagtgtactgagaaagtgggaactcgtgcatggaacacactaaatataaatataaccaatgaggaaaaagaaagaaactcaaagtaaatgcaaaacctagactatatctaagtctaagatatggatattcaggtcaggaggctagctaggaaatatttctaaagcaatatctcaccatatatatatacaatcagaaatattttcagatgttatcagttttcataatgatgatgaaattcagagagttttgtctgtgcgctctgcatgtattaataattacacttgcactatatacttttacaataaaatttataaataatattatattttttttgtgtcacgggctggatttctcaaccatttacataccaacgaaattaaccccacaaaagtaatcagtcatattgttttttttttttttggagacaagcagatctccatcattattttcgagactgcagtcaagatcttgaaatgtactctagctagctattaaagaaacaacttatttctcaatattaattaaaatttgggtggattgagtgtgtatacgtatatggcgaaatgcatgcttaatatatggaatcgaacgtatacaaggactttgaaaattgagagattaattaacatttataatttattataatatataatttcttttaattttaatgttattattttattttatttccaaaacacgaaaatgtacagggttcagatattattccagagatatatagctttcggttcctcttgcaaatgttctcagttttgacagatactttgagtttagtgttgtctatttcagagcaaacagatatatattccatgcaaacagcttaccactcttagctaataaaatattataattaccaaacaaataacctagcacataaaaatttccatatttgacaagaaaagaccactattaattttgtgttagatggagagagaaatattgacgatcatgaaaattaaaagagggtatttttgggtattgaaaaataatgtgtacctggagaaaagggttccacagtcacatctatactctctggtaccacaggtcttagagtgagccttccaatcagattgaacagcatagatcttagagcatttttcacacttccacttcttctctccatgttttctagagtagtgtttctttatacccgttagatctccaagagcccttgaagggtggtgatgaacacacgtggtctcagggcaaacatatgctctcttcttgatcatctctttgttgctcctttgtttaagcttccatggaaggttatgacctcttctgtgtagctgaaggttttggtctctctgaaaacctttgttgcatatctcacacacaaatctatttgtggctagaagtgtctttggggataatgcaatcacttcagcatctgggtctaatatagtataatcataattaaggtcagaattaaattaaaatataacattaatatgtaattcaaatataatattctataaatataagtacctgggtgtccagggagacttcttttcttcttgattttctgtggttgctgatcatcaatactaataatattattgttattattattattattaatattaatattattgtgatcagaaaagtgtgaaagtagtggattattattattgttattattattattaaatattcccccaaaatcatggagtctagtaccagaagaaatactagcagcttcctcagacaaattagaagttgaattagacatggttacagaaaacattgcccttggaagaaaactccaatagagaaaaacaaatcactatattattttttttataataaaattgaaaaaaaaaaaaaaaaaactggacctgagaagtaaagctatatagcttgcaaactagctatgtatacagatcgttttctctcagctttataaataagaccttttttcttcaagtgtgtagtattgccccacttttttacacctctcagaaaataacaccaaaggaagacacaaaataatcggagctcaattttggactactcagcggaccaaaacaaggattatttatacatgaaagatcatcatgatcatgatcaggtggcagagcataaggcacacataaatatagatatatagagccacagtctactgggtggtaaatggtaaaaaagtaatatataatatatatatataatatataaatataaaatttaaaaataataataaaaaaaatctcgtgaagagatgatgatgacgggttatactccaaagtcgctatctaggccatggataatattgcttctctgaacagctctgcagcacaattatctacagctagatcgatcatcgtttttatatatatatattaaatatctctctcttctctttcctttaaaactcaataatacaaaaacaaagtaatatataatccaaacatggatagaacagaaaatcagatatatggttattgctctcttgtttttttagaagtgtttaattttctctgagtgctcagctgggttattacctcttcacacaactgatcaatatttatatatataaccctatccttttatctatttatgtagtacatatatatatagagagagagaaagagagggaaaaataatgatacagtactgagagtgctatgattacagtggcagaccaaggaagatagattttagaaagtgtatgaaggaaaaaaatttctaagaattttttgtgaagggcagagaggtgggtcgatgatgaggaagaaaagatgaggaagaatcccaaaccctacttcttgatttttttatttcaacaaatttgttaattatgttttttgttatattatagttaatttattgatttaaatatttacttataattatttttttcttttcaattctgacgttgtcactttctgtcttttcctttgctcctgtaataaaatacccaaactctaaaaggccgttgatttgaatggaatgatataattaaaagaatattgatttatttacaaataatatatataatatagttttgttttttttttttgctaaaaacaaatatacaatattatgcatatattaatatatgacttattagtaatataattaccttgataagcttaaaaagcttgttgttggggctggtaaaaaaggcagagagagataattattattacatggaccaaccttataataattctcatgatcaacctttttctataaaaaaaaaccccactaactatacaaatatgtacatgattgatctattgattgtcataaacctcacattactactttaaacattagaataataaccaaaaacaattatgtgaataggatttacttttgtactttacttctaaattacctttcttcattgttattagttttgctttctcaggaccctccatatatatccaattgcatgcagaaaatgtatattaataataatagagttaataattattagcaaagctggggctagttacatgttttattttcataaaatatatctttttatgtacatgtttctatatctcctacaaaaattgtcatttctttaatatattttaattaaactaccttttgttagtttaaattgttttaataatatgtatatatgtcataggtaatataaattacccatcaaaaggttttcttttaagagaattggtaaaaagtattattgttgactaacacttttttcagtgttatactgttattggtgtaattaattaaatatcggatacgataaatttaaaaaaatatcgctaaaatgccacttataaaagatgttggacctaccgctgatatccaataacattaatgcttattttttaaactaagttgacattatctttgttaattattaattattctacagttgtggctttcccctacctttttgtctctcttttaatttgagttgtgttatatatattctactacaccctagtgtacaaaagttctcaagcaaaccccactcaagggggaacttgtgaaggcctcttctttttatttttatttctattttccctttttctctcaactttatttattccaaacccaaaacgaaagccatggagggagacaaattgtcctctttgtcctcctaacactaaaaaaactagtaaattgaatcaaaacatcttcaaattttacggttatattagtattgtctctgagttggaaaacaattgagatttatatatattatacatatttatatattctctttacgcgtgagctaaacaaaatgggcagcaaagcaagcaaccatgcaaaaaaccaatctataagaccataagcgtgtaaggaagggcataggccccatatgccttcacatatataaataagtactttggtgggctatacatatgaatgtgatgccacatgatgatatatcctctaaattctaataatgaatgcctctttatttatatgtatatatatatttaattatgaaatccttttgggaatccaatgtgtggggttctctctcttttttcatctctagctaatatagctagctataatttagtaatcttttgaatatacatactgcgcgcaggagagctttttgagtaagattcatttgttatctctattccttgctttttggataagatgatgaagatttatatatattcttcattttaatttttttctcaactaccacctttacattatggcaaagagattcggagtgcatatatattacccccaaaatcaatatatactatttaaaaacaaaaaaagaagacacgtacattttactaagtgaaaattattttgggaaaaaatatttattttataggtcgaaaggactaaatgatacaaatttttccaactatagtgtataatattaaacatagtatcgcaccgcaaaatattgcatcgctgagtttaaattttctcgatcgaactgggtataaaactaaaatgtatatatgtactttcactcgtatatatataggatgatatggaatggattatggatcattaattgtaagtatcgttcaattttttatacaataacttaaattttacagataattgtctccattaattgttctctgcgtataattatacaacttattggtcattaatttgaagcttatatattattgataagatataggattcggtacgtaatacaatatcatttttttagggagttcgatccattttacaagctagaaaatgttaaggaacaccttgtcaagtagtggaaaaaaaaaaaaaaaaaactaattattataaatttcacaatttgattttataaataatatgagaaaatatttttttttacattatggagagaaattttaatttaggacctcctctttataagattataagaggagatgtggaaccattaaactaagtttatgaccctatatataaaaaatgttaaatacaccttaattaagtacgccaagtagtaaaaataagagacttatttcaatataaatctcacactaattaataaataatataaaaaacactattaattataaattaacacgtagatgtgattagatatgtcaaataaaatattaatattagcaatactcatttacatgtcaatactcaatcgtaattttacattatttcagaaaagaaaaaaaaatggaaagtacaggtgccccatgggaataaaatttaattttgaaccttattacttgagggaactgaagagagcacatgaagctaatgatataatacacataaatatattctgtttagtaacagtagttggttgctttcttttgaatttgattttgcttattacagttgtctgtttaattttctgcatgcagagagaagagaccattgatcatattgacgaatgagaaaagaaaagaaagccacgcgggccatagctgatcacgggtttttctattttgagattctctcatgcaatagtagtaaataataaacatactatcattttgcttatttcgaacccataaacacccatctatacattcaacttcctttatttatt

SEQ ID NO: 14405 - DNA, 5663 bp, Cannabis sativa
  modified_base (695)..(700): a, c, t, g, unknown or other
agcttaaggtctctgttgaatgcaagaaagtttaagcattccttcagtgctttcttctcaattccctcccccttgttttcaagactttcataaatttgaagtattttgtggtgattataatgtgctgaatagtacatatttgtgtgtaggatttcaatctaggattaaattaatcacttaggattcctaagcccaagattgatattattataatataattaatattagaaaaacaattagtctctcatatggtggcaatggtgccaaaagcatcttccctttctctggatccatgaccaattgttgtctccataactttttgaaaaccagcaaaataagtgaaatctgtagtgtgtgtattcctgtatcaggaccttttttctcagtctcagctcagtgcttaagtaatttttatattttttttatatatataaaaaatacgtaattattaaaatcccttttggccatatgtacaagaaaaaagcagcaagaataaatggtggcggaatagtgtttagtgttaatattataccttttactaccaaaaaaattcccttttcttctttaaagcaagaattcgtacagaaaaagcacatcaacttgtttttctatattttgttgattttttctcttttcttgaggtcgaccatgttaaatttttcaaaatctcaaagcttttttattttttttatttnnnnnntttttttatttttttttttaaatccagtcaaaagaattatatatatataaaatgttaaaatctaactcataatctcatacaagggtgttgtgttgtgtgtgttgaagtaacatgaaaaatgtgttattttaatggtaatatattgtttagagaaagagaaaaaagagtactagggtgacccatatgaatatgaatattaataaggaaattggactttacatgcatatggtaggttaaaattaataaccaaaatttaagttacctaatattgatgaaatatgttaaaatttatgtatcctctaaaatatttctctcattttaaaactttctaacttctctctaatttccttttgctctttctctgtctttcccttttatgggttgagaggattggtccaaattccaattagttttttagtgggtcgagtggtgttggatggtggcagtagtcttggatggcggcgatggtcttggcagttcggttctcttgaagagagcgagcgagaatggaaggagagaggaggcaagtgagttgaaaaatgagaagtaattttgggttcaataagaaactgagctaatctaataatatgaatagagaagataaatttgaatgtatataaaatcaaaattttcaaataatagaaggcaaaaaacaaaggtcagaagttctgtatgaatgaatagactcatgagtgtccttggttttggagctaatccgtacattgatggcttccaaaacaaaacagcaaatataatcttttctttaatataaaaaacaacagtaaataatgttctcttttaccaattttctttttcacccaaatcatttatttatatttttatataaagattgaaactatcaatgtttttacgattttattgacttgagtagaaagtgcattttcatcatatataaatgataaagaaagaaaagttcactttacatatgtaattaaatatgcagacaatggttaattttgagtaaataaacaatgtatgcttttcttccgcggtagttttgtcttttccataattaattacacactgcataaaatcagaagttgaatggttgaagctatgtactgtactatgttcaaattgaatacattattatcatagaccttttgaaagctcactttcatatctcataaagccacctgcaataacgtcttcttccttgtaaatgccagcctgtattaattcaataaccatcttttctttcctgttttctccaactcaaaaaatgggtccttttctctactattttattattattatttatttttggaagaaaatattgcacaatgacccacacccacattcgattaattcatgagacaccctttattctttaaaatagtctcattgatcaaatcacttaacaaaaagcataaataaacaaatagatgagctaaaaagaagtaaagggcagacctttgagagtgataatgacttaaatcgggcaataataaagttaaaccacaaacaagggaaaagaatctaatccaaaagtttaaagcacaggtacattttagtaaattcatttgagcaataaataattgaaattaaaataaaaaaataaaataagaaaacacaacacaacacaacacgactgttctgttcagacacacaaaataccagtaacttcaagtccacacaagaaaaattctttcatctctaaaaatctcttgtcttgtttattttttctttcttttcttctgactgtagatctccctcatagctcaaccaaccaaacccattatattattttaacaataagacccaaaaaagtagacatattttcagaagataatgcaagaggctgtagtagcagcagctgaaccagaagcagaggatgaggaatctaagctccacttcctcttcaatggccataactaagctcactcttatctccctctactacttgtttttcttagttcaactctctacattatcacaaggtaatgcttatgcccccactaacccctaaaattggaaagtttgagtctttaccttactcactctgttttttgttggttcagctaatttttttccattggtttcggagattaagaagcaaaacgatgaacaagacaatgaaccgtacgtgggtgtgaacataggcaccgacgtttcgaatcttctatcgccggctgaactagtatcgtttcttcaatttcaaaagataaaccatgttaggctttacgatgcagacccagatattcttaaggctttggccaaaactaagattcgggtaatgattagtgtacccaataaccagattttagctattgggtcctccaacaccaccgccgccgcatggatcgatcggaacgtcgtcgcttactacccagaaacccttatatcgggcattgcagttggggatgaggtttttacaacggtacccagttcagctcctatgcttctcccggcgattcagtccctctacaatggtttagtcgcatcgaacctccatacccagataaagatttcgacccctaacgctgcttcgattattctagacccattcccaccgtcccaagctttcttcaatcagagtctaacccagttcgttcttcctcttctacagttcttgtccaaaacgggttcgcctcttatgatgaatttttatccttactacgtttatatgcagaacaaaggggttgttcctcttgataatgcgttgtttaagccattaacaccctctaaagagatggttgaccctaatactctgcttcattacactagtgtgctcgacgccatggttgatgctgcttacttttccatgaagaatcttaacataacagatgtcgtggttcttgtctcggagagtggttggccttcaaaaggggattccaaagagccatatgcaactattgataatgcaaatacgtataattcgaacctgattaagcatgttcttgaccgcagtggaacccctttacacccggaaacaacttcgagtgtttacatatatgagttgtttaatgaggatttgaggtcaccaccgatttctgaggctcattggggtcttttctatgggaacacaacggccgtttatttgcttcacgtatcaaatagtggcacttttctggctaatgataccacaaaccagacttactgcattgccatggatggggttgattcgaagactttgcaggcggcattggattgggcttgtggaccagggagagctaattgtacagagattcagcctggagatgattgttattatcctaataatgtcaaaaaccatgcttcttatgcctttgatagctattaccagaaggaagggagggctgctggttcttgtgatttcaagggtgtggccacaatcactaccactgacccaagtaagttttctttactggagtttttggttttcacaattgacatgctttactttgttgtaaacaataagaactgaatgaatatgttgttttcttcttaaatttgtagtttagttgttatgtcccagttccaaactttgagtactgctactaggggagaagaaaccatgtggtttccttgataagagtatgtttagtaagagccaagtgcttaatttttatttgagcaatggtactaatattaacacatgctttagatattggtaagtccaatgaaagataaaccactaagcaatgttttagctcaactgtgctatttcatcttttctttttctttgttaatagacactagacagtggtttgtggtacccactgccaacccacaaaggcacatcagtaatggagagaatagaaaaaacatagaatctttgctatatctttcctacacgaaatgatattctgatgatggtagtcctgtgtagacttgtttcttctctatgtacaaaggtgaaagaagagcacacactcactcacttagaaagattctggaccagaagataagattgtgttaaaaataaaaacaatgtcggtcattgctatattcttgcagaaaacagacaaactctgatttcaccattacataatttttttttataatgtgatttttccatcttgtgcaacaaaacatgtgggggcaaatattagtttgtacataattttgctagtttccccttgtattgatatagattcttatttcttcttcttttgggaatgtactttcaggtcacgggaactgtctttttcctggaaggtgagaggaaatggtttcttctctcaggctctgaaatttgcatatttgtttttatctctttaaaatatttactgtcattctcacgtatttattagaacaagaaaccaagctttgcacatgtgatgttaagtcaaattttatgtggttttgattacagtaagaagttgagcagtaataagacaagggaggtaatgaacacaacaacaccacattcaagtaatgcagcaggggacagattacaattcattgccttaaccttaagaagaaggagcaatattccaataattagtggtttattagtcaaagaattagtctcattttttgttgtagctctctctagtttgttattctttgatataatgactccatgctgaggcagaaaataaagcatttcttttttaaaaaaagaaatatgtaatctaatggtatttttcttgatgagccagtgttgtgtataaaaactctattcttattgagagtgcagtagtgcagatgatttttttggtggtgggcttctactttaagtctgtaattaacatatggtttatgtaagttgactattgagttgttagtttagttgtctcccggtaaaaaagaacaattaaaatgtgaaaaaaaaaaacaatttttctttttccttctttccatttttcatatcttctcccttgaaaaagaactcagcttggtgttgtaaagttattgttgtaaatttgaatatgttcaagctttaactcgcaagaagtggtgaatgaacaaaaaaaaaaaaatggagtctatttaataaaatgaaatagtttacttt

SEQ ID NO: 14406 - DNA, 3411 bp, Cannabis sativa
aagatagttagggtgttacatggactgtttgaggttgatctacgtggtgtatcacttgtaaaacttttgttaaatatattgaagcaatctaccatagtgtgaccaaactttagacaaaaatgacactgtggtctattattgtgataaggatttcgacctcctcaagtaaaacctttgttgccacgaccaaagaaggacagggaacgagggaagcatgacctatttcgattgaaagcagcaaaagcaataagattagcttcagctaagtctaactctgatttagcaacgtgttcttgaatcaacttctttatttgttttctcaatttgagattcaaaagctaataacaatgcctcaatcagcaattgaatatccctttgttccagtgttggtggatatgacaaatgtgtcatactcactaagcgatcccttgaaaatggctgacacatgatcacgaatactaagtctctctccaacaaatgcaagtaagtcaaatgatgtttgacagataattagtgagaggattagtgagaggaagagaacctttcttgagactttaaagtttggtttgaaactcaaagatcttcgtagatactcacaacatgaaatactgctccaatgtgctccaaatctggcgagaagaatcacaaccaaccatccttgttagcaagctttcagacattgatgagagaagccagaatacaaggatctggtcctcgacttttccactccacgaaggcaaggttgtacgtcattgaagcacggtcgaaatttgatagaaattatagtgaaggattctcgcaaatgaagttttggagtttattacctctgattgtgctagaagttgttgtttccataacaagaagttgtgatagtgcaatttcgctaaaagattgttgttgaaatacacaatgttattctcaccaactctgtttttgttcttcgtagttgcaaaggcattcatagttgcatgagtagtgtttggatcgaaatttgtggtcctgttcatcgtcaatgatggaaggagctctgatactatgttaaattttttaagcatggtagaaacgaaatgaaagagaagaaagacaatgagaaagatagagaaagacttagtgaatatagatttttcttctaattattcactaatgaatcaacaatagaatatataaaattcaagagagttggttagctagctcaagatcgatacaactgtaattttaacaaaattaacaacctacaactaactcaaactatctcttaactaactctgataactaagtaaaagttgtcctacatatacgtcctattctgtcattttgaaacttgtcctttttttacttgcaatcaatcatctgtcaatggttttaatttatgcttcgcaattacatgctatgtatagttgctaaagccttaaatgagtgaaaggtgtagataatttatatactttaggaagtttaatgatcatggttagtatttattttaccgaacatatttgaaaatgtaccagaaatatttgagtagagaggtggggtgtaatctattattaaagcaaatataatttcacatgttattaattacaatgagaagtcaaagttgttatcttgattactatttaattagaatcatggaatagaagttgtggaatgcacaaccgacaatttaatttctttatcattattcttttttaaaaaatccctagtttcaccgacaaatttaatatattcttaaaggattgctagtattttgtttgaaaagggatcgctagcatgactatatatactttgatgagagtacgtgtaatctacaaaattgtgtacataagaatcacatttttttcattattgtcccaatagctaattaacagctttgcacatctttagagtggtcaatgttatttcttgtaaaattgtggatattattgaggcttgtaataactttcgtgttatttttattagaaataattatataaaataataatttttatatttttacatttaaagtttttttttttaatatttttacagtattttataaaatataaaaaacaacaaaaaaatcacatgaaaataacaacaaaataacttaaaaataatatacaaataacgaaaaaaaataaaataagagtacaatataaaattatatagaagaccgtactttatataaataaaatctaaacaacagtaaaagtattaaaaattattcctttttattattagaccatgtccattgaaagaattaatttggctaaatttgtcacaaaaaattagtttgtgttatatttggcctactatttataattgtactccaatgcacaaggtataaaataagaaaaaaaaaacaattaattatattgatagtcattcaatattttattaagaatatacaaaaagtattattttaattcttttttttacttaaataatagtaatatgataaataaagaatgtaaaatttattaaaaattaatgaatcataagaattagtggtactaaaataaataaaaaagtagtttttattgttgattaaatttggcacaatatcatatcttgggtcaaatttggtactatttttaaaatgtgctaaatttagtatattttttagaacactattagagtagtaattttttttaagtgtactaaaatataataatatactattttttggcacttcattaaagatgttcttattattattattgtcctaaagaagctaatagtgttgcatatattttggcaaaacttaatttttattaatggtatttttttcttttctaagatatattttatagaatttacttaaagttttaatggcattaattctgaaaaaaaaaaaaaaaacacattttgagtatctttattattattaaggaaaacattaaggaaaggtaataagctgcagaattaaaaagtattattattatttttattttaatatgatgattataaaggaatccgacacattatcacaaactataatattttaagagtgaaatttacccacacgtgtcctacacgtgagaaacaataatctacctaaaggtctaaaaaaaaatattttattgaaaacaataatataaaaattaaaatggacacccaagtagctccagataccattatttcataaagtggatccacaaaacatcaaaagtacattttagtgtatctagaaaaaagcgtagcggtagaaaaatactaaaataacatttaaaagagaaatagtgtagtatccccctccctccagtcttggagcgtgtttcccacgtcatccgaagtagcgtgacaaacgacattaatttaatttatttatttttgcaacgaaagacattaatttaattgacgaccggtttttaagccgagcagctcagtgggtttggttgctcaaagtgacccgctacaaccgggtattaaaaagaa

SEQ ID NO: 14407 - DNA, 11737 bp, Cannabis sativa
  modified_base (420)..(423): a, c, t, g, unknown or other
  modified_base (8544)..(8550): a, c, t, g, unknown or other
aacattctctgtaataaatactatcataaatatacagactcgtggactaagacttattaacgccccaaccacgtaaaattctctctattaagttcttatagctctctaaattattattattatattgattgccgaaaacctcggtcaacacccctgaattcttacatttacagaaatttaattcttttgttaggtttcgtcctatttttttgtttgaatgttgatgtatctttgttaattaataaatttgccgcctaaactttgacaactatcatatcgtatccctcaaattttgacaaataattaagcgatttaaaatctagattgagtctattttttttcctccaaaaaactagatttattttagtaaacctaatttttttagtttaatttcgaactttttttcaaaataattttatnnnnttattgaatttttaattatttttcattacatttttacggtatgagtttataaatataaaaaagtttgatattttttcaaaaaaatcttaatttgtttaaattatttgttggatttttaataattttagtttgattttttaagatacatgtttataaataaaataaaatttcgaaatatttttttggggataatttaaaatttttaagtaaatttaatatttttatttggtatttttttaaaaaaaatattaattttctcagaattaatagaatatataatttttaaaattattttttttttttaatgaaagaggagaaatttttttttattgatcaaagttcatgagtagaagaaacaggacctaacagaaagagcataattatgtaattgttatatttaaggaaaaatttttaactagtggtatattttaaaagacaaaatcagatagtgtcaaaagttcaaacgacaaaaatattaattattctttttaaaaatgcataatttttgtttacatgttgtaagtggctaagcatacttcacaaaatgactagctctgttcggtaacaattttaaaagtgaatttttattgttttaattaaaattataaaaacattgtttgaaagtaatgttcggtaactgattttattttttgtttttttaatttaaaatcaaatttaaataaattttaaaaataaatatttcatgattttaaaaaaattttaaaatcacttttttctcattttcttctctctctctggatcgctcgtcttccttgctcagttccattccaaaaactcatctatggcttcatctattccaggttaagatttcttcatctctctctctctctctcaaattttttctagttttgagaaaatcttcatctccatatatgctttctacttagggttatgctacacttcatttccagtttttcaatgaaaactacatcatttcattcttttttattaactacatacaattatggtttttcatatgatttattggtatatatatatatgtatgtatgcttagtcttctttgattctctaatcctacctcactcttactcttgccaccactcccattttttctcattttggaagctctttctcactcacacactcacagatctctctctgtttatagtgaataatatgaatttctattattatatggtttatttatttttatgtttgtgagttgtaaagatattttagttatgagattcagtattttgtcaaaagtttaaggcttgtatatattgatatcaaaatgtgagttgtgtaatgttgaacaagtatgtgtattttgattttgggtacacacattctaaggctagtctatataacaagcatagtcttattaaaacaagtatgtgtatgatgaacctcttgctggtctaggtatgaagatgcttttttaatatatgtacccttattagtaaagcagactgcaatttgacatttgagttgggatccctcctatactctgtttggaatcattgttgttcttatttgtagtttactaacatatgaaaacaactaacttatgcaacttgtgttgtggttttcagagagttagctgatctagttgatcgattgtaggtgatggaataggtgggaatctaaaggtagagcagctacgtatttatcaagaccctccttcctcataaacccactttgctttgaggtttgatccagatgctactagcttttaaaatatatattattgattgatatttgaggcttacatattatagttattcaaataaaactttgtagcaaaactattctactaacaaaataccattgagtacttgaaaacaaaaaactattctacaatacaaaacttgacctttagttatacttattgataatcaacaatattaaaccaagctatggaattttagcttttttccaaatcagtttaagtgaaaacaaaaaataattgctctgttggagaccttaaccacttgaaatcttaaaattatgtccttgtgtttattttttacttattgtgtttatttatttttaggaattttaggattagtcttgtaattacatgtaaattgagtagatgacaagagcagatagtgaggtgcttattatcgataacagtgaagcttctatttgacctcaaaaacatgaagaagtttttgttggacttatggaagaagaagttttaaagggaaataggaatacaactttcacaaatcaatcatggaagcatataaagaaagagctttatacataagtgaaaagaagttacactaatttgcaactaaggaacaaatacaacttgttaagacaaaagcacaaggatttcaagtctttactgaaagagactggcataggatatagtgaagtgactggacaagttagtgcgccggaggaagtgtgggatgggcttattcaggtaaaaaaatatttttcaatgaattttattgcttgatttattttaataggtgttggaatatttatctttactattttatttcgtataggttaacaagtttactaaaatttttagaaaaaagggttgtgtactttataaaaaaatcatgcaccatttttggtgataccactgtaactggttccaatgctcatccttcaactcggagtcctgctatagatcttgataatgatgatgatgatgatgatgatgatgatgatgatgatgctatgtcaaagagtccatctgttaggaatcaagagagtagttttgatgaggatggtagcaaaagaagagataaatcaactatcactacgagttcttgatcggtaaaaaaagcgaagttctcactcgtattggcaaaacattgacagtatataatgaaactgcaaagcgaaagatagaaatgtatgagaatttaatgaccgacaaaaacatcacttattggatgagtgtattgaagctctcaatcaaattgacggaattagtggagaagtatacgcgaagactattgagaagtttgagagcgaggtgtctaaaacattatttctaaagatgccaaaacatagaagaattgattggttgaactatttaaagtgaaatctttttttgactatttagcctttcactttagaattgttgggatttataaatgacttggtgtgtatgaatgactttgtttgtatgaatgactttgtttttatgaataacttcgtttgtatgaataactttgtttttatgaatgtcttgttagttcatattttattatgactttgtcgattttgtgttatagataaaaagtttcttgatttcaaattacttgaattttttaagatactaatgagtattttttatttaatttttttataatttttatatatttattttaaaataaaataaatgatatttataatttttttaattaaacaagaaaaaaataaaaaaaaatttgtttttaaaattaaaaaataaaaataattgcaaaacacatttttgttttttttgtttttaaaattataaaacaaaagtgattccagaacacacttttgttttctgttttttaaatttgaaaataaaagtagttatagaacacatttttatttttcaaaaataatttttttttttgaaagaaacaaaaataaaattttaaaaacaaaaaaaaatctattattatttttctgtttttaaaattaaaaaatataagctcgttcaaatattgtattaggtcgtattgtattttattatattaaattgaattatatatcatgtttttatataatgttatgttaagttttaattaatactaaaatattatatatttaggtgtctataaaattaataccacatgtaattttatataaaaatatatgtatttttatataaaaatattgcataaaatttaatttaatataccactatacaatacaaggtgtaagtgttatcaaaagttctgaataagtcttggactatttttattgacctgaaaaattctgacataataatacataattcatataaaaaattcttaataacattttttaaaatattattacatcaattaaaataataaaaataaataaataacattatcacagttgaattgacgatagaatgaggaactcatcttggccttgaattcaatcccatttcagtagaggccttcctcctcctccttctaaaccaccacccacggcggcgcgtacaaacacgacacaatgaactctctcgtctccactctcaaatactggctggttgaccacccaacgatcctccactttcaatggatccaacctcaaacactaggctccaccccaaccttcctcgcaacaacagtcctaacctatctcactctcaccctcctcctctcccgatcccaattcccacccttaacacccaaactcctcaaaccaattacagccgtccacagcctcatcctcctcgtcctctccctcatcatggccgtcggatgctctctctcaatcctctactcatccgattgggcctccgcaatctgcttccctaaagagaccaagcccaatgggccgctcttcttctgggcccaagtcttctacctctcaaagcttctcgagttcggagacactcttctcatcatcctcggtggctcaatccgacggctctcgttcctccacgtgtaccaccacgccaccgtggtggtgatgtgttacctttggctccggacttctcagtctctattcccagtggcgctcgtgactaatgcgtcagtgcacgtgatcatgtacgggtattattttctttgcgcggttgggatccgacccggatggaaacgggtcgtgacggactgtcagatagtgcagtttgttttcagctttgcggtttcgggtcggatgttgtacttgcattttttcgggtccgggtgctccgggattttgggctggtgcttcaatgcgggtttcaacgcctcacttttggctctgtttgttaattttcatgctaagagttatgctagtaggaaaaggaccaaagttgagggtgtggattaccatgatgataataaagttaaaggctcatagtatttttcaatggggttcttattgggactatttttgttttctttgagttttatatttgtggtttggtggctgaaaatgattgggattggtcgtaaactttaatatattgttgattgagaaatgagaaaggtgcatctttcatttttgcttggtttagttcaatgcatctttgtctctcttttgtccctatggtaaaggttatgcactttttttcttttcattttcattcagagattatttatttttcatatataatgaaaagaataaataaataagtgaaatatggaataaagggggactaatttaattatgtcttcatgattaaggtggttatagtcttggcttaattagtaattcaattctcttgttctactttttaaatcctcttcaacaaataataataattaaatgttcctcacaaacatttttttttcaagaatatgatattgtattaaaatttcttggaaaagatttacatatgaaaggagaagtttcttttaagaaaactcatcgaaatgctaaatcaatccacgagctttaacattaaaattgcaagatgccttcaaaagtttagacgacaaaattttaatgtcaagaaatataacattaaaaaagaatattttcctttcatgatttctaaaacaaaaaaaactaaaaaatataaaaattaattgtcaagttttggcataagaaagttatttaatttctctcctaaattttctcacatttcaacaaaaaatagataacgtgcaacaaatttgtaattgcaaaacttcaatgatgtgaaaaataaaagaatgtgtatagatttttctgttattggattaggagtaatgtaaagaaaagttttgtaataaatattattggattgtatagttggtggtactggcattgtacacaaaaaatttcagtttccctaaagaatatcaaatttgttgttaggtgtgggctttgtaatatttcagtttcctgtagcaaatggaattagaatggcctaacaaaattggcccctttacaagaatagggtaggcataaaattcacacaataactatatgcatatataataacaatttcttttttttgtgtgtgtgaagaaatgatagagagagaatgaataaggataaaattttgaaaatggactaaagaaaaatatgcttggaagtgggaacacgtccccacggaaaatgtacacaacaatcctcaaaataggatacgtgattctcttatatattttccttgatgaaacactggttccaaattcaactaccaaaacagcgcatttagcaaattattcattagatgagaatgttcatctcaaaagataaccttctaattcctaggtgcaaacaaaaaatataatatggaacattcataccctaataattcaatgatcagcatacaaaattaagagtgcaatatgggaatgtaagcaccaaaaagagagaaaaagaactaagactccccccaatatattcttctcactgttatttttggcttgtcatttagctacaccctcttctacggcaaaaagaaattctaggaaaggcggtcattctgtgatttggcaagcaaactgcatcttttctcgtgagacaaaattggacagatggtgatctcattaaattatgaactagcagccaccttcttcctaactaccctctttctttttgctctgggggctgatgagtcaccatcagcagcagagtcggtatttgattgtttgatgcccagaagaccaagaccagaaaccatggcattcttcgaaatgaaccatttggaagatggctgttgatcaacattctcagaaggcctattgtatgctttcaaaagactatctgaattagccaagggatcagcctctacgccaagccatgctagtctcgatgactctcccaattgcacattcataatcctgcttgcatgttaattgaaaattagtactatacaagttcaacagaagaaaagggaagatgttataaatggatatcagctttgattagtacaaaagtaaatactgcagtttcagagcagtaaaacattagaacaaaaatggatcaatttacagtatcacataacaaataaacatcttttaaatacatgaacaggctctcgaacatcctggggtcttataatgattttctatcgaataaaacagtagcagagtttcttctatctttctctctgttttatcaatttgtgtctctgtgtttgtgtttctatcataaagcactactaacaaatatttcaaacttaggaacctatctgtacatttttaaaaggaaaataattgtcaagtcttttaaagctaagttcaaatggcagtctaatcctaatttaccaaagaaaaaagacagttcaggaatcacaagatataaaagctaattagcaaatgagaacttaaaagagtgttgtggtagagaattacctcaatgctgtgctgaaaaccagtcccactccaataacatcaaaataactgaccactgctttatcaaaaccagataaaagctgatatctgaggttggcataaagtccaaggaaagcaccataaccaagagcattagttcttgcactagggatcgtcacagacaacctgcaaaacatgttacaaattgccaacatctaaattaggtatcattgcagataatcaagtaaattccgaaatgatgacaatttagaacaacttgacccaactatggtatgaaagatctactcccattatatccaataccattttcatttttgctaagaaagcatactagcaacccagttgatggcgatccttttaaacaattacctcagaaaatccgtttatagtctctctaaactattacatattagattaaatttaactagttatatatatatgctttaattttaaaggccctgccataccttccctcctttttgctagccaagtagtttgataaagagccttggactgctccagcagttaatccaaccatacacaactcagccgccttaaagaaaaaagagtgaaatcgcttttgtagatcgaattccctcatcggatagctcttttcaaatacattgttggggagcttctgcagtgtattttgcaaatcaaaccggaatgtgtttccatatgagcggcnnnnnnnaagtgaccaaacagcaatagcattgcaagctgttactgtcagcacgtttacaagtgccagatcccattcttgctttatcctatatcacgttcaagaaatcatctttagtttcaatatcataaacaagcacaaataccagaaataaattaataaagtccttgtacaatattcgtacctttccttgcgattcttcacctcccaccaaactgagcaaccaattgtagcagcctgctctaaaagaagtttatacaaaaatgcaggatctgcaatcatcctgcataacatacaatattagatcataccaagaatgaaaaaaataaacttagaaaacatttagaattaatagtaatcccatataaaattcagaattaataggacagtaatcaaaattaaatcagtggatttcttgattttatttcgtttcaaaaaacacaaaccaatagttcaaacagaaaagaaatcctttattcttggtaattaaaaattatattgtgtaccacataggcatatttgattaatttgagatcaggatttgactcacaacctctcaaataaatgttctaactacataaagatttcttactaaatcttcactacaacaagtcaataactcatctaaagctacagcgatttggacatctgtaatttctactcctattataggaagttctgtggttcagaagatgaaaataaaataaaaagtaatgaaggatatgatcagttggaagaaaccaaaatggaaaatagtaaaacatacggatagcttggcttttttcatttatttttttcaaaaatgaaatgaatgatagaaattcccaaataatatatcaataacatcctcccacttcatccactttgaaaagcataaaacaaattaccaatgttctataatcttctagtatggcaatgaaataaaaaagatatccttaatggattctgtgataaaattcagtagtgcttattaaaatcacctgccaatgaacccccttgacaatccttgaggaagtgaacgggaaatcatcctggtagtggttggcctggcattgattgctaagaatttcaccatttgtgctgaactgaccaaaccctgcatgcatcatttcaattagcatctgcatatctagcattagccgccagctaaagtaacaacacaaatactataccatttcataagcttgtcgaaacccagcaggtaaatccatcattgtcttctgccactcatttaacacagcatcaacaaactttcgatcgaagagctgaaaacaagcacaaatttattaatacattaaaagatataaaaataacaacagaaaaatgagagaatggcgtatacaaagaaatgtgaaatattttgaaatgcgtatttttcacaaccaaacctcttcaagaaacattcttctcctaaacaagccatcatctccctcatcaccttcatcaaagtcatcaaaataatcatcatcatcaccaccatcatcatcccctccatcaccacctccatgattgattttttttccaatgtctccaccacctcctccaatggcagtctgcagttcaaaatcatttaattagtgtgaatcgaatagacaatatatcaatcgcacttaaatatgtcatttaaattgttgacaggcagaagtcggaaccagtgagagtatacatctctgattttgttcttatttatatttattaagcgatcactactcaagaagccaagataaaaagaatcagtatacttttacatacccaagtacacagtttcacttttcactttttatgttttttttttctcacagtactacatttccatttgttcttatatataagtgttaaatcccatagttgttcttataaagtgaaaaattaacatgttcatttactaatgtagttaagttctaatacaaggaaactatcatgaacaacattcaagaggaaatacctctttacaaaactacagtaaactattcccgtgaatataaaactagaccattattataccctaaaattattaaatattttttgttcatttaaaattttcatcgcctctcttcattgagaacttattttattacgtttccaaaattctctttcaattactacttgaccaaccagtttctcacaaatgattgtccgccattttagactttacatttggaaacatggtgccagttaccctatacctattgttttaggtagtgttccaattctaattagacataatcaattaccgaaggcctttgattatgttcttgtactattgagtcttccgttatcaaggggtaatactcaattttaacgaattatacgcacacagtgacacacgaattatgttccaaattatgctcaaagacaagtttcttcgttaaaaacaaagtcatgaaaagtttcattctccactttcttcgaaattattaacaataccctaaaattaaaatcccaaaaaaactccgcaaaagtgactgacctccgggctagtcctagactgcttctgtgtcaaatcgagcttcgatttctcaagggtaaccgcacccaacgaaccgaacttgtccttcattaccggacccatagacgaagcctgttcagccacaaagcaccgttctaagagagccacggaatcttccacggtcgaagaagaaccggaggccttcaccgtcagacatctccgatgctttccagttgtgggaagtagcaactgctgagcgtgacagagaagcttgtggaccggtagagacgacgaaagaggtttaggttttgctgtaacctgtgtgttgattggcataatttgagctgtatgaaacacagcgtgagccattatagttttctttcgttcttactttctttttgtttttttttttttttttttttctgtttggatagagagaaaattggtttaaaatcttctcatatgtaagcgggtggctgccagtttctctctccacatatgattttctagagagagagaaagcagagagaaaagaattgagtttggggattggggtttcttatataccgaagaattggagaagaaaaggggaaggaggaagatagccaacttgcttgggatacaactactacacgagacgtctaacccaatccgaaatgttgctcgactcgtgagttgactcagcgatttatgggctagtgggctcgcctagtggtgtaactgttggcccagcccatatttattatt

SEQ ID NO: 14408 - DNA, 12890 bp, Cannabis sativa
  modified_base (11602)..(11605): a, c, t, g, unknown or other
gcttgttctatggcctggggttaacttaacacataccagtgatgaaggagttcatttcatttcacagggtattaaactattaatctcagcaataaagtaacatctttttccatgtatctgtttcatgcctgactttttatgtattatgttgttactttcagatatggtgctggctggcatgatgggcaaagaagactttgattagatttagagtagggatttaggaatgaatatacaagattgaaacaaagcaagcactaattcttttatgtaaattttagccaaatcattcaacttacaaaggttggttatggattgtgttgataatttttctccatttgaatacaacaatggatggtataatgataccattaccatagataaatagaacaagattattttgttttattgcaggcacaaacaaactgtgaacaatgtactaacacttgttttttattgttgttatagaaattctaggcttttaaaaaagaaaaagaaagaaagaaacacaaagtattgatagttgtcttttacagttgatcttttaacaaccaactaaagaaaaaacaaacagtatctacaaagccttagattgattgatcacacaaggaaagaagactaaagaaaaaaagaaagagtgatggaaaatgcagcagcagcatagggatgatactgatattctattctatgatgatgatgatgatctctttatctattactgattcacgtactcttcactactattaagtactatattatatatttgagattgattgccattggtgaccaaactcaactcagcagcagcagcaccaccacttcaaatcttgatttctctaccaaatatccagctgaaaggaaccattgatgcttgcttggtccttccctgagctctctcctccaactttcttatcctctggggcaatttacacacataatcttgtgctctgtggccctcactcgaaagaccactcaatttctcaatcttccatcttccaaccagaaactccatgatatcagcataatccttggcagtgtaaacttcaagcttctgtgtaactgctgcaaagtgatcgaaaagattgtcatccttcccgtcgtacatcaagtgggcaggcatcgatatcttcttcttcatcatgtcagcaaaagccataacagtgccattcgggtcaatctcaaagagcttctccacaatctttgtgtaggcagtttcatgacgtttctcatcggcagcaattgtgccgcatatctgcgccagtttcaggtcaccgtgctctttggcttgcctggcagtatttccatgggagatgaatgtagccctctcttgaaaggaggtgtagatgaaacccaaatacgggttgttttccgttttgggatcctagtaaaatacaagattaagactttaactaccacaaaagcatgcatctttaaaactgaatgataatctaaacaaatttgctttcttagctatgcatatagttattctataatttaacttgttaaaattaaactatatctcaaggttaaggcaatgtaccattataatatgtaatagtgtataaggatctcaccattcctgagccaatgagatattggatggtcttctcaacttgcttcatatcaacccttccagagagatacagatacttgttgagaaggtctccatgcctattctcctcagcagtccacgccctggtccatattccccaagaagtagggcttgcaccggtctcatctctaaccccgtctaaagtattaagcattgtctggtatgtcggtagagcttcttcagtgatcatatcaccgaccaatgcaacaaaatagtcatcgggaatttctttcgccctttcccttaactccctgacttgatcataaaacccttcagattccggctcgggtagaaaatcttgtggctgccaacatttctccacaggtttcaagtgcaccaaaatgttatcttcagcccagccttctaatgacttgaagatctcaaccttttgaggtggtagtgaatgagtcacttgaagatgtacctccttcggaggcgaataaggcttttttccattttcagtctctctacaacaaacataagaaaaaagtcagaagctttttacatgaacatacattattttgtaactaactaactaactaacattacttctgtctgttcttaacaaagtttatatatttacatacctattgctcatagaatcatatccagctataactatttcttttttcttgtgtttgattttaataaacaaataagtagggaagacacactaaaaagggctgtaaagaggtcatgttattggtaaaaaaaagtcaagtggaatggaatcaagtaaataaataaaaataataaaaataaaagtaaaaaaagaaacctttgtccatagaatcagtcttatcttaattggtttaatagagatagatttcgtatgcaagttttctaagtatgcccaccaaagaataaataagaccaaacttgaccaaccatcaccagatgaagtcaaaactaattgttttacttgtaccaaatagtctacctgtaagcctgtaactgcacatatatatatatatatgtgtgtgtatatataaaaattataattgttgcatatggtagtacaatacaagtgtgcgtaaccaacactaaaaagctagagaacaagaaattggtgacgttcctaaatagaaatacagttaactgttttgaaagaaaaagatatcacattagaaacacgcttgaaaactcttcacacaatgtgagcaaccaaaaaaaccgtaaccaatataatcaagcaactaagatatatacagttagttgatcaaaacacaaaacactatacctataaaatactgctagacattactgaatacaagtttaaaagggtggaagtaactatataattaaactatattttaaaatacaaataaaaagagtaatgatggtaattacatgtaaattcttaatattttgttcagtgatcctttaattacaccgttaaattgtaattacacaccgttagaatgtaattagatagtctgacaaatatgccgaattatgtaattacaatttgtaattacaccgtggttttgagaaacttgcatatggaatcttaactaatcaattacaatgctataacgctagtcacagctaacatgcagatcagttttagttccaagaaaaatccaaaaaactcagacctgattgattctcaactgatacaaaacacagaagaaaacaaaaaaaaaaaaacaaaaaggtatatgggacaaatataagacaccacaacaagcataagcatgatatatcagatcacagttgaaataaaaacactcaataacataaaaatccctgcatgcagcgaagaaaccaaggaaaactcaaaagcaggccagggccagctgtttcattttcctaatgaatgcaattaatataaaaacaaatcaaaactaaatagcaaacaaaatgacagaaacttcaaaaatccataagatgatatcgtcatcaagaaaagacatgcaacacatgtggggtgtgtatatgattacagagttgaaaatcaaaataaaaaacaaagacaaatccgaatgctttcaccaaatacacaacaatctaaacgagattattatattattaaacaaaatgagaaagacccttttcaaaaaacaaaaaacaaaaaacaaactttaatcgacaaaaacgatgaaaagagaaatttaaacaaccccattagatttaaccccaaattaagctcgattagcataaaaaagcaatgacccagatcaaaaaaacagctgaagaactaaaaagacatcatctttcttaaaatgcaataatgttacaagtaagcaaaaataagagaacaaaatccaagatttaggcattggaaatggaaatggatagatactgacttagaaatggagtggagagtggaggccatgcagagccttggagatctgagagtgtgaggcttagaagagacgttgtgagttgggaagttgatcattgagctgagtctgagagccattgttatattaattgatccttaataagactgctcctttctttctctaagaatcaaatgtatgtgattatatatatatatatatatatataaatgtgatgaaatgagcctagcaaagaagagaaagaagaagaagaaagggaatgcagtgagagaatagaagagaagagagttaatagagaagaagacagacgcaaccgaagtaggcaatgttgggcgtgagagaggccattaaaaagactttttttaagaaaagacactaactttacatatttttacacttttgccattttttttctgtcttcttcttctttttattattattaactttaaatgaaaaaagaaatctctttcacaaataaataaatattattgtaaatataaattatattagaatagtttgtgatataaatagttaaatttaatttttagtgacagataaatatttatatttaattttttatagtaataatacttaaattatatttctcatattttcgtaagtatgtcaagttaacattcatgtctgatcatgtaatcattaacttaatacttaatgattaaatatgtacgaaaattctaaaaatataattaaagtattattaatgtaaattactcgttattttaacttgttagatatattatgattgaccaatttaatcaaaatcatacttgtctactttttttaaaaaaaaatgtcaaatgaatttttgattagcatcattaataattattggaggatttagttttaattgtttttgtatattagatatttaaaggaaacataaagggtgatttgggaaataaattttaatgaaaaaataaataagaaattgagttcacttagcaaaactttaccaatgggagattcaatcttaaaattggaagcaaaccaatacattggtttattattttagtgtcaattttcattttttattgaaacaaaattattttatagtaaagtaaatttagtataaccagctaccatcaccaccaccactcattctaaatttaaacatgtttagttctaacttataatccattttattaattaatttcaaaaattgaaatcaaaatactaaacttgtcaaattagtaaccaccggccaagaaaggtggacaaaaacgtgtacttcatttaaatcacaaataacatatttttcaaaaaaaaaatatctattttttcttttgatgcatacaaatatatggttctaacactttttataggtggaatctcataattagttagcaatattttttaaaagttacatgagaattgatacttaattataccaataacagtatgataagagtattaagtaccatcattagtaccttttaacaattctctaaatataaataggagttaatacttatattttagatcaatattttataaaagttatcgattgaatcctctaatttgttaaatgagaaattaagccctgtaatttttaaaatagtatcaataaaatctgaacttaattttagacaatttttttaatataatatacttaaaaataatttttaatttaaccaattttgttacaataagtctaactaaatcaaattattattatatttttttttttgacaaaaaatcactttaaattactttttagtactcttttagaaaataaaaaatttaatttataaccagtaatttttacaaaacagtatggtgatggaatgaagagtgaaaggaatgatagatattatactccaaaaccaagtcaataggagaaaaagacattcatattcattattttgatagattggtaggttttacaaaaattagtagtaaataatagatgacagagacaatattaatgaaacaatagactaattatatcacatggtgactaagaactatattatgtttagttatagaatagaatccaataataatgaccgactttgggttggtactctaaatacattataacaattaaagttacaagtcatttgtgaatttcaaacattacttaattgcactaaaaacacagggcaaccatttctgggtagtaattattactctttatagactcttattcctctcattcaacatttatagctgaacattaggtgtggaccatacagaagtaaagtaatagaaaactaaagaaatagacttttcttccatggtaagaaaaccccatcactctaaaagttgaaccactttcatgtcattgatataaaaaagaaaataacagcacactactagactcgactgcaaatatcaccccccatacctattctctattacaacttttatcatcttttcattcaaaaaatagcaatcacactttcacactttgatttggagtgtcatgttatgtcctctgcacatccaaaatgtgacatttggtaataatacaaaaggggcagaggtatatttatatcatcttttattaccagaacttggtgttggtggactggactccatcttcttcttctatgtgcaactctgatgcccctcctccacggcgaaatttgttttcagagtcgcctgaggcgaggtttcgcttgggttgacgactttaccagcaggtggcaaacaccttttcgagaaaaaagtggcaatgcttttggtccttctggtactcttttcttctgttgattagacaaagttaaattcattagtcaaaaaatgcatggagactaaatgtttcagatagtgacaatagcttaatctcataaatgacactaacctggtgataacccaagtttgttcaacacttctttcttcacctgggaccatttagaaagcaaacaaaatattaatcaaacactcaaagcactgaggttgaaacatatttgtatatatacaagaaacaagattatgttcatgtacaaatctttactaatcaatcattgattgcgtgagtctttcatcacaatatgaaattacatgaaacagaaaataacacaactttcagaagcaagtctctaacctgccagtgattatccatgaattcagatatctcacgcactttattccttaactgagtctttgaggaagaagggaacttctgctgcaaaagttccactaatttaaagataccctgcgagcacgactgaatagtagacacctgaaatttttcataagtagtcagcacttcagtggtcataaagaggcttacaatggttcatcctataagttacaattccactatacgaatatttcacaagctcatcctaggaataggggtttctagttcgaaaatctaggataatatgaaacttacaaatgtacgcatatcggaatctgataaggcaaccacagttggcgttggtgttgttcttcccttgccacttgagggagaagcttctagatcgttgtcttccgcattctcaagagagatctctacaggtgaaccaccaggaaataatcgcaaactaaggacttgcaagcacatttgttccatcctaggtgtaccagtgagatcttcagcagttaacaacgagtttttctcatgcatcaagttggtaataatcaaaggctgatttttccggagagcatgatcagtcaaattgctcaaatacttttgctgccgaagcaaagcacgaaattcctcattttctaaaccaggtgagcctttatcctcatcacctgtggcatgaatttccatcctgtccacttgaactccctgagtacacaacaaaaggttgttatagaagctgagatttgtacggaaattactgaataactctgaagacagaactttagaatacatttgaacaatgggaagatattagtcccatttgatcagagaatgagactagcttaatggtgtcatttatccatgtgatatataagttataaccacaactaaaggtacacagttagtttagttggacatatagttcaagcaagatacaaaagcgtgtataaatggaattggagaagaattatcagggagtacgttatacaacagctcaagactgttttagggtttagcatacacattaaagcataatggacatcaaaatttctcacctcattatctgaaagataaccatcaggtacgaaaaactcatcctcgctatcatctccatcctcagttttggagcatccctctaaactttcggcatcatcatctttttcacaatctgaaaggctttccccaggatcctcctgaataacacatttataaaacatcagaaacctatgctatatatcaacaaactgatatgttaccaattgaaccataagccaacagcccccaaaaccagcaaacagaagcgatacaaagagaataaagagaacccctccaggaacttgagagcctggtctctcctttgttctcacccaatttccgcctacctctctaacttacttcctctcccttttattactaacagccccaacaccaactcacgctcactcacttgttagtcatcaattcccactagtttcctattactccctgtcgcaacacaaacatgttggtaaagaaaattaccagaaaaataatagaaaaaaagatacaacaaaacattacctcctcccactcttcatcactgtctatgtcataatccaattctgggtcctttgtaagagggtgtcgtggtccaacaacacaactataaatacacattaaaaaaaataagaagatggtaatgttacagtcttacagataatcctctaattggagagtacagacaaaaaaaaagtttaaaaaatggaaagttttaaacagcttaaagttatggacaaaacaaaactcaccttttactgggccatataccataaaatgctggcctgtggctcttgtcaaattgtaacaactgctttctcctaatgaacttcttgacatcagaaagagaacaacttgcattgagctgacataatctgtcatcagaaacacattctccgcacccaatttccagtttctcttcatttgactcatctaacaccacaatatgcggtctagttgaggtggtgagcttaagttctttaactagttcagccttaggcttttgacgtaaaccccaatgttggtttctatttgaacgaatcaaatcgcctaagcggcgccaagaagaaaagtgtagcctgcaaagaatgaacgaccgttataatctgaaactgaaaataaatcaattttgagtaagaataaattaacttacttgcataattcatcaatgttaacatcttcctttaaggaaagggtacaatccattaactgggttactgcctcggggactttttcaatcttttcatccaatgttactacagcagttgctattttaggagaagatttttcagcttgcaatggacttattttgcttttcttgagaaaacgctccataatagaagcttgcttctgtatagcaagttgctttttcagctcagcttcttccctctcccgacgtttttggtctttctcagcttcttcttgctgcttcttcaactgtttcttcatctctaattcttccctttcacgacgcttctcatccttctctgcctcctcttgcagccgcttttgctccttttcctgaatcattcaaaaagatcataacaattgaaagtaatcagaaaagtttgtacacagcacgaattcattttaatcgagaatggcatcacttcaaccgcccatgaaacctatttaaaacaacgacacaaccataaagctgcactcacattatgcaatttctccttcaaaagctctttctccaatcttttcttctctttttcagcctccttcttctctctctccagttgcttgattagcattttttcttctcgttttgcttccttgccagccctataaaaattgtagataaaaaccaaatcagaaaaaagaaaaacaaacagcacaactcacaagcaaaagtgtgaccaaagacacttacaggtctgcaccacttttttccatcatgccattaaccaacaaccgaatttcagcctcattgcaagctttaccaagcttctccaaagcctttcttagctcagttttgcaattctgatcttcctcggatttctgtaaagccacaatcatttctgaaagacccaaaacacaacaaccaaatcagtttaggagcacacaatattaaaaaaaaaaaaaattctataattgaaatgcacaaacaatctcaaaatcagaatgttctaatcattattttcaagctaaaccataattcaaactctaaaaagtaataagaatcaaaacaatagcttaaccaaaaattaagcaaacataccagaaacagcagttattctctcatggattctttttcgacaagtccgcctaattgtcaacactccacgcacagattgtggcatcagcttaagatcccttgtctaagcaataacaaaaaatcattaatttacttcttaaaaattaacattatgaacaatctaaatctacccaattaagaagataacaccattaacaaaaaatttacctcccaacaccaaagacaggactcagactggtcttccaacacatcagcatcggcattaggaacgccgtacatcatcctctgaccaacaaacagcacagtactcttcacagtcgccaccgttaaaccctcaaaaacagcttcattaaggctcttaacccgagagtagatctcatccacgagtttagacagagggagatctctctcctccattaacgacgcaacaacagcattcacaccattacgacacaaatttagatccaaaaccccaatctgtctctgacccaatacttccttgtaatacccaaacaacccatcaagctccatccgcaaagcttcgacctttgcctctttttcctccttacccagcttctctgtggccaaactaacccttttccgcttctgggtcttcttcggtcgatcttgaccgtcaaatttcttctggatatcaccgtcatttccatcgattacaacctccatttcgaaaaagaaaaaaaaaaagaatatcaagcagagctcaaaagggtctgaatctgagaatctcagagctcggaaaggaagaagattggaggatgggttttgaagggtttggagggaaatgggtttcttgttctgtaaaaatatgatattttggggttatatttcccgccagtggaaatggtgggtttggctgttagagtctcaaaaaggagaattctttttgggatttcgcgcgggctaataccgaagaataaaacgacgtgtcgtttcgattcgaaatgaataaacgacagggaagaaaatgaatggaaacgatgtgtcgtttcgtaagagtgacacctgtcatttgtttggacacaggtcgtttcagtcacaaactctataaaaattataattttggaaaatttgcacctccttcaaaaaagaaaagattattcttatttattttggtatccaaaataattttttagtcaattttttttgtatggtcatgtatgttatagttatgtaaaatattttacaagattttaagaaatttaaaaaaaaaaaataccaaaaacagagtttaaatagtatgttacacgcgtgattatttttttttatatgtatgtgaaatatattatttgaatactgctttttatattgtaaattatttttaatttctcaaaattttataaaannnnttaaataattataacgtacacgaatatgaaaagaaaaaaatagattaatttttttctagatactgaaataagtagagagtgtattagtgcatctcttttaagggtgtgcattatagaaccactctataatttttctattttgagtgaaattttacataagttggatcggagtagtggtgtaaattcgtgcgtgttgtggtggattggcatatattattttgtactttttaaaatacaggttgtgtagtgtagtgtgtcttaaaaaaatatgggttgtatcatattgtgccatttacaactcgtttttcgtatttggactccaattcgtagtttacttttttatgttcattttataaagaataaattaattactaaattatatgtatattttttagttttaattatatttatgtaattttttaataatattttattttacgacacttatataaaaataacaaattattataacatgtatatttagttatatacttaattttttatatcacactctacaaataaattaatatataattttagttttatattttttaataatttaagttataaaattataatattcaatcttatgtttaagttttattattattttaatttatttataattagtcaatacatatatatattagtattataatattaatttatagagttttttaacgttttcgtatcatacttttcgggcttgtcacttattgtgcctttctatagtatatttttacgtgtgtttctcgtgtcgtgtcatgtttaatcgtatatattttgtgttgtgtcgtgccaatttatagcatcttctcgtgttgtgcgcaaactcatattttttcgtactcgtgccttacgagatcgtaccaattttatgtcatatcaaaaagttcagttcatatttacaacactaaattggagtatagttatttttagctttttagttttgtgagaagccaactaaatttaaataacattgttattaagtactaatgatgtctaataccatttattggtggtactttaatagttagtagagatgtacatttctttcatggagatggggttccacggggacctgcccttaatgggacggggatttccccgtctaaatggggaacaaggcaaggatatgtagattacattttgtccctgaatgttaaatgaggtgggaacggggatgacactcccagcccccgacagggacccatttagtattttatcttataattttagtaatattttataatttatgtttatatttttttaatatattagtatc

SEQ ID NO: 14409 - DNA, 4839 bp, Cannabis sativa
  modified_base (4362)..(4366): a, c, t, g, unknown or other
atatataattttttaatatttttttagaaaaacagttatatattttcgggaaatatacatatatattattatattagtaattattttattattatttttaatttggacgtatgatttttttttaaaaaaggacagacgtatagattatttatttgatattttttctgattccacttttacaaaaaagtataaaatacaatatattattatttattgtagaggaatatattattattggtataattaaatatagtatataattcagaattaaaataataaaaatataaatatatgagatcaaacattttttttttttacatcaatataaagaaataagtatttctttaatatttctctattttgattttgagtcctcatgtatataacttcccattataaaaattctagtggatattctatatatatacacatttatatattataataataaaaaaaaaggagggtgagctgtaagaagtacaagtttagaaatatgtcataaatgaggtcaacatcataagtttataattaaacataatttatatattttgagagatcttttgaacacagtacatatacatatatacatatatatatcataaatatacacatgatgacatgattttgatgaacaactttcattaatggcaaaaagcaagagacctagaaattgaggtattttgttgtttatatatatatagttgttacatatttaaacaaaggcaaaaagttgaaaaaagatacacaaaggtagaattaataatgagaaaagataaataataaaaaaaaaagaacaacctattcacttttccaactatggaaaggtttagtcaactatttccaaacctagctatgttgaaccacttttctttaacccaaaaaaaaaaacctaatatatttatattttttttatgagagagagaaagagggattttgacccacacaacaaagaagaagaagtacaagaagattattaattaattaattaatatgggatttttgaaagagtcctagcctattatcagctagtcttgacttataagcagaagttttatattcccaccatgtgaactctttgtacaaactctcttcatctttacccaccaaactaggtaatggtgcaattttctcactcaaaggtggtcctccaaaaaatatcatagaaagtcttgcttttcttgggtcagccaaaactctatgctttaagctcttgaattttccattagtcattacctgcaccaccaattataattaataaaaatattaatccaaattattttaattttttttacaccaaaagttgacaaccgacttatgtttgacacatggttaaaattactcaatctgactctgccatgtgacatttactggaccggacacatccgtacaaaaatacataaataaattaaatttcatttaattcatttataagaattagggtctttctaatttatttatttatttaaaaaaaaatagaagaaaaagagataaaatagagaaatgaaccacagaactgaagaaactttcaactcaataaagttgaagaattttgaaaaaagtaggaatttttggaattgggtttggattaaaaattttattttttatttttttttacctgtaaagaatcaccaacgttgataaagaaagagttttgatcaggtggaacagagagccaagctccatctttgattgtgatttgaaaaccagaagtgttgttggatctcaacacagaaatgatttgtgggtctgtgtgttcaccaaacccaatcaaattcctaccactcaaagctccaagctctggacatggtggataatgattgagtctgaaacacgagtcacttttctcatcactcaacattttactcagtacatttctcggttcaattcttaatccatcagccattaattcaagtatctcaaacgacatcgttttaacagccgttatatatttctccaccgccgaactattcaaaaacgacaaccaattagtcaaaacgacaaccaatatcaaaaacagagtaaaaaaaaaaaaatgaaaaaacagagtttttattttaccggaaaatttcaggattttctcggaaagtgaagagggttttttgatcttggtttgtgttgagaagaatatattcaatccaaccaatatcaccgtttcttccaattcttttactaccatatccaaatgggtctggaggaccagatttatctttttcagattgaggaagattgaagaatttgaaagcttcatcttcgagtttgttgatgaagtccattggtacaccatggttgatgactttaaagaagccaaattcttcacaagctttgattatggaggttttagcttcatctgggttagagaggtcaacaacagggatttcattgaagaaatttgatgttggtttgtatgttttgatatgtgagaaatggtctaatgctggtcttgaaagaacaaccatgttggtttggtttgtgtatgtgtgttttgttatttgtttgtttgtttgtttctcgagaaaaaaagaaagaaaatatgagagaaaattgagggagttatggtttatgaatgaggggagttttgggtttttaaagggaaattttggtgagtgagtttttgtgaaatggtctaatctaatgcatgagtgtgagaggagggaccaaggcgttactaactataaagagaagacatctgtcattgagtgtctttctttgcatttattctatcgagacataaatttccccaacttatattttagagcattgttattggccacaccatattacctatgtggcacgttttcagtggttaacgattttttttagtatttattaaattaaaatatacgaaactcgatattaatctgtatactatcttttgtgctatttggataccttaaagtatctcttcacatttttttatattttagaagagaaatgttaaaaggcactaacagtacctagtaccctcttcagtgtcatattacgaaagatgtaattatgtatcaggtcttatataactttagataataatttttaaaaaatattactaactaattgtaagatgccacctgttacttaagatcaactctctattagaaaggcactagtgatgttaaacgctattaatatacaagactttaatattaaattaagtcaataatcatgatataatcttttgtacactgtaattattttctaaatgattattaatgtaattaagcatcaaatcttataaaaataattaattatatttgagagattctatattacatttatgttagacactaataatatttaattacaatattatatatttaagagtttaaggtgcctaacaatataattgtgtaattgtgtaaaagtaatactatttcataagaataacatattattcttatggaagtgtacgtaattatataataactttgtgaatacaatctttaaaaaattgctaaaggcacccaatacctatgaggctatgacaattattgatatttactattcataatattaatagtaactatttcaatttgattgggtggtagaaagatactatatatgtacatatatgttataactatatggtttatatgatctgatatagaatccatcttaaattaatttgattggttgacaaaatttgtcatccaaatgtgtgtagaattttggtgtaataaaaatgtgtccacatatatttttactctatttattgtatatgttgaaatgaaaatataatattataattttgcatggtaattaatgtttggtcatttatcacataagaaatggagtattttaagaagaatgttgctaataaatcacataaaattcattgctttgtatgtctattaattattgttaatattattaaatgaaaagagaataagaaataaatatagcatcgtttttagtagtgatcttttaatgatgtactgacaatattttttaacggaacggcggagagagagagactcatatagaaataataagaaaattgttaaaaatgtattatcatgtcggaccacgttatattattattaatgtaattaaatattaaatttgatataatttaaaataaaaattttaaaaaaatattactaactaattataaaacgtcacctatttagtattattagcgtctaataactatatgtgttctataaaagttacaaattggaccctttattttattaaatgataaaatagatcttatatttttcaaaattgtacaaataggaccttgaaatattttttttatcaaaataaaacttaatgataatctgatctagagatgttatgaaaaaactggttacattttttgtatctgtttgtgttaaaaattattttaaagttggttatattaannnnnaaaattattaaaaattgagctcaaggtgctatttttaccattttagaaatatagagttcaatttattatttaacaaaataaaaaatccaattaataatttttataaaatctaatgatatgtatatgtatttctatgtaatgtatgtaccacgtgacatgatattttcagtgtatatatataacgtgtttttgtatatactaaagataaataaatgaattttctaaaaactatataatatataaataaatcaatgatatatatgttggttgtagttttcacaaataatatttggtgtagtggaaatttattgtttcttagtaatgtgtagaaaaataatatcatataaaaattaattaaaatacattaaaattatttatttagttttacaaataacatattacatacttataatgcttgacacattaaaatacatttaataaacatttcactttcacaaatcctatcatcttaa

SEQ ID NO: 14410 - DNA, 6948 bp, Cannabis sativa
  modified_base (6546)..(6550): a, c, t, g, unknown or other
aaaaaaattaaaaaacagtatatgtggtaattccccaatttttaaattataaataaatattgactaaataataacattattgttattcgtatttctagaggagtgacatgtggcgtcttcgactttaccaatagctcaatatggttagcctaaaagcctttccatgaggaaaggaccgacccaaacagaaggatgggcccaagtccatccaaagcccacaagacttgcctccgagatgaggctcatccaggtctcagaagccctccagcattcatcctgggacataacaattgtagccttctagatgggcgctgaacgcgtccgaaaagggtactccaagaggcgcctcagaagcctagtataggatgatgtggctgccctttgacacccagtctcaccgaatcagggtttgtcccatgtgttagagcataagagtgtgcgcactaccaaaaggaaaccttccttttgtctaacgacaaaaacttaacactacaatacatatacgtggcgtgcgtcaaacacttgtcaaggatcgcgtggttcccgggcgtacggaaagccttcatcccacaagttggacttctgctggtgggcctacaatcatgtattttatatgtttaccataatagtgggcctaatttacacagaaaccctagtgggtcacgggcatactcggaccctgttcttagcctataaatatcaccctataccttcatgccaaggattggaatctaagaaattagaaaactagaaagtgagaaaacactataacaagaagttagggttctttaacttgtaaaatcccattgtaatacattaaggccattcggccaaatattagaatttcttagtctattagtctatttaatttcttagctatttaattagttttcaaaaatctcggacaatattatagtgctttcattgagagctgaaggaagatctgaagctaccttgtgttcgcaacaatggtggctacaaggaagaccaccgttgcacaacacactcatcagggccaagatgtcatcatggatgacgtcaacctactccctctagggcacgcttagtcgagcactgtaggggatggggaagcgtttgaagttagtagccaaccggttgatgaaacccatcattaagaacaatatgttgagaagaaccctgacgacaatggagaaacggaggaggacgacagtaagatcaaagatgggtattataaagatggatattacaatgaacaagaccctaagtggttcgaatgttcggtgagctcactgaaggtcaacaaaagttggcggcgtaagaagaattctctctctatatgcagaaaacattagcatggttgcaagccagactcaacgatgtggaggaagactctaaagagaatgctctagaggagcctatcgataaagagaaaagggaaaaccctgctaacaccaaaccatgcgctcttgaaaaggacaagggaaaaaggaaagtaggtgaacccctagcaaaaaaaataccccagttcctcctagaaacaacatggccactgatgcctttgggcttggacacccttctgctctacgaggcagatttgtgcaaaataataggcctgacactcaagtgcaaaggcctaccattaaggggatagaaaaactaccctagtgattcaattaatcaggacgacgaggtagaagagatctcccctaaagaaaattggtccactgttgacctccttagtggctcaactctaagagagaaaaatccaagggagaaaaggcaagaccttgtgaaaatgatctctggaaccacatcaatgatcggatccatgggtttgagcttctgaataatgacaccaaataacaaaagcttgtgtggaagtagagtggagctatatctttgtcagaagatgaagatctgaaaccctgcattagacaaatcatagtagctctgttaccagaatattttaaaattccccagatgaagtgttacgagggtaggatggaccctagggcccatctatctaagtacaattatttaatgcaagtggcgagagttagtggtgatgtcaagtgcttgtgtttctcgctaacattaacccaatctaccgagaatttgtggaaaaggcttccttcgagatctgtctatgactcaaaggagttgtaatcaatcttttagaaatagttaattgctacaaggtattatgacatggaggttagatcccgaaccagcctcaacaacaagcaggcaagagtctaaagaacattattcaaagaataatggaggcagcaaccaaaaccaaagttagcgatgacatgaaactcatttccctccagtctggattgactgtaggctccttcctgtggagcaaaatacaaataaaaaagagtctagacactatccaagtttatgtccaaggcccaatgaatcattaacctagaagatacatatgttcaggcctttggagtcgcttcggcacctactccaccaaccactaattcgacttatactatgcaagtttcaatttcgacagtcacacttctcaaaatctagtacacaattcccactttctacgaacccatttcctctaggcacacgcctacacagactaatttctctaggtttggagccatacagactggatgtagtgtcgctcgcagataagcaaagaaacaaacaaaagttataaaattgaatatgagccattcctataacaaaataagtgggaaaggaaaaaactcaaacgaggctccaaagaaaggaaggattagtatgagcaaaaatacactgaatacaccatattgattgacactcaagaaaatgtctataaggcgacatgcaacatggttcattacaagaagcctcccaggatgtataatggagggaagtagaaaagggaacaaagaaaaagatgtgagtaccatgaggaggtgggtcataccaccaacgagtgtgaccatttgaaggatgatatagaaacattggctagagtaggacacctcggccagtgggtggagattcccatcatctatcccagacgggtatcgcacacagacaacttgtcattcccggatagcaagcagccataaatcctccctagggagtaggtttccctcaagctcccaaaatacgacctccaactttacctgctccgccagtgcaggccatggtagtagtactattgcctagacttgggaatccctaaccacctggattagccccgccacctgttgacggctacatctcaactatatctagagggccacacatcattggaagcactcacaatgcgtaggaaagatatttgaacgagttagatcacgagggggaagtatgtgtcttagtacagtccctaacctagcatccccgaatgatggaccttcccatcactttcataaaataggatgacagccaagtaaaatttcttaatattgactcgctagtcattgaagctcagatcacaaataagaggatgtccagagtactagtggacaatgaaagctttgtcaaaatattgttcaagttcaccttccaagtgattgggttgactgaagctaacctgatgtcctacccaattcaacttcaaggctttaatcgtgattccctaattccaatggggaaaatccagctcccaatcactctaaatgggggtgtagccagaagttccagtgccttcgcatttaaacattgtacatttgcagtggtagactgcccaactacctataatgctatcctacgattccttgtattagtcaatttcagagcaattacttccattaggtagttttgcatgaagtttcgatgtgataatggaagtgtgggagtagttaaaggcaattataagagcattaagaaatattacaatgtctctgccaaattggtatatatggttagagaagaagttgaagaggcccttggaacaatcgcccaagttagacaagaagtgatccaggaagaacatgagttggatctctaagtaggggtagaaagaatgatcaaaccacggaggatgtttaggaagttagcatcagcgaaatggattctaccaaagtcatcaaggtgggaagaaatttatctctagtggtgagagaaaaattatttccacaattagaaagaatcaagaaatacgtgcgtggagccttgcgtatataactagaatcagactgaagaacattttccatgccttgaatattgatgaaaatgtgacgtcagttcataaaaaaggccattagatctggtacggtctgaagcgctaaaagtagaggtcgataagttaacatcgatagagttcctttaggaagctttgtatcccatttggttggcaaacccagtgctagtcccaaagccaaatacaacttagagaatgtgtatcgactttacgaatctcaacaaagcttatcaaaaagactatttaccccaaccacgagtccaccaaatggtggatgccaaagtccaggtatgaattattgagtttcatggatgcatattctagttatagttagattaagatgcatgtagcagaccaggagcacactagcttcaaaactgacaaaagagtgtactattacgtcatcttgccttttgggctaaagaatgtcatggtaacttactagaagttggtcaataagacgttcaaagatgttctaagaaagaacatggaggtatatgtggatgatatgatggtaaaatttgatactttaggagaacacaatgatgacctagaagaagcatttgccatcattcaaaagtacaaaatgaagctcaatcataggaagtgcacctttagagatagccatttttatatttatttatttttccatgaatcaatatttatacaatatatatttatgcttatatatatgtttatatatattatgtatgtgtgttgatttgtttatcatattatacattgtaattttattttcttaatctatattttagtatttttactttctatgtgttatattttgttgtacctttattttctttctaaaacttatgtatatgtctaataatttatactttatattgatatagttttcttcatggaaaaccttacaaaacaaagatcaaaataacttgatatttcgggaagaattatttatcatggattcttgatgctgaaatccatttagatgctatgggtcttggagacaccatcaaagatcaaaatactgaaacaaatcaaaataaggtcaaggttatgattttccttcgccattatctctatgaggggttaaaatctgaatatttaaccataaaagatcctcttgtgttttaaaaaagtttgaaagaaagatatgaccatcaaaaaactgtcatattagcaaggctaagaatgattggttgcacctaaagttgcaagattttaaatcagtaagtgattataattctacaatgtttaatatcacttctaaattactgttgggtggagaaaaaattactgactatgaaatgttaaaaaaaatacatatactacttctcatgcctctaatgtgctcctacaatagcaatatagagaacaaaattttgaagagtattcaaaattaatttcatatcttctagtagttgaacaaaataatgaacttttgataaaaaaaattatgaatctcgcctaactgggtctacccctccctgaagtgaatattacaatttctgataatcataatcatagtcgtagtcgtgatcataaataaaataatagacatgttcgtgaccataatcaaaattatggtcgcagtcgcagtcgaaacaatatttggcattgtaattgtcaaaataaaaatttgtatactccaataaaaagtacaactattgagaacaaggaaaaatgtcctcaaaataaaaatcgtaaaaattctgaaaacttatgtttcagatgtggaatgaaaggacattgggcacgtacttattgtacggcaaaatacattgttgatctttatcaagcatctatgaaaggaaaaggagaaaatagaagcaaatttacctatcaatatgatagtcttttcaaagagcccttgaatattacgcacttagatgttgcagattttttttaatgaagatctcattcatagcaacataaatatcgataatggagatggaaatgtccactattagtcacttttcttttttatgtttatttatttttattattattatttatttactctaaggtgttcattttatttgggatatttatgtaataaacttttattgtttaaatatttatattttgaacttattatgtctttctttgttgttggttaatgaaataatggatatttgtcatcttatacatgattccacaaataatggtgaggatataagcttgacggatagcacaaccactcatacaatacttaaaatgataaatatttttcaaattcatcaagaatgaaggtaaatattaatacaatatcaggcactagaagtttaattgaagctttggaatagccattttattgatgcctagagaaataaaattattatagatgatgccttattatccaccaaattaaaaaggaatttgttaagtttcaaagatatacgtcgtaatggatatcnnnnngagacaatagatgaaaataattttgagtatctttgcattacatctattatttcaagaaaaaaaatatatatcagaaaaattatctggtttgtcttcagatttgtacgttacacgtataagtaaaatagaaactcatgctattgtgaacaagaagttcacaaactagaaaaatttatttattgtttggcatgaccggttaggccatcccggttcaatcatgatgcatggaataatttagaactcacatgatcatccattgaagaaccagaagattatattattcaatgagttctcgtgtgctgcttgttctcaaaaaacattaatcattaagccatgtgggcctatttgtccaccatgtgtaccatttagatattttatggtattgttagacgcatcaa

SEQ ID NO: 14411 - DNA, 3712 bp, Cannabis sativa
atacacgtttattttgacccagtaaaagcggactaatcacagctgtgtgatattcaaataataactgcatttactttacgtgatatgtaattagacactacgatttcaggggataatcgttgtgaagatatcagtcaactcagtaattaactgcctactatgtaattataaacagaggcaagatagaataaaaaaggaacgaaagttcataagaaaaaaggccctagaacaatatcagaaatctaataagattaactcatggactatgcagaattttaactgcaaaagcacgcaaaaaaaattttgtgttcatacttttttctttactgtctttattttttctgtgcaaatttacaactgtttaggctcatatctggttaacgaaaatttacgttaacagttagccaagcaacaatcttagctaaagaataagcaacgtttacgtgttaatttagaaaactatatattttgtgaaaaattaattaccaaaataaaattaactaattaatatacaaaatactttgtcccaataacacctcttcaaactatataacgtggtcaatcattataattttaatgaaaaatcaagttagagaccagagggggatatataaaattcgatatatatacatatgtacatgtagcttttatattaaaatgaaatggatccttttcaaaaagaaacaagaaaaatgtcatgatcattcaaataaaagctatctctctcatgcatgtattaattatttgaactaaattcctggagttatgacccctaaaaaatgtaacatcaatactccctcatatatatgcaaactctaagtagagtaaatccaactaccaaaatgctatttattactcaatccaacaagatttttatataatttcgatacataaaaattaaagtaccaagaagttcttatacgattcacttcaactccaatattaccaaaactaattttatattttaatgtgagaaaccaaaaatataacattttacaacttttttatttctaacaaaaaaaggattagatatagtagtggtcatgcataattaaatccctcttaaagtatactttagttcattttgctttccaaaatttcggctcaatagtatgaaatcatgcattcaaatatatatgaacaacttatgtatatattataaaatgaactgtaaactttgactacatgatgatgatgtaattttctatcttggaaaagtatgatttacgtgaattaataaagaggaatgaacaaaacaatgactttcaaagtgtaaagccaaagcaattaattaagttccaaatattgaggtaatttttttcctttttttcttctcccaaacaaaaaaatctttacgtgttcctgcacacatggtacgtgtcccattcttagatatcatcaaaatcaaatcacagttatatttctagtgtttacagagcttagagaacaagcataactatataatcataaacttaataattattaaaatattcattaattagaagatttcgaaaatcaatgtgattaaaaagaaagtcaaatctaacaaaaataattttaccaacctcgaaatgctacatgtgtgacaagttggtttttttgcactaattattttttatttatttttgttataagtacttattatcaatatttgtataatttattattttaaaaggaatttcatgaaaacgacacaatccacggcagcaccgccgttaagataatttgtctatactataattaatttcattatcaataaaatttaattttttctttattaaatactaataataattaattaattgggtactgtaaaatagaccttatatttatctaaaaaaaaaaattatgcgtcactttatattattctttatcctcaatccatgcttttctgcaatacatgatgttaccgtacatgaagatttgagcatatctaaagaatttattgtacctttcctttatgggtaggttttcaaatttatttatgtaaattaattagtataattcattctacgattccttttatattgcttatattttgattttcattcacctaatttaataacgtgtgtgatgttttcataacacgctatattttaaatggcgctgtcttatgtatagtaatggttttctttatttttatataaatgatccgaaatgagcttcatataaaaatttgatgaccattcatgaccggattcatcgtcaaattatattatatatataatagttagaaaattaaatatataagaatataatcacaaactatataaatataaaaaaccatgcagagtagctagggacataactttgtagttggtaactagattaactttaaggtgcctcaaagttggaataataattttctttttatttttatatattttctttagagaataacataatttataataataatatataatcaaatgacatgactcgtacctacatatggtcatcttttttattttagtgtgttcaaacaaagtagctagaattaaagagatcataaatatacgaattgtctcgtcatcattagtattatacgaatttattacatatcactaactctgcagtatttaccagctgccattatttatttttttttatttaccaatcacttgttggcttagtgtttgaggccttgtttaaaccatacaagatcaagggttgaaacccctccaaggtcacatatacacacatatatatatatatatatatttatattctttggtggtatagtgtccctcattagtggtagtagagtcaagctctccttctttaaggttgcttttggatagttctgcaagcagtttcaatccagaaatacccttgtggtttaattgttgtaatatgagctattcagttttatagttcttagtgtcgatcggtacatatatgtgtactatattgtacaacctagtattttttcattaagtttttctgaaattgtagttattataagagtattgttattaccatcagtgcgcaattacttttaaaaagtaactttacgatttgttagtaatattttataaaaaaaatagagtattgctagtgggaactaatagtgcctagtacttttaagacgtgtcgccttgtgattggctaacgatacctcctaaaagttattatattaaactatatgagacctgatactaaattaaaccaataacaatattaacatgtaggagagtattttacactaccttagcatttctctttaattacattaaattctgcattataagagaatgctaaaaccagtggtctttaattagcattcattattattaataaatggtattggtagaattattctacacctagccagcaggacctaataggtaaaataagaagtagaccaaacaataaaataataataataagagtgattgggaagaaagaaaaaagagtgatatgatgattttggagtcaaatgtatacactatgtagcatcctaaataaggcccaccaaaaaagtatgtatcgtccactaattgagaattgaggcatacattgactaattaacatcatgcatgaataatatattatcatatccacacacaaagaaacagtaataataatctaattcatgtttacatttaatctttacttcttaaatttattatcatcgaatgaaatatgcagcatatgtcacttaatttcctatatatatagtaacaactattaaacccaaacctgattttta

SEQ ID NO: 14412 - DNA, 5362 bp, Cannabis sativa
tttctccctggaaatatttttttgacagtgtttgaattccaacctgctgttttttgcagaaaatgcggcaagaaagaatgaatcttcgaactgctgagctactacgccaagataaagaagctgatgaccagatggtagcagcagcaattgaacgctctagaaatcttgacactactgtcaagggaaaatacagcatatggaggagagattatgataatctgaactctgattctaccttgaaacttatgcgagatcagatcataatggcaaaagcttatgcaaacattgccaaggaaaataatgatacgagtacttttgatgccctcatgttacagtccaaaagaagccatcatgctattggagaagcaagttctgatgctctgagcttcaaccaaggtattatcggtctttaccaatctctttattaaaaagcatatgccttttcttttctcgtattcatagtttttcttcattttttactactttagtgcacttgagcatgcaaaagcaatgggtcacattctctccatggcaaaggacaaattatatgactgccctgtaatggcaaggaagtttagggccatgcttcaatcaacagaagacaatgtgaatgcgcaaagaaagaaaagtgcgttcttgatccagcttgcagcaaaaacagttccgaaacccctacattgccttcctctgcaacttgcagcggattacttcctgcagggctttcataagagagaggatattaacactgaaaagcttgaagataattctctctaccattatgcaattttttcagataatgtactggcaacatcagtggttgtaaattctactgtactgcacgcaaatgaacccgagaaacatgttttccacatagtcacggataaactgaattttgttgctatgaaaatgtggtttctgatcaactctcctgctggagcaactatcaaggttgaaaacattgatgaatttaagtggctgaattcctcttactgctctgttcttcgccagcttgaatctgcccgaatgaaagaatattatttcaaggcaaacgatccttcctccctttctgtgggttctgacaatctcaaatacagaaatccaaaatatttatccatgctgaatcacctaagattttatcttcctgaagtttacccgaagttggacaaaattctattcttggatgatgatatagtagtccagaaggatttaactcctctttggtctgtggatttacaagggatggttaatggtgctgtagagacctgtaaggagagcttccataggtttgataagtatctcaatttcaccaatccaaagatctccgacaacttcgatccaaatgcctgtggttgggcatacggcatgaatatattcgatttgaaagagtggaagaaaagaaacattactggaatttatcatcgctggcaagatttggtaagcatactaatcttttcctttgatcactgcatttctgttcttcacaagcattggcgtgcataattttagtgattcttttatgttacatgttaactgatatgagagctttgttacagaacgaagatagaactctttggaaactaggctcgttgccaccaggactgatcaccttttacaatctcactcatccactcgatcgaggctggcatgtgttggggcttggctacgaccctgctctaaaccaaacggcaatagaggatgcggctgtcattcattacaacggaaactacaaaccatggttggatcttgctatctccaagtacaaggcatactggtctaaatacgtaatgtttgataacccttatcttcaaaattgtaacattagtgaataatggttctttttcatactttcctttcttctaacaccctgtaactcacacctttgtataccaattttttttaggggggccaagagtcactcttgtaaaacctgataaccatagagagaaatataattttgtttagtttttatatggtaaaatgattactaaacgtgcagaacaaactagggcaaaatagacccaatttggaatatttcaattggcaaagatgcccattatataatactattattgggtaaaatatttatgtttaacacgcacatagttcttggcgatgcgtcccacaatgatcccagtacacttgacccaacagctctgtaattggagcttgaagctcaaagagtcatgcaatattggaaaatggcaagaagtactttgccaatttcatgagatgaaaaaagctgcaactactcaacttacagaccctactgtgtttccttctattctaaaagcttgttcaaacatttcaactggatatggaaaatcagtgcatggatatttgataaagaaaggcttagaatcacacacttccattagtaattccactatggacttgtactttaaatctggttattttgattctgcattatgtgtttttcatagcatgatgagcaaagattcagtttcttggaatattttggtatatgggtaccttaatcagggtattttagaagaagggttgtggtggtttaaagaggctaggcttgctgggtttcaacccaatatttcaaccttggtgcttgtgattcaagcatgtcgtaatctgggtgagcctaaagaagggtatacattacatggttatgtgattcgaggtgggattttggctattcattcagttagaaactccttgttgagtatgtatgcaggagttgacatgaaaagtgctcacaacatgttcgatgaaatgcttgacagagatgttgtcgcgtggagtgtgatgattgggggttacgtgcagtgtggggaggctcaaattggtctgcagatgtttcgaaatatgatatcggaaggtggcgctgtactaccagacgaagtcactatggttagtgttctaaaagcctgtgctgatttaggagacttgactatgggattatcagtacacggattggtgatcctcagggggttggactgtgatctatttattgggaactctatggttgatatgtattctaaatgtagtgattctgattctgccttcaagattttcaaggagatgcctcaaaggaatattgtatcgtggaattctatcacaactggatttgtcctaaatgagaagtatttagaagcattatcattgttctattctatggggaaatatggaattgaagcagatgaggttacacttgtgaatattcttcaaacatgtaagtattttgtggagccattactatgcaaatcagctcactgtctaatcatcaggaaggcttatgaaatgaatgaaatggtgctcaactcgctactcgatgcttatgcaaagtgcagcctcgttgacctagcacgaaaagtttttgatgggatcgaaagaagagatgtagtttcatggagcactatgattgcagggttcacccatttcggcaagccagatgatgcaattgctgtgttccaagaaatgcagaaggaacaggagaaacccaacacagttaccattttaaatcttttggaggcttgttcactattagctgatctaactagatccaagtgggcacatggaattgcccttagaagcgggtttgctttagaagtagctgttggaaccgcaattcttgacatgtactcaaaatgtggggcgatagaagcgtcgagaagagccttcgaccaaattctgaagaaaaacattgtctcatggagtgccatgatagctgcatatggtatgaacggtcttcctcacaaagccttagcgttgcactctgatatgaaagttcacggtctgaatccaaactcgataacaactctctgtgttttgtctgcttgcagtcatggaggcttagttgaagagggcatttccttcttcaactcaatggctcaagaacatggaattgagctaaaaactgaacactattcctgcctaatagacatgttggctcgagctggaaagctgaacaccgcgatggacatcataaggaaaatgcctaataaaggattagaggctggtccaaatgcttggggggcactcttgagtgcttgtaagaactataaaaacagccaacttggttcagaagcagcctctcgtgtcctcgagttggagccattgaattcaacgggctacttggtggcttcgagtttgtatgctggtggtggactatggggtgaggctgcaaatatgagaaggttgatgaaagagagaggagtaaaggtggttgctggttatagtttagtgtatgttggtaacattgcatctaagtttgttgctggagattactctcattcacaatatggagatatccattttatggttgaattcttgcatagttgtataaagatggagaagaagaatgatttgacagaaaccatttagttttctccttgtgaatagtggatatttgttaagcagattccaagcttggttactcatgtaagaattataaaaggaatagcctcacagtccaattaagtgtcacaaggaagggaaagaagtaacaaaatagatatgtaacttggaaaacaaaatatggtcatggcattattcttattatttctttacaatgaggatgatgatgtagtgtaaaatataatacagactctacatcaaaaattgtcattaaaacacacaattataaactagtgggataacttttcttttgttgccaagcaaagtatttatttttcttttggtgttgtttttaagagaaatgttaaaagagaattagtagtgtctaacactcaaattattatcgataaaattatatattttactttatgtatttttttttaacaagaattttataaattttaatttaataactattataaaattaaaatttataaatcatgtttcttaaactttgatatttaccaaatcatacccgaatttttttatgtacacaatcatgtattctgaacttttattcatgttaaactttccttactaaaattgaacaaaagtctttaaattcaataattccaatagttaagaaagagtttttaacgaccttaaaagttcagggaacatttatcaaaattcggaagtaaatcctaattagcttatattttacaatattatttagcttagttttatcaaaatattttaaaaagtttaacgatacacaacacaacttttatagcagtctattatagatgcccaaaaccaaagtaatattctcatctcggaataaattttatagggatgattttttaaaattagggtgtgtttggaagtaactgtgtaattactaagtagagtaattactagggtggtaattacacaatgtagtaattacactatattttaaaatgcaagatttgtatggatatgaggtggtaattacatatgaattcctaatatcttgtttggcaaaatagttagt

SEQ ID NO: 14413 - DNA, 11268 bp, Cannabis sativa
ttttcggttccacgtcatcaccgaatttggcggtcggtttcggtttcagtttttttaacatggcggtcggttataatttcttatcattggtactgcgcaaggtttgaaaaaatctatattgggatcaaatgtgatctctttaatcaaatcaaaacataggattgaggcgtaagtctttaccattcaaaatcataaattttaaaaatataaaattaataatcaatgatgagatttaaagcttaaccttagtttatagaagtcacataataagaaagcaaaaactgtaatattttagtagcctaggataaaactagacataatataaaagtctacaattctgtattttgtttttattttactgtcttactagttgcttttagttctcttaattttctattgtttcaagcctagtggcccacaaaaatataataaaaacataaaccattttttaagcccaagttaagtgataaaacaggggagaaaaaaggttccccccaatcaaaacctatgcataagttggttttgaaatccaacaagttttactacctttcttcacgcctcaaatgaaattggttttaaaacatgggttgtgaaagatttttactaactgtggcagaaggctaccatattgtgagatttgagaaaattatgagatagttattgagattactggggtgatatttcattatcctatcccagattaaatttaatttcaaatggtgccactggttgttgcagccaggtctgaaacatgcataatttcctgttcatatcatttttgttgttatcttagttaaggtttttaacactaagtttcctgtgaaaattttcataggatgttgacctcttcaccttgtgggctgaggagacgctgattgaagactatttggttttggacattcttttcctcacttattatgagtcattttgtatttgcaacggtcagaggtggaaaacattgtgctcacttttcaaggtactttgtcattcttgtattggaagtgcttcttaaagcttttctattcttaatcattgctccaaactttctttcaccagggaattttgtccgggtcatataacttaagaaagctggaagtttcaactgaagcaatacagtcttcttatcaagcaaagatccaactgttacttgtcctaatagaaactctggacttggaaaatcttttacagatggtccatgatgaaactcctttcaggtgttctgctgatcattagtttcaccttcaatgtttttgtgatagtactgttctatctgtattggatctttagaaataaagtagaaaatttatgttcaatttaatggacacatctataactatatgaagtgataaaagtaatactatccatctctttttcacctgttcttcctttaatgtaaaatgcacgcactattcttcagggaggtttcttctcatttttccttgattgatgtccaagagatggatacgatagtgtcaagtcttaatgcttttgaaactaaggaagcaggcccactaattctaacatgggcagtgtttctttgtctgatttcatcacttccaggaaaagaagaaaacaatgttctaatggtatgctcttcttggcttcttttcccctctgcactatactgttacaatatttaattaacactgtttctggcaggagattgatcatattagctatgttcgtcaagcttttgaagctgcttcactgagatcttttcttgagatccttgagagttacttattaaatgagtcagatgtaagttatcttagtctttctagtttctgcttagttagttgaactgtgttagttacctaatatgagaaatctctctcttaagttgcgtttggttggaggtaatgaaatggaaaggaatcaaatttcatttcattcctttttttagttgcattttataatattggaatgtcattccaatggaatgatttttccatcattttagtggaatgactattttattttgaaatggaaggaaagactattctaatgcaatatgagaaaaaatttaatttttttttatgcatttaaattttatttcattcctatttccattcctatccatatgttttcattcctcccaaccaaacacaaccttagttcctcacttgagtttctattaagcagtttgatattagtttgaagtctgatattttttttactttgtttctttccttagggacctgttgctggttatcgaggtgtattgagaacatttatttctgcatttattgcatcttatgagatcaatattcaggtagttactttaagtatcttgaatgagctgaaggtgtttattttagtttgttttaatattttctgttgtctatgttgcagctggaagacagtactcttaatttgatactggatattctctgcaaagtttaccggggagaggtttggctgcatgatgattgtgtttcagggtcattcattgattattttgttgaattttcattggtgatactattaaatttgatatttttcttttccttcgtagtttctaattggatgttgatgctctttaatttttcaggaatcactttgcattcagttttgggacagagaaagttttgttgatggtcctattcggtgtcttctttgtagcctagaaggtgaattcccctttcggattgtggaacttattcgcctcttatcatccctatctgaaggaacttggccagcagaatgtgtgtaagttcctttattagctttttctagtaatctcattggttttgattagattggttcatcaattggttttcttttggtaatgtttgtactaatggtttttgatacttttgaaataatataaagatgtgtcttcttattcaattgtcacgtaattcttgcaaattttgtgtccttcatgtgaacaggtataactttcttgataagtcagtgggcatttcatccttgtttgagattacagatgattccttggtggatgccacatcccaaattgttgaaacacgtgctccattgcatgtccctggtattgaaggtctgctgatccctagtagcactcgtggacatattttgaaattaattggtccaaatactgcacttgtacgatgggaggtaatggtgcaactgcattctctaatctgtttttctatttctttcttctagcatcaaatgctggtttttaatgagatgatatgtatttttgtgttttctactgaatgagtattgaatttggtatcgtggaaatgtgtcaaatttggcatggtggaaacatattcaatgtggtacgaaagaaatcttttcctccacttgtttgtgctcttatcttatacatttgtagtaagaatgcattctgtctttggaagttggtagattgttgctgatgaagatttattggcaatcctttttaaaatgaaagtgaaatcaataaatggaaaaattgtcttattgatgacgaattatggacaaattgtgtcttgttcttttgtagggtacaccctggataaaacatagcttagataattttgagtgctatgattcatgatgataggaaactacttttgagggatcaggaacttacgcacgttctaatctaatgaatatttatcctgagcttttaatgttactcttttttgtgctaatggatgcatctttggtccagtatacacattctggggtgcttgtcctgctgctgcgtctagcccaggggctttatttggatggcaatgaggaagctctacttactcttgatctgcttaatcagatgatatcttctaatgaggtgataaaatccagtgtttcttaatttacttgttccctactggatttttgttaaaacttgtgacatgtgattagtttacttcttggttgttcatgcattttcttttggattttattttaccgtatgtagggattaaggtctgttaactattttctgctctttggaattgacacaaatgggaatcttcaatatgttgtgttttgattaatattttatcaagagttccttttcttgataggcttgtttgatttatttatttattttgtataaatttcttagtttaccttgcttttttatttatattttttcctttttgctctaggctgtgtgttttgctttaatggacattggcaactcatttcatgctcaagaaactgctttgagtgggcaattggaaagtcgagtgtggtaagtactgttttttttttcctatgtactgtgttatgttagtttcttgctacgttaatgttcttctctcttatcttttgcccagggttgttgagatcatctgcactctggtcaggaaattatctcctaatcctggtagtgctgctataatggccataggtgtcaacatcttggcaaagatgttgaaatggtaaactagttcatatattactgctttttctttctttttatgttgtattttctcctctttttcatttaatctcattttagctgtagaacttatatataactcttttttgcatgaagttcggggcgaatttgattgagcattttaaagtgaacaccatatgctagctgttttaccaatgactgtaattaaaaacataatgctcactgtggaaggatagtagttaagttcatctagaacattgtttgatttaagatcaaacaaatataaaaaaaggtcactaagagcatcataaccatgtcatttgattttggcgattttttttgcttgttatagagatgtagctgtatttttccaccagcttgtttcatatgatttactgatgcaattgtttcagtaaggctgtagggatgtgaatgctacaaaccatggaacttcgtggctttaaattattttctgggcctcttggcatatacttaaatagtttgcttgccagaggccttgcttctgattatggtgacttttacaatgaatgaatatgtttttgttttttgttttttggtcagttgcccttcatacattgctgcagcagctgtaaaggcaaatttatttgatgtggctttaaatacaaatattcttgatactggctctaataattccttgaggtaaggccttaagttctatgatttgaatgtgcatttccattctgaactggatgtatgccatcaatttgcatgttgacttgaaaaaaaaaagttttgtttattgacttcgacatatttttctgtatagtggtctaatgcataatgtgaaatgaacctgtattattacatttttttttatttcaattgttgttcctcatttcaggaagttcaacagttcaatatttacgttattctttattttatccattttctgaaatttgcatttttttgttaattctacttcaggcagttcagtagtttagttatttccatgttatttaatcagtacatttaatttctccattggttcccaattgtgtgttgtttcttttgtattttcatagatttttctatctggttaaaaattcttagtttttgctccctgtgagtggcagatgatatatgttattttcagtatgtgtatcctttgtcttggtaaacgtaaaatctgtgttataaaatggagattgtggtctaagtatattaccttatttttctagcggatcgtggttgctttctggaaaattggcaacaatgctattgattgactgtgagcagaatgagaataactgcttcttaactacagcaggtatgtgtaggagtatgcaattaatgtttcatgtgatcaggtcaatgatgctttatattgtgtggacaccaaagtagtacatgttgtgatgtgccatgtaaaatgttgcagtgctggatttcacaatgcagctgatggaaacgggatttgagaatgacactgttcttgcattagttgttttttctctgcagtatgtccttgtaaaccatgaatattggaaattcaaggtgaaacatagtcgctggagaataacattgaaggtataccttgagttttaccattgaattctaattggttctctctttccatcccttttttttttattattatctttgtccctcaatagtatagaaaacataatgcagttagattatttaacttgttttttaaaaaatgatatattattgaagataataaattcaattttatccattatttataatttatagttgtctttatttgatttgcaagttttatatagttctacttctacacattggaggttaatattctatggcaggttgtgcttgacaggtcaatctgattttctctccttttttcaaaaaatattttaggtgcttgaactgattaaaaaaggcattgcgatgacatcatactctggaaagctggttggggtcatctgggacatgttactttctgattcttcaatccatagtactctttttcggattgtttgcacgacttcacaagcgttggaggtctgaatgctgattctatttggtcagagtctgctatttaattttgttttcttcactaatttgagctttatactttctgtaatcttgttcttcttttgtcttgtatttttccctccgtctcgcagaaacttcatgttagccgtctctttgatgttatggaaattgaaggtttatcacttgctatatcgtctgttttggagattctatacaatgtgcttgccaaatttcccaaggtacattgttaattaaacaaagagttactttctattctttgaccaagttggaaattagtaacacaggtgttacaattcttggtgctattgatatatgatgaaaaacccacagacctgcttagcaggcccaattttgaaaccgggttttccaccttactttacagtattaacaggtgtgtgaaactataacaattgctatgagaagtgctcatggggggatttgaatctcagccattctggaagcaaactacatgctaaacatttgagttactcttgggtatactgtaaagcatattagtaaccttctttgttgcaaagaagagtaattatattctgatatttttacctactatttgtttaggaccagaaaatgaaaattttgtttgtcttaatctgcaaaatgcacatttgtttataggattctctcttatgattttggttgattaggtgattatgtacatttttttacataagtctctctttgtaattgtaagagatgatgtcctgttcttttacttttcaggatacatcttccagcctccccatctttcttcaatcagtattgtcatctgcaacaaaaccaatatctgtagttgctgctgttgtctccttggtatcttattttcgcaatcctgtaagtattctcttggtgcttgaactggaagtttttttcatacaatgttttttcctcttatctgaggggaacttctctgctagttattcattcaaatacaacacttgaagattcttttacttttttggtgttctttttccattgtggtagtttgatcttttcagtttatgacccatactattcatcaccaacattttgtggagtgtgtatgtaaattgtatattatatatataggttttcaataacataacgggggagggattagtctaagacaattgacctctttctcttttttcattatatatatatatatatatttgtttctatctttaataatgaaactatgattttttattaaagaggaagaagattgaactaggcttcctctgcctagctacaggaaagcaatataaacttgaatcacactattccattggacagtagatattaaaagaagggttttggtgtgtatcttttttgttggaatcaaattttgcttttaacacgaacggaaatcattgtttcttaacgtaagtaaacttcattgattctgtgaaaatcactagtagtaattttctgctgattgaggaagacttacattgtgtgtgtgtgcagttgtcttattttgttatttgttccatcgtgcttgacctcaattggtggggatactaaaaagtgaaggtctatgcatgtaaaatggaaatcttgcctgtaccgtatgcttttgattccatttttagttttatgattgtatgtaaacagtggctatacctacattgttggaaatttttactaaggagttctagcttatccatgcagggtatacagattggcgcaactaaagtactttcaatgctgttgatgacggcagatttcttgccagcatatttttctgcaagcagctttggtttggatgataaacaggtttagcgtgtttgaatctgcattttctttactgatctttaatttttatatttaaatgacagagtcattgtttctaatttaatattttttattaatacaccatttaggttactgatctgaaagattctgtaagctttattctactcgagcaatctgaagaaaatgaagacttatttgttgctactgtcaatcttttcactgctgctgctcgttatcaggtgtgcagtgttactttttgacatgtgtatctgttttctgctgtcaataggtgaatcgctcttgggtaattttcagttgttcttttttgggattttctgattaactgtttatgttgaaccttctgctctattcagcctgctttttttattgctgtatttgccaataaagagaatatggacgtccaagcaagtaatgctggtggtgggaagctgccagcaattgaggtttcctctggggcagtagagtctaaagattcaagtcttgtagatgcagtactttgttatattgtaaattctgatagtcatatcaataagtaagttcttctagagacatccttagcctggtttatccttcaattttgccgggttgctttttaactattttgttacatattttgattggtttattctttattacagcaaaccctttgtgctgcttaatgtgctcaactttttaaaggcattgtgggaaagggcggcccaatatatcaatatattggcgaggttgaaaagctctgagaagttctggaagcaattgtcaaaatgtgttccactaacttctccggattctttgcctgatagcctgactgagatggaagctctaaatcaggcatacagatatcaatgtcaatcttccataatggaaataatggcatatgacatgtttctgcaaaaaaagttgtcacaggtggagtcacaaaaaaaacaagtacctgagtcaaagggaagcactgataaatcaaaagctgcaaatctatatgatcatagagatgttttatcaacatggtgtcacggttctgtcttggttaatctaatcaagttacttactacttatgactatgataacaaatcattttatcatgcagaggtaacgatattaaccccttttgctttttacttgatcatctatttttaaatagagtttttggcggctaaatcctttgaactatcatttcacttgcatttaaccctttaaattcaaattttagtggtaaaaccttccgaactactcaaccgttagcaaattttaggtgtcattcatttaccacagttaagtgctaatatggactgcgtatgtgtatattcttgtacacatggtacattcttattggtacacctaatattattatttaaaaattataaaaataatttcaaaattagaaaaattaaaaaaaaattgtttttctttaattcattattttccatattctttttctcttttactaaataaataaaacagcaataataataataaccctagttacactaaacctatttaattttgaactcactactcatcatctaaatcacaatgtaagcttacacaataacaaaatttgtttggttatcgagacaaattgaacttgtgtgggctccttgatgctcgcaacgtccctctcttacggaaatttcaggtagaaattgataacacactaaaactcatcttgatctagtccaatgacggagctctcgccgaggtcacgacggccgtcatcgtcttcatcgccatcctcagcaagtcaccaacctgaaaactgaacaagcaaataatgagatcgagaacaatcaacattgatggtcctttcagatctgggatgcaaatctcgtgagaatgagagaaagatataatgggagagagaaaaagagggagagaaagaaataatgaaagagagagagaaggagagtgtgagagagatagaagaggagcgactggtttagcggcggcgacggcgggcgggggtggctatccgacagagatgagtgagggaggtggaagagagagggtgaaagagatgggtcctcgagaaaacacagcttgttttttcttttttagtttttgttttcttttaatatctaatttttaatttgtttgtttgtttgttttcattttattttatttatttatgtatatttataattttataactttgtattatcatttaaatttgaataataatattaggtgtaccaataggaatgtgccacgtgtaagtatacacataagcagtctatgttagcacttaactgtggtaaatggatgctatcttaaatttgctaatggctcagtagttcggaaagttttaccaccaaaatttgaatttggagggttaaaaatgatagtttagagagttaagccgccaaaaactcttttaaaaatgtacattggagacttgttgcgactatatgtttggagatgattttaagtttagatggatcctttaatgtgattattggcattttaataaatttatctagtaaatctttgcaggtttctgccagtttagttacagtgcatttgattgagaaagtaactgctggtgatactggaagcttatctgtatcaatacttcagaagatcagcaccatgtctaaaaaggtttgctgttcccctgttatgaccggtgtagatagtttagataaatacttcagccatgctgtccaaaattagttgtgaagtattaagctctttgagggcttattttaattataatcataaaatgttaactctttcagtttttcgaaatttttaggttccataatatctatgttttttctttcttccctattttgcagcttagaagtcatcctgctttctctgaattgttagcccaatattcacagagtggttataggtaatctgtccttgttatttttgactcggtgttcaaagtgtgcttttttaacgagttgggaattggtgataaatccttggcaatcatttactaggattttaatcattgcagttacagaattagttctgtgaaaacccccttagaaaggttctggatatggttggagcagtgctacttggccccagttgggtcagcactgtaagagagaatgagtgggcctagatctactttatgtattgtatgctatgatattcac

SEQ ID NO: 14414 - DNA, 5526 bp, Cannabis sativa
attttaatactcgttttttattcttcaattcaatctctgatgatagatgtttgtttttcaattaggaatcatttgatgctacaagatggttggataggtctttgattcgtctgtgttccaaatttggcgaataccgaaaggatgacccttcctcctttatgttaaatccatgcttttcattgttccctcaattcatgtttaatctacggcggtcacaatttgtgcaggtattaatcgtgttccctcctccctttttccccttcatttattttttccttcttctagtcatgtacatgtgtattcaaattttcaatgtttcatttgtttctcaaatgaaaattttcaggtgttcaacaacagtcctgatgagactgcctatttccgtatgttactcaatcgtgagaatattaccaatgctgctgtcatgattcaaccatcactaatgtcgtattcattcaattcaccacctagacccgttttgctagatgtagcatctattgctgccgatcaaattcttttgttagattcatattttagtgttgtcattttccacggaatgaccattgctcagtggcgtaatatgggataccatactcagccagagcaccaggtttgtactttagaaattattagatatatttctcgttatataatttttaagtacttaataagatactgtagtcatttgttgttcatgtacttatatttgcttctatattttcaggcatttgcagaattgttgcgagctcctcatgctgatgccgatatgatcatccatgaacgttttcctgtcccaagattggtggtatgcgatcaacatggttcccaggttagtatctttctgaatttctagtctcagtttattaaagaattttgcaacaagatagtagaagaagatggaagttgcttttgtctcattgcctccaaaaatccagtgaataattttagtctctaaatccaagcatgtccagttttattaatcggtttccaacttttaggctcaattttattcaaaacatcattcgatttgtttttgaaagtccatgtgtgctgctgtgctttctttcccctccatatatatttgatttccgaaataattctcttatccatagtcgccgattaggaaaaatattcacgtggcaaatctcttattacgttttactttgcaggcacgtttcttattagcgaaactgaacccgtcagctacctataataacgccaacgaaatggctgctgggtcggatgtaatctttaccgatgacgtgagtctacaagttttctttgaacatttgcagagactggccgtgcaatcctaagagcaaagaaaagaaaaaacaaagaaaagaagagtaaaagtactccacgaaaaaactgctccggttttcggtgtgggggaaattcctctggttttttcctatcctcatgtcattccattccatccaatttattattaaaaaaaaaaaaaaacctttctttctttccattgtatttaaagatgaagagttactcagaccagagaccccacattgatttatcaataaagaaagaacaaaaaaaaaagcacattctttgggggggttgctggtgaaggtaatttcttttacttccattatagaataactagcaaaggttagttcttttttttttttttttaattcatatggaaagaaagtcatgaatgagggtggggaaaaggaaggaagttgagtctgaaattttctcttccgtttctttttttcggtttttcgggttaactggtttggaaagtaagtttctgtctgcatgaattttttttaagttatatgctgtgagatgagggctacattacatgttagtagggttgttttgtattttcagactttggttttagctcaatatgacttaattgttcatcaatttaggttatgttttttgttttatgaaagagagtgcatttttttttggaaatttgatgtagcttaaaacttaaaaagcctatgccttgttggcctgttatatggattttggtttatcagatgtttaattatgtttaagtttttttccttttattattatgtgtaagattagcatacaaatcaatgtccttgttgttaccaagtacataaattataaagggaacttcatattgaagactgtcaaattagtctcaacctttacaataatgcaacccctattattaggctctttagttttaattagagctttgatttaatagtctccttgtatttagttatggacaatgtaacataattaacaaatgcaaatctacaagtctttgtttaggaaaaaaaaaccagcttgagaggtgagaatctcgaggaaaaattctatttattctattccatttataattttaacaattttttatattatttattaaaaattaaagtgcaccaatagtactatacttgtgccaaaaaggttgatctctaaatttcattttagtatgtgatagtactacaagtaatatctcttaataatcaaatatcaaatttcaaataatttaatttaataattattccagaatatcactaaccaattacatttaataattattctaaaatatttctaaccaattacaagaacaatatgccttacagaaatgctctttcaatttataactatataccatatttagagttaagagtactctattattaaagatgtctttacctatattgctgatttaagttgctaaaactagtatgaatataaccaatattgttcataattatcagattaaaactaattatacaaaatcataacatttaagttacttgattagattactaaaggtcaagatgatgcacataacaattagtgcccttcgtacataatttgcttgcaaaaattgagatacttatcagtaaacttagtaaaaattattatttttgtatataaaaaatttgatcaatcatgaatgagagtgattaaagattttacttcagcttatattttaaaagaaacaacttaacactttctcaaactatatgttaaagcaacacaaacacaaaatattagtaaaaatacaaaaaaccaatcccatcacattcaacaggggcatcccaaaaattaagaattaatctaatttcttttctttaaaatttaagcaaactcatttcaaagaacattgcttccacagttcactagaaaaatattagagtaaatgtaaatagaataatcctaaatccaaatggatctatcatttttctttgttgttaatcaactgttctactctttataatgataattcttctctcttgttttgacactcattaatcttttttgtttttatcattacagtattcttcaaaaatttctctcggttatttcctcttggctattacactaacaaaaccgaggatgcgaccactgaaagattacctgagaaaaaactcagaaaattgccatcaagactctgtttttcttctctttcctttagacttcttgattctatgttcattgttgatagataatgcttccccacttacagaactaccgggatcttgtaaaaccgacgcctcttcatttttcttcctcttcttcacacttcaacacacaaaaaaaaaaagattgagaaaattaggtgaattattaaatttacatgtgacctttgaaacactttcgaaattccaagttgatgttaaaacctgtcgtttactctgaaaccttctaaatgattcgctagccaatgaaggcttcctgtgttttcgggtactagagaaccagaaatgtgtagtacatcctcatccatactgcagagttgaatcaatgtcgcgaattaagttttcattagtttgtttccgaagaatcgagcaaaactgatatcttaatttacactagtagtatttgttaccttttgactaaaaactgtatcatacttccaacctttatcacgtggcgcttgtgaaatttgctacaaaatagttcctccccgtgtttctattaagcatttaagcgtatcaaaattggtgtcgaagaacgatatcaacattcaaacataatagtgaagaagaagaagtaagcactactcacaattttatgtacaaattcatcacgaatgtcttcgtccgttataacagctgatgagaagccaagaacaacaacatgaattgatccttgagtaatttttaccaccttcccctctgaaataaataaacaaacaaacataagcaattacaagagagaacataagggagttatattggttagaaagtcttataataacatttttcagaatttagaaatgaaaagcaaataaattgacaggaacatactaccaataggctatgaacagcaaaaacagagaaatattttgtattgaaaatttgagagcgatacacaaccctttccaatttcttcacccctacaaatgaaatccctccctctaactagttctctatcaataccgaatttcctgctctatataaatttgtggaaaacaaaaaatttaattttgggtagctatagaaatacttaacactaaggtaatgtttggttgggaggaatgaaaacataagaataagaatgaaataaaatttaatatgcataaaaaaagttgataaaaaatttattaaaatttttcttatctttcattggaatgatctttcctttggtatagtcattcaactaaaatggtggaaaggctattccattggaataatattccaatactttaaaatgcaatcaaacaaaggaatatagtgaaaattatttcatttacattccattcaattacctccaaccaaatgccacctaaagggtataatgtttttactttggttgtaagttaagtgattcatcccatatcatcttctatacttgaaatacttaataaataatcagaaatctcggaggaaaaatatatttaaaccacataataaaacaaagaaagttaacagcattactacacaattgaattgttgtttttaatctctctctttctcaaacacacacacacaaagggattattacaagttaagaaacaaagttacctaacagcatattaggttttggagagaaaagcaaaagctttgcttttagcttcacagcaatataaggatgcatcccatttaaaattcttgcattcttatcaagaatattaaattcataagccaacataacaccatcaaaattctcatgaaacctgaaatatagaccaaaacagaacaaagataattaatttacataaaatcatcaacaccatctcaatgagaaagaggaagaagaatacttgaaaagcatagagctaagctcgcgaagaatggcatcgtaaatgttgttgctcttagatgggtgaacatagaccaccatgtttgcatccgaaacttttaggctctccattcttcttctaccaaccaatttccaaaaccctattattatgtcagagagagtaagcctgggtttgtactattgggctaactaaaacaacaaagagaaaattacactttataccctttttatattgtccttttttatttttaccctcttttttaaagtctatcatttttaccttttttttaaaca

SEQ ID NO: 14415 - DNA, 9176 bp, Cannabis sativa
  modified_base (4108)..(4112): a, c, t, g, unknown or other
tatatatataccctgggaccattggatagtttgacatgcccaaatcatttttgacttggtgaatatcagtgtgacaaactccacagcatgtgactttaatgtatacatcttcaggaccagtttctctgcaagtttaagtataatgattatgaataaagaattaaagaaaatgaaaattaaaacaattgatttgggtgatgatgttacctgagtgtgtaagtgtatggtgagagaacaccagatgagtccctggcagcccatcctgttacggttttctcagccttaatggttcccatttttctactgataaagacaaataggaagaaaaaaaagcgtatttgggaagaagaagaagaagaagaagatactgtttggaaaatgattttgaaaaaaatgaagtaatggctgtatttatatatagagtacaagacaatatgacctttcttttctaatttctttttttttttttagttttgatgataatgacaaatgacaatgggaccttacttgttatggaataataaatttatttagagtaattaagggccaaattcttttatattttaatttgaaacatctttaaaatgtcacccttgtatatatatgtgaatcaatttttttttataagaaactaaattattattaagaaatgaaaaggagtatcataaaaaattgaggtattttaggaggttaattattgacagcctcatatgagtcatggtgggtccggtggtagtaggtggacacacggggacttatctcctgcggaggagcacaccggagcataatatattatttgacctcatatatctcaaaattaaataatagagttgaagagtgcggttaagtttgagaaaatgtgaataaaaataatggaaaaaagtgaaaactcacaaaaattggtaaactagcattgttgaattaatagggcgccattaagaaaaataagaataataataataatgaagtgttctacaataataataaaagttgtaatatatttaaataacagatgaaatttgagatgaaatttgagaaggccaccatggatgcagaagaggaataacacgcaaattagtagcacacactttagatggaagacgacaaagaatttcaatgtgattgtaattttggccaagtattcgacattgaaaaatctcaatattatctttaattctattattagagcgcgaaaagaaaaacacatctccgtcatctggatgaagagcaacaaggcaaaagaaactcataggacaatcaaacctcatcgtcatatgataatgattatgcaccaaattccaactatacgtctcatcgtcatcgttgtcacccccatcaattagttcccatgccttaaaaacaaagcactcttttttcttatatgaatagaattgtgctagtcgcaccttacctcgaaccaccccaatatgcaccctcgaatccaaacagcgccaatcacgtcctaactcctccttaggcaaaccaatcaaacggtatcgttttgaacaaatattcagcgaaacaataccttcatttttatttgaggaaccataaggcaagtatacaattccattacttccaatgatggtagagcgagaactgcatttagtcaaagcttcttttggaaattcaaaagttgaatgactccagtcctgtctcagaagaaaaaatatctaaatcaggtagggattctgaaattctatcgaaaactcttcccgccgcgctaatgatcaccaccttatagctaatcataaggttattactagtattagatactactaaaaagcgtctactataatatcgatagatattcgaacaccatggaagcaaaatgtaatgccttagaaaaggattgcatacataaaaacagagaccactgcgatcggggtataatagttcaaccagcaataaatcttcgaacgatgaacatatatcaacacggtcagattttacgtccttcgaaggtaaaaactttaatgatggtgttagtccatagtcgagaattgttgatctcggagagaaatatgcaagtgagaatgaataatccgggagaaaagaggcaatgaagaatagggcaaatggaagaggtgagtcgggagaattattaagtcttttttgacggtgatagtgattgaatctgccactgaaatatagtctagaacaataaataagagagaaccaatgtttgcatacacaagcacaatctattatagacttaaaatctggaagacgaagtagtacctccaataataaatcatcactaataatattgaaaatttgtgtactcattgtctccaagcactgccgattattagcactactgattaacatttttaggtatagctgtacgtacataaaccctagctacaatttgttttgaatttatatatattcttagaatgattgacggttagtttatttgtttttttttttaaaaaaaagtatattaaattatatatttttgtgtatagttcggtgagattgttgttttggtaactgtttaattatctaagagtttatacatacatagtataatattaatttcgtaaacctatatttgtggaaattggttgaaaaggaataataagaatttaagtggcttttggttggattggaggtagtaaaatgagggatatttttaattatatacgtgtatttgttaaaaagatatcttaaattttctagtatccaattgcaaataaatatcttaagaaaaaaaaaaattaattactttcgtatacatagtttcaaaattattgataaaaagttgtggaataaattaatcacttatttttttgattattttattgtgcacaccgtataccaagacgagagccaattcaactttttcttttttataatttattatttgaatgaaatgagaaatatactttctcaaattattctcagtttttttttttttttttttaaataattctagctataacactaatcatttgactcaatagtggtagatctttttttttttttgacataattatgtgagaaatataatatttttactgaataaaatattcaaaattaaaagtcacattataattttttttatatatttcgttaataaaaaaagaagtaatcaataattttttttaaaaaaaattaatacgtcaaactaattttataagttaataagaattatatgtaattgcatatgtaaaaattaccatatagtatacattttacgtaagcttattttatagttatagagttatcaataacatcatacaaaataaaagttacacttattttgctaatataagctatttgaaatttttttctttttttctgtaagtcattataatgtaaacataatataaaaattgctataggagtaaataaaaaaaaaagtaacataagtataacttaattaacaatattatataatttaaaaataaaaatataattttaaaagttaattaattggaataagtaaccaaactatataagataatattatctcacaaactaataatattgaaaattgattgtgtcattgtctccaagcactgccgattattagcactactgattaacatttttaggtatagttgtacgtacataaactctagctacaatttgttttgaatttatatatattcccacggttagtttatttgtttttttttttaagaaaaagtatattaaattatatatttttgtgtatagttcggtgagattgctgttttggcaactgtttaattatctaagagtttatatatatagggatatgattttgtcacgtaccctgagacccatctaccacagaggtataacattaattaggtaaacctatatttgtggaaattggttgaaagggattaataagaatttaaatttaataactttttctattttaaattttattctatatcattcccattctcctattctcatgttttcccaaccaaactcaccttaaaaaaatattagagttgctaacttagttattaattaaatactaataataaaaataaattttgttgctttttaattcatttgtatttttttcatcaatattttggaccccgagcttaattttcgataacattaatataactaacttgaagacaatttctaacacgaacannnnnagaaaatgtaaacagttttgtcaaacacatttagatcagattattattaaatgttattttgacaaaaaaatagttctaagatcttatttgtactattttagaaaatacaaggtcatttttgccaattaataaaacagaggatccaattagtaacttttacaaaatacaaagtccaaaataatatttattctttatttttgtattattattttagtcaaagtctttaattaattatgctataataaacattagcatttccgttaggttgagtacttcttttaagaaatatatttgataataatattgattaacatgtatgattaatattgcttattatttttgtcaaatgtatgattaatacatttgatctattaaattattaatcaacatgtataatacttcattcaatttatgtatataccattcaatttatatatattttttttgtatcttcaaatcgttggatgaaaaaagaattactctctcctccttgattgatcccgtctggaaaaaacgtgcgttgatcaagattttcagaaactgattataatatggttatagatgatggaggattggtgacgttaatagtgtgcgaattttaaaagaaccatggcaacctcgaccaatatgtttcaagatttatgacaaaccaagtttgccaaatagtttatatgtgtttgatttaaaaatgtcaaacgggatgtgagatgagaaattcatttagaatacatttaatgatgaggatgctgaaatgatactaaagatgccttatacaaaaggggagctggacgataaaattttgtagcattacagcaaaaatgatgactactctgataaaagtgggtatctaatggcagctaaattgaggccagagcttcatcaatctgatgatagtcaactagttttgtggaggaggaaattatggaagttaaaaattctgccaaaagttaagcctttagaccacccttgtttaaaggctttttcacagtttcccaattagaccaaaaaaataaaaagtctatctacgctcttcagcaatagaaaaaagaatccttaggcaagtcctctaatgcataggaagaccccctagaacttacttaatgagtgtcagttttccagcagaggatccaaaatggtccttcccggtagtattccactgaacctggccaaccaattttgagcatcagaaacctcactagctctgtcttgataattaaacatagcattaaaatccccaagcacacaccatttggtcaaatagctgaaactagaaagcttgtcccaaagaactttcctttcaaacaagtggtgaaacgcatatgaataatttaccaataaataaacaggacttgcattatatatttatttgtaacgtctaaaatcaagtggcaactactaatagtatgaaaaaaaaaattagcaaatgaaattaaataaagtcaaccatcaaatgacaagtggaaatgaatgatgatcatttagggtttttctttcttttgttaaggatgatctaggtatttcatgatagtaataataaaacagcttgatcatatgaaaggaatacaagtgtagccaatcaaatgaaactttgttcgtaaaaatgaaaaacataaacaaaaacaaaaacaatggttattagtatagtttaagttcacattaatttaaacttatcaacgtgcgatcagaatgctcatagatttaaatttaaatttaaattctcagagagattagctatggtgccaagaatgctcatagattattgtcccaagagtacggcttcacataaattgaatttggggtataaaaattgaggatcattttgtcaagaaaccatgaaatttggaactaatgatgaaatatgcctaacatgtattatggttgccacagaaagaaatgaatgaagcaactgtctttcttctcttcccgtcggatttaatttggtcacaatttggtttggctcaatgtcatgtgtgaaaaaccaaaagattactcgacttcaaacaaggaatctgccttgcaaacatacctaatagagaataagtacaggacttaccagaaccattttgctagtctgtggggcatcccaacttatgatacaacaccacacctaacattctacaacctaccgtagcttaggaattcgtgatattccaacttctttccatgtaggaaggcataggagcatccagtttgaggctttctagttgtgaaagatcatagtctgaatactgtcccagattttgcaaaacttgagttatgtttggcaaaaccatttgtttacagtgaagatgtagtcgaggatgtttctctgaaatacttccattgtgcatgttaatgccaaacgggaggtttttcctctttggaaactcttcatgttggctctcaacattagacaaacttaaaggtttcaagtttctgtgagcctgccaaccatatttgtagtctccaactattggtgtccccaaaacctcagcacaatggacacgaagctgtggtatccgcacatgatttaagttgttatggggaaaaataagtcagtaaccaatggaaaaagtttgcagtcagtcatcaagattattaccgagttgtgattcatacctggtgctttctacccgtaagaggagagagctctaaccacgtgtaacctgcataatgaactctagcattagaagaatactagttatatgctaaatggtgttagcatattaacttatagtctactactgtttctgagccaatttcctaaaccatcattcaaaacagctttaactatgtgagctttagttactattgcttctgatctagtttcctaaaggttatacaacaatcatgttttgaatttgaataaagtttgtatcctaaccttgagatgatgatccgatcactttatacttcgtaactgcatgctgagatgacaaactttgtgaattgttcacaactgtaattcgctcggactttccgttgtccaccaccacctgaaaagaacccatttaaaaacttcagtaaacgcaacacgtgaataagttcataagaggtaaactgtcatctgttacttgcaatcctccatcaagtattggctatcttgacatccaactgatgagcattagctaatgcaatatactaataagaaaatgcatttattcttttatgctttccttcttccactcttttaatgtattaattctctctattgagccctacagtctgtgggaggtaggaaactctagcaaattgctagtaaggtccccatgaccaattggaaagcaaaatgcattttatcgtatcagggaagtgctgtctaaataatgagaatgattcagcagtaaaatgacaatagaaaagacaaaaatcaatacaaaagctcaaaggtcaacattttcagaaaacattcaacagctaacctttcccaatggagctgaaactaaaccctttggatgtctcggagatccaatgacaagtgcccaataccttctttccagaactcttttttcattagcagtttcctttaagacccaaaaaattaggagaaatcagataaagactgcagaattataacacacctaactaccttgacttctcattaacatatacattttttaccagtgacaagcacaaacatttctcacatttccagatgctccaaatgtcttctctcggaaaatcgagtgcaaaactgttgcacttatttgtgtacgtcccatgaccaagatcccactacaatctctgtcaagtctgtgtacctaatggactcaatgttcataattataacaatgaagtcttttcaagcaaacaaatggtatgttaaattcataataaactcaccagccgaggggattctgagcagtcataacttaagcaagtaatagccagttcatctaaacttgtcttgattccaataccaccctatccaaccatatacaaaccataaaactaaaaaaaccatacaaaatcaaaacgaaaaacaactaacttcaaaacatagctaacctgaacaggcattcccggaggtttattgacaacaataatggctggatcctaattccaattcagcacaagagaatcaaatatttgttatgaacaatataccaaattaccagtacaagtaaaatacagacttaagtccttgaaaaccttatatagctcaagactacggataaagttcacttcttctccattgcaatgcaactcttttttctcaacagggacctcttttacagtaactggaagaaatattcggtcccccaagttcatggagtctttagctgtcaccttcaaatcgattttaaacatttacaacataataataaatgaaaaactcatatcagtaatcaaatagatatatgaatcaaaattctgatcagttacccttttaagtcgaggtttttgtaaaagagcactggaatcagaatcttctatgtttgaggattctcttcgaacctgcaacgacacaaaaaacataaataatggcttgatcacacttgaggagccatgtaagaagctttaccaacctgtctgagtcgaaagagcttctgaacaaggcttctcggaagctcggggcagcaccggagaatccatttcagcgctgtcgttgaagcaacgtcggtggctgattcttgagttttggaatctttaatggcatcctttctcgattccgaccacctgccggcgatctccttacctaaagcggcgccgtttactgtgtcagtgtacgggggcaaagtgaaccaatttgtatcattcttctcgccaggcttttcgtcttgcgcaaaggattcgggtgtggcagtggaatagcgtgaacgccaatgattaatgcctgtgttacagactcttgtactgcataggtcggcggcgttcgacggccatcgaaggaggaggtggcggagagggttggggttcgccatttttgtggttttgggcttctgatagatactaatacaatggggctcgattaatgggccgggccacgaattttggaatattatattgggattatttcacaaatacagaaaaacaataaaaaaattacaaaaatacggcattacgaaattttaaacattttta

SEQ ID NO: 14416 - DNA, 9269 bp, Cannabis sativa
tttttttttttttttaagtaattgtgtcattaaaatgatgaacttgaaattttcttcttcttatatgtgtctaatgtagacacagtctccttatatttttctcacagagagtgaattacaattgctaacttcctttatcctcttaatagttaatacataatatcctttcctctttgtttaatttcttgctctgcttttgtttataagtctttcatgatttataatgttaaacacttagcagcacatggacttttctcacacacatataaatatatattaacaaagcaaaccatatagctcttgtaatagctcttgtttgcatctcattttgtaatagctcttgtttttaaaggatatgttcatttatgggcttaatttcaatgcaaactaaaccatgtatatttatctgcatatgatacaatattaagtaagcaatagaagaaggtaattcgttggagagtagagtacaccattatatctgtgagttgtcagtaataattttaatattgtcatgattttttttccctttctatgtgttgtttctttaaggaaaatcagttattttttattttttttaatttaaaccagtcctgtcatcctgtttttatgtttcatgcttgcctggtttttcaaattttgtattggcttaatatatctttcatctttattgtagattcctaagcaatacaaatcaggaagagtgaaccctgtcgagacctgttgttgttgttgcctaccttctgagtaagtaccccatttatatctctgcctatatgcactttgtatttgaaatttacttctttttcctttcgataattatattttgggttttggttaagtttatatttgggtttagtgtagaaattttggtgaaaagctcaaacttatgcacggatttaacatttgaaatgcttgaatttatcactatatgtgagattttatgctgatcaattgtgtaaatgggtgtctaagctttctttcaattctgttacgtttgtttccctgtgaactataagctttgcagttatttatacttaatttttgcatcatttgcaggtggcattgttggggtttggtttagtatagtgtctcttcaactttagcaatggaggttagtatttaaattagttttgagctacagaaggaatgcttgtatgatcaattggcacgtaaatatggacttgcttgagaagttttcccttttctatccatggttgtttacttaacccatttcaagcacaagatttcgaaaattaaaatgagttgaactgtgagaggggatactcaatgtttgatctgtcccatttctcttcaaatcctttcccttaagattttatatatttactttgtttattacgtaaacatgccctatttgtgttttaattatatgttggtcggtttctttttgttttagaagcgtgcaaatactgagcttgttgacgtagacaagataacagaaacaatggaagctgaaaacgccagcggaggcggtttataccttcctgggaaggatagagtggtgtttaaacctccagagaggaaatccctcttaggtatgtattgcattaacatgtttacatattattagatgtattcagtttctgccgatctcctttgatgaaagttagaaaaatggttcttgatttgtttattttttaactggtgttaatttctgatttgtgaattatagggctggatacactagccagtgcaaagaggggggagtctaaggctgatggtgggttcaaagcccctagagaaagagttgtttctgttgcagcatccatggaggaagaggagaacgctgtatctgttgtaacagatgattccggaattaatacctccactagcatgcggaatccttctaggagacaatatcgtgaagtagctgcaaatgagacaacctacagaggtatggtttcggttatattttgttatctaagaatatatttctaggatctgtatggttctcaggttcaagtttattaattctccttcttttaagtgcttgaaagaagagtagtatggctgaaaatgcattagatcaaaagggttggctttctacagatttatgtgatatatcattttacaagtaaaacaaatagattggtagtctttaattttattttccatttcttgactattaaactgttagattctcttaatatttagttttttattttatttattgctctttaacattttcagcgcttgagtaaaatttggaattcttctactgcagaaagtacagatgatgatgcatttggctcttcaagtttcagagaacgtcaacattcagatgtaagtttatcttctgtgcaagttatttcatcactggtgttagtatcatgtgttcaggtccattactttttactccaaaggtttcttattcagttcaacttttctttccgagttattggtcttgcttcatcttcttctggttttttttattctggcccctctctctctctttcttagtgcgttttttttaatggtgaaagcacttcttcaaaatgctgattatcagttctgtatgcttataataatacgttcgatttgcaggtttcaaccatatctacgcgaagctcccagagcatcccatctagaagccctaggtatgatagggatgaccgtgttcgtgacagaagagagcatagagatcattatgatagggatgaccgtgatggtgggagaagagactacagggatgacaggagggtaagacaaggacatggtaacggcagtaaaaatcaatattatggaagagaatcatctgatcgttatgaaccagtgtatagtggagataatgaaagaaagagaagtagatatgaaaattcaacaagggggtctggtaagtgatccttttgcatgcgtgtgcaacgtgtaatgttgattttcctaaatgaataaacataatgctacaaatacaaacatgtctttctttttttgccactatagtcttgccagtggtttgtaatgtttgttatcaagactgggttaatgagtactctttactgggatgattttgtactattttgtggaaatacatgtttattactgtttactgacttaatgctgaaatgggcaactgcttcaggcagatcaaactgggatgatgggaaatgggaatgggaggacacaccgcgtcgagatagttattctaattccagcaggcgccatcaaccgtcccctatgtttgttggggcctcaccagatgcaaggcttgtttccccatggttgggtggcaacaccccccattccaacggtatgttatacggaccatggaacctgctgttatttcggattatcgtattttaggcagatagattgacttgggagtttttgcaggctctaatgtttcttcctgggacaatatctcgccctcaccagctcccatacgtgcttctggatcctcagttagatcttcaaattctagacatagtgggaagtctcatcaaatcactttttctacaaataattcacaatcgaatgaggtaatatagttttggacttctgttagctttacaactgagttagtatatttctttaaagtttgatgttctgccttctgcgtttagttcagaaagaacagacttgtagggctgtcatcagatagccaattagccatgaatggtctcttcacattctattagcttaccatattaattgtgtccactgtcaatgactacaggatgaggaagctgagatgactgatttagctgaagagcagaagtacgagatttctgaaagcatgcgccaagagatggaatacaattctgatcgtgcctggtaatttaaaagatggattgttttatttgttttcttgcactataaatatgatcttaagataatggggtgtctgattccttgaaggcagatttatcatagccgactaatacaatctttttgtataggtatgaccgagaagaaggtaatgctatgtttgatgcagatagctcatcatttttctttggtgacgaggcaactttacaaaagaaagaagcagagctagccaaaaggctggtatgtcttgttatatcttaaatactgttagtctgcatgtcagcaccctcttgatgtaagtttataaatctggtgcaggttcgaagagatggtactaaaatgacacttgctcaaaccaaaaaattgtctcaacgcactgctgataatgctcagtgggaggacaggcaactattgagatctggtgctgttcgtggcactgaggtacagactgatttcgacgatgaagatgaacgcagggttattcttcttgtgcatggtaaaaacatttgcaatgagctatctgagtcattcaatgttaaaaatcaattgtagcttgggcagagacatggattggataccgcaaattagctaacttacgtttaattgtttttacagatacaaaacctcctttcttggatgggagggttgtttataccaagcaagcagagccaataatgccaattaaggatcccacatctgatatggctataatttcacgcaaaggatctggtttggttagggaaatccatgagaaacaaagtatgaacaaatcacggcaacggttttgggagcttgcaggctctaaacttggtgatatccttggtgttgagaaaacggcagagcaggtattttatttgaaaattacactgcaagtatgatggtatgattcacactcataagttagatgctaattctttcagattgcttttagattgatgcagatactgctgcagttggtgaagatggtgaaattgattttaaggaagaagcaaagtttgcacaacatttaaggaaggaggaagctgcgagtgactttgcaaagacaaaaactcttgctcagcaacggcagtatctgccaatctattcagtgcgagaggaattgatgcaggtgtgatttctttctcactagacttgaatgttattatttttcgagattgttatgtctttgatatacttgtgagcatatattaatatgagtttaatttcttgcacttttgggtggtttctcaaatcttctttgttttgaatactattgtacagaccatacgtgaaaatcaagttgttgttattgttggagaaactggttcaggaaagaccactcaattgacacaggttcatatactctttatttttatcaccaaaatgattgtatcattactttaaggtagcaaggattatttatcacattggttggcatttaattattttgctttggtttacagtatctacatgaagatggctacactgttaatggaattgtaggatgcacccaacctaggcgtgtggcagcaatgagtgttgcgaaaagagttagcgaagagatggagactgatttaggagataaagttggttatgctattcgttttgaggatgtgacagggccaaatactaaaataaaggtttcttcctctctcttgcttacacttatttgaattgtatatcttatggcatgtaaccatacaaacactcattgtttatgatggtcattgaaatattaacctacattctgttttccaagtgttctctagctgcatatgctaattttatgaatttgcttatctaatttctgattacagtacatgacagacggagtacttctgcgtgagactcttaaagatgctgaactggagaagtatcggtatgtgaagttgattcttttctatttgtctgttccacgtaattttgtgtacatatcaaaatcatttactttcaatgttttttattgtagtgtcattgtgatggatgaagcccacgagaggtctctgagcacagatgttctgtttggaattttgaagaaggttgttgctcaacgtcgcgattttaagctcattgtgacatctgctactctcaatgccgaaaaatttgcagatttttttggaaggtatgctatattttcatggattctggtcatttcatcatctcttacaccaactttattaattcttctttttttctaatactgcagtgttccagtttttaaaattcctggaaggacatttcccgtaaatatactgtacagtaaaagcccatgtgaggattatgttgaagctgccgttaaacaagcgatgactatccatatcaccagcccaccgggggacattcttatctttatgactggccaagatgagattgaggcagcctgctatgctctagcagagcgtatggaacaacttatctcaacaacaaagaaaggggttccgaagctcttgatacttccaatatattcacaacttcctgctgatttacaagcaaaaatattcgaaaaagccgaagagggagagcgcaagtgtattgtggccaccaacatagctgagacatctttgacagtggatggaatatactatgtcattgacaccggatatggtaaaatgaaggtgtacaaccctagaatgggtatggatgctctgcaagttttcccggtcagccgtgctgctgctgaccagcgttctggacgagctggaagaactggcccaggaacatgttatcgactgtacacagagaatgcatacctcaacgaaatgcttcccagtcctgtgccagagattcaaaggaccaatcttgggaatgttgtcttgttgctcaaatctctgaaagttgaaaatttactagattttgatttcatggatccacctccccaagacaatattcttaattctatgtaccagctgtgggtcttgggtgctcttaacaatgttgggggcttgactgaacttgggtggaaaatggtggagttcccattagatcccccacttgctaagatgctcctaatgggggaacggttgggatgcttagatgaggttttgactattgtatctatgctttcagtgccatcagtatttttcaggccaaaagatagggcagaggagagtgatgctgcacgcgaaaaattctttatcccagagtctgaccacttgactctctacaatgtgtatcagcaatggaaacaacatcaatacaggggagactggtgtaatgaccattatttgcatgttaaagggttacggaaggcgagggaggtgaggtcgcagctgctagatattttaaagacgttaaaaattcccttaacaacttcatggcccgatacagacattgtgagaaaagctatttgctctgcatattttcacaactcagccaaactaaagggcgtgggagagtatgtcaattgcaggaacggtatgccttgtcatttgcatcctagcagtgctctctatggcatgggctgcacacccgagtatgtggtttatcacgaattgattctaacaagcaaagagtacatgcaatgtgctacggcagtggagccccaatggatggctgagctaggacccatgttcttttctgttaaggactctgatacatcattattggagcataagaaaaagcagaaggaagagaaaacagccatggaagaagagatggagagtttaagaaaggagcaagccgaggcagagagacggaacaaggaaaaggagatgaagaagagagctaagcagcagcaagccgtgtctcaaccggggttgccaaagggctcttctacctatctgagaccgaagaggtttgggttgtaagtgtaaaacattatttattttaagttccttgaatggcaaacctgttgtattctcaaatcatagaacataaattttgttcctggtttaaccaaaagtggatgaagaaaaggaaaataaaattctttccttgtcacgatgggcatatacattgtcttctgttctgtcaagcaaagcagaggttggaatttgtaatcacccaaaaatagttataaagaaattattgctaaagatgtctgtaaatgactcttttattttcttttaatttgtaagctgtaatcacccaaaaataattattttcatcacttgctgtcgtttaagcctaagatgttggttaactgctgatttattaatattataaaaagttgtattatacattgtggatcctaagaggcaatgagtttggtctaaataggataggacattagagcttataattcgtagcagaattaggatgcagcatctaaggattttcttcttttggagttgtgattaacagtactactactagtggtggtgtttattaaagctctcacaaaacaactcaaacaaaagctgttttcagaggtttttggtatggtgttgatctttgattcatctttgtgaaaggatttatctagttgaggagtatcatttgtagtagatgggggtaatatctgcataatttaagttataatataataataatatatgtatttatcatttataaactttatatgtttatgacatattagatgttagaagggtatttaggttgttattgttagttatacacgtgaatctttattgtcaaagctattggattttgttatgcaaatttgttataacaaaatcgcaactgttcatttcattgaatcaaagatcaaccaattcattgaatgagaattcaaccaattcattcttctcttttctctgaattacgaaactaatatggtatcaaattaaaacatgctcttttttttttatcattttcacacaacaatcgcaaaaccacacaccaagaactctctcaatggcgagaatggagacacctctgctgatcccattccaaatgatgaaatcacttctgctccagctccacaagctttcatggagtcccatgatcgacttgctcacgaggacttgtccagtccctatttcttgagcacaggagatcatccaagccttgttcttgtcaattgacactgaaatagtctagtctaaccaatcaagcttgagaatcaaaatataataatagtgcaatacaaaaatgttttgaaccatttttttttcttttgtagcactagattagaaatttgaaaaaaaaaagcttaaattcaaattatgttgaaaaagtaatacatcatcaagatcactcaattaaaaaaacacgaaaaaaaattactatttttacccttaaacttatgacattatcaaataagatctcaaatatataatcctgataataaatatccttgaaatataacatctaggtggtctttggtttgagggaatgaaatggaataggatttgtaggtttctagattagcctttgtttgtttttggctttttccctttctagcacatgccactcatgctcatgtagacaaagacattgtcattgttttccaatatgttagaagttgagagactgggcaatgtccctttcttgggagttttgtctgcttgtagccatggccggttggtcagcaaaggtaagtagaa

SEQ ID NO: 14417 - DNA, 2869 bp, Cannabis sativa
  modified_base (29)..(33): a, c, t, g, unknown or other
tctaagtaggggtctggtctcgagtttcnnnnngagagaaatctcactataacagggagcatgtgcagaggcaacgcaagagaccaagttggctaagggacttcatgatggctgagagccgctaatggagagagagtagcagctgaattctgttattttggttgtgctatttttgttgtgtaatccgtggacatatacaaacaattataattgctagaattgatttttttttctgatgaatgaagaagctgtgaagcttgggagtttggtattgactcaaagaatacccttagcctttttggggctatcattggtgctttcattctctacaattcaccatgaaaaacgaggaaatagcagcattgttactggatatgaagaacagcttcaaggagtattcagatacccagtacgagaaattttctaaacttctcaatcagcattgcattaagactgaagagaagctttccaaattgtctctggcatcgacgaaagttacatttgagccaggatcaccgggtatgatggagcgcacgggaacggagacaggaggttccagcgggcctcgtgcaaattgggggtcggaatccagggaggtaaatgcgataatcaaaactctccgtgtgaaggtagctagatttgatggatctaatgtggaagaatggttgtacaagatcaataagttttttgatcttcatcaagtggaacctatgctgagattggcggtgattccgtttcatcttgaagggatcccatctacatggtttcaatggatggaaaagagcggcacatttacggattgggatgctttcgtccgagcagtgcagttgcattttggggcatcgatatatgatgatccattggggaggattttgaaactggttcaagtgggttgggtggagcaatatcgagctgaatttaaggaactcatgactcgcatatctggcgtttcagaacatctgtttctgaatttctttgtttggggtcttaaaatggagattcaaagggaattgttgatggcaaaacctactgacttagcggatgcgatggcgaaggcgcaactctttgaggacagacatgacgatctatttggacagactcgtggtggaagcacgcatacgagctggtcacctagatcaatcgtaacgcacagatcggcaactcagggaccacctctatccttgggtaatatgtcaccaccattttctggagagggagcgactaagacagctaaaataggtaactctcctttacctataaagagattgtcaccaacggagttgaaagataagcgggataaggggttgtgttttacatgtgacgaaaagtttcaccatggccacaagtgtaagaataagatgatgttgtactgtggatatgacgacgacctcggtgaagaagagacaccactggaagaaggagatgggggagatggtgaggattctccagtagatgaagttagtttgaactcactgtcaaactcggccaacccgaggatctttcgtttgatggcaaaacacaaggcgaagtgcttggaggtgctcattgacacgggtagcaacaataatttcatacaggagtcgttggcggggcatttgggactgctatgtgaggatacaaagcgattcaaggtttacatgggaaatggtaattctctactgtgctctaaaatttgtagagatgtggaattaattttacagggacatcagtttgttgtggatctctatgtgctgcctatttggggtttggatgtggtgttggggatgcagtggttgcagacgttgggatcgtgtattcatgatcatcgggctttgacaatggagtttaattggcaagggaatgtggtgaaactggcaagttcttcaaactcgacccaacaaattacttaccaccaattccacactattattcatgaaggaggagtccatgaattgtataagatgtgtactctgttgagtgaccaagaaacgcacagtgacaaaattagtaagattgaagagggactgccaatggagggaaaaggaattgccatggaatttagagaggtgtttatggagcctacacaactaccacaacaaagaagtgtggaccatcgaatatttctgcaaccgggatcttcaccgatcaatgttcgtccatatcgatacccatacttctagaaagatgtcatagaaaaactggtgcgtgaaatgactgcttgcgggttcattcggccaagcaaaagtccctactcttccccagtcttattggtcaaaaagaaagatggttcatggaggttttgcgtggattatagagctttgaatggaatcactatcaaagatcattttcccattccaacgattgatgaattacttgatgaattgggggaggccgtggtgttttcaaagttggatttaagggctgggtaccatcagattcgaatggaccaccgagacattcacaagacagcttttagaactcatgaggggcattatgagttcaaggtgatgccctttggccttacaaacgcaccttcaagctatgaatcagttatttcaaccatttttgaggcagtttgtgatagttttttttgacgacattctcatattcagtcggtcccgccaggagcacagccatcatttgcgaaaggtactccagctactcaaagaaaatagtttttatgttaaaggaagcaagtgccagttttttcaagaggcaatcgaatatttgggtcacatagtttctgctcaaggtgttcaagtggacccaacaaaaatttcaacaatggtagattggccctgattacgctcaaacttgtcttcacaaagcgatcgttgtagtgtagtatgacaatataccttttgtttggtaataatgcaataagagatta

SEQ ID NO: 14418 - DNA, 21852 bp, Cannabis sativa
  modified_base (17253)..(17260): a, c, t, g, unknown or other
  modified_base (17400)..(17409): a, c, t, g, unknown or other
  modified_base (21786)..(21791): a, c, t, g, unknown or other
tagaaaaggaaagtttagctccagttttctcttcaagaaatctgatctaagaaaatggaaactcacagaagatcaaaatatacagctggttagataagaataaatgtgtaatcaaaacttaccatttttacctcaatttctataaataggaaagctagacaactttcctttcaagtttaaatacacacaaatagggaaaccaaaccgaaatatataataaataataaaatattttagtcaattaaatatgccaaaaatagaattaacaaataattggattgtaattgtttctagtgtggcattacacaatgtaaacaaaaaaaaattaaaacgataagatgcatgaacgaaatagtaaattaaaagtttaaaaaagattattatagtaaattaaagtgtgatatttttgtgaatgattatcagataataaaatagtaatatagatttttttctaaaatatatatatacctttttagttttaaattatattaaaatatatttttatctcttcaatttaaataaaagaaaatatctctgaatatgacatgagaagatgcgatatttagttaaaaaaaaaatcaactttaattttaagatcgatagttttatttatttctttatttactatcttttttttcgtgagatttttattagtaaatttgaataataagccatttaaaaaaagatattaagtgagttattaatttaaacgtacatattcctattataattagaagatgcaacatctacaaaatctatataaataaatctcaaatctctcatctttcataaataactctttataaaattttgaattgagtcaagaacttattagttgcttctcatatcaataaagaatttcaacaatattaacaacaatgtcgatcgaagaacaggcatgcagctacgctattatggcacttcatgacgacggaatccctatcactgctgagaagattgcgaccttagtgaaagccgccaatgtgaaagttgaatcttattggtttggcttatttgctaagcttgcggaaaaacgcaacattgatgacctcattatgagtgttggtgttggtggtggcactggtgttcctgtcacaactaataatgtcgacagtatatcgaatgttgttgctcccgctcttgctaaggataataagaaggaagaagaaataaaggaagagagtgatgatgaaatttgttttagtttgtttgatgattaggagcttcatagtgttatggagtacttaattatttttagtttcttttgggttattagtgtttttttttttttttttttcatatcattgattttttattagttggtgttgagggaattgtttagtttttttttgttgatttaaacatcttttattagtttatgaagattttcacatcaactttttttattagtttatgaagatttgcacatcaactttagtatatgaattttttgtagttaattttggttagtggtgcttatagttatatgaataaatcataattagatattgtttgagatgaactaaaatttaatatttttgttgaccaaattttataacttataagtatttgtggcaaattactattggttgtgttaagtactattttgtgattgaaacgatattttgagtgaaacaccttatatttttttaatttgttaatctcttaaaacaataattgagtaaaactttttatatttttgattttgtgacaaccctaatcaaaattttgtggggatggtattcagttacaatttagtaatgctttaatatttggattcaatttgaaacaaacattacaaaaaaaaaaatggctcatcaaaatccaagaacttatgacaaatatagcactaattttaaataacaaagcatgactagtactttaaaacttgttacttttttttattttttattagggttataaaagaataaaataataaataaaacttcaaatttttaattaattcacaacaagctcagttgaagtgtaaaatttaacaatatcataatcaaaattaatgcatatcaatgttaatgtgcgaaaatatataataccatatttaaaatttaccatactttatttgtttctcaacctgcgacctgtggatatgtttcgcgctcccctccgattgattggatcaaacttaattatgatgacaaagtggtgctgaagcatatgtgtattactattgtggctaggtatcatcaaggttcggtgtgttggatgacaacatcaagatgggatattgataactacgtaagtcactctcaaagcaatttttctacttatgtgagatgtattttacctaatatgaattaattgtgtaattttatggcacataatatgactaaatgaactttcacgcccacaataagttcagttgtttggacgttgcgaaaataccgcctaacttatttcgtaatgaccataaattccaactttgctttatttataaacacacctttttctcaaaaaaaaaaaatgtcatattcttacctgctgactaatgttattttcttatgtaatgtcattaatattagtattgttgtttgcaacaaaacgttgttgtttgcattatttaaagtggagagcaagtgtagtaatatatgatgtgaccaatctagccaacacactaactagttcaaagacttggaaagttactatacttgtctttatttgataaaatagttaaatcatacattactattatattaactatcatcatgattttaccctttaatactcgtgcaaagtaaagggctctctaggccagtttcaacttgcaattcttatcaacaaatagcaaaatgatataactctgcaataagatttcgtaattagataaatattatatttgatgtgatttattataaaaacaaggcaaaatcttaaaccttttatgtaacaaaaatttggaaagcataaaagttcacaaatcaaaatttgaaaatagtcaaactttgatgggtaaaattgttgattatttaacatgtctatatttaacatccctaataatttggaaaaaataatcttttttcatttttattagtgacaaaatacctattaattctttttagaccccattaaaaataaataattcttcatcactcatctcaactcaataatctcaatctcaattctcaagagtcaagaagactattattacaataatatatttaagtgcagtaaatcaagggatatggaatcacatcatatgatagtgacctgtattgaaaattaaattaccaatatgacattattaattattatattaaaatattaatgatggatgctttaagacaaacaaccattaaaacactttaaaaggaagtaacctaaatggtcaagttcaaggtctactccaccgacctatcaaagattgataggccccacaaactcgacatatcatatatatattcatataaatatatatatcatatcatatcatatgaataattaaagtctctcatttcactcactcacccacccacccaccaactttatgggatgagtggttagcacttggcaccacaaaacatgcacattcattcccattttattttttttaataataaagattgggaaagaatccaatccatgtatgataattaattatacagataagatagcacaacaacctattcatataaatcataataataataatggtattgatattaataagaagaataactttgaacttggaaatgaatctaaaaatggggggttttagtttttcaaatatttctttaagtcttttctaaaagaaatataaactacttccccccactgattcattttcctgttttttctttttttgttcagtcaaaattatatagagtaattaataatacaatattccaaaaaaacattagagcaaaagaacaaaaaaaagagggtctttagaatacaaagctcttgttccatggacaatggaacctctttgaagatgaaatttaaagacaaaaaaatatataaataattctagaaacagagtaatggaagaatacctaacccaactggttccttttaatactagccagagtgagagagtgagtgagagagagagagccttcttcctttttttccaatctctgctacaaagaatatatggtaagaaatgaataatcttgtgaaactttttgagccatcctagtagaccttctccttcgaaatttttacctatagtttagttaccttttttttcgatattacctgtttgttgttctttccctccacaacaaaatgacccccgagaatggaaaaaatgaaacatacatatataccatctgaatctatatccactgagtaaaatgatttttttgttcatttttgctagactaagaactgatgatcaatcaatcaagctagctgcatctgttcaacccaagctcctaaaacagagtgatcgatggactcgattttggatttggaattcagaccctcaccggatgctggggcaccatttgtaactgaaggtgccgccttatctttcatcatctcaggtggtgattccttgacaagagactggacccacgacaggtctggctcctccccattgttgtttccgaattcgagtgaagaagatcttttcattcgattgtggtcttctccgttgttgacagaccaatccaactttccgttgggagaaccccatttagaccagtttacaggggaaccgacaactgatgaagtgtggttcgatccaagttcccttgagctgaggctgcgcagttgctgctggtgctgctgttgctcacgctgagaaaaggcagagaggcgtgcactcataggtgagattggctcaacactcctaggagacatccttccaggagattgaacaccaaatgaagcctgtaaaagagggtggtccactgttttgggtgacataacagcagtgttaattggtgatagcatgcactgctgctgatgttgaaactgatttagcaacgctgatttacgagtaggggaaaatgtggaagctgtcatatggtcagagtatcgaggtgatgaagaaatctcagcagaaaagagctcttcgaggttggaaggtgttagtgtttttgaccgacaagaacgattgactgaagcagaactcatccgaggctgagaaaaacagttcatgtcattaaagagctgctgttgggcatcaagttcaagcaacatgttcaaatcctcaggtggtatgtcacgagcactgagtgaagatctcagtcggcttgattgaaggttacttccagggagatgaagcgttgggacattaggctgcggccaagccattgaggaatgggacataccatttgctgaaggtgacatgggctgcgtaaagggagagggagacatgccagagactgatgatggagagccgggaaagagactcaatgcagcagccatgtccataacactaggtccatttggaccagatgctgatgcacgtggcgaagggactccagatccagtggagacatacaaaggtcgaagctcttcagttctgtgggcaaaaaagcatacccttctattgcagctggtaccatccttacagagacgggtacggtactgagctgggtgcagccagcactcaaacacgccatgagcatactcacacaagtccccacgcctacaagctcctttcctgaattcaggacagggaacacagctgtagtggaacttcctcggatctctccttcgagcattttctcctggatgaacaaaaggacattcagtccaatcatgtgaatacgctcgtgaacatggtcgaaccttaaaagagaacatacgaaattcgtccgttgcataaatgctgttcttgatgtcagggatggatggatcgattggatattcctttttctcaagtgtagagatatgaggcagatcagacatcttggaaatcacaggagatgaaactgagtgaggagagcgcacttcattgtcaggagaagaagagagtgttgatgaatctgacttcgagcaattaatggacagatgcatagggtgttcaccaacaccagagccaccaaaagcatcttttgacaatagctcctcaaatatagctttcatgccttgaagctttggatgaatgacaatcacatcaacagggcgatgaccattgacgtccatcaagtttggatcagcaccagcagataaaagcagcttgacaacatcgagagcattaacagatccaccagaagcagcacaatgaagagcagtacttttgtgcacaccacaagatagatttacatcaacctcaggacacgagagcacaagcttcagcacatcaacactaccataagtggcagcaaccattaatggagttctatactcagaaacaatgtgcttggcacctttacggcggctataccagactccaacatcgttaattgaagaagaatcctgctcaattgagcgcttaaagccgtcaacatcattatcagatgcaagttccagtaaattacttagagaatcttcagttttaacaataagaccattcatttctttagtgttagacgcagtttcagctgtagatgaagaagatgaagattttgaactctctggaccactacacatacttcagttagcgaaaattttgtttcaagatgctgaaaaatccaaaagaaaacaaaaacaaggaaagattattatatattaaacgaaaagtgcataccaaaagtagaacacatgaagacaaatgaggcaactactagaaccattggtcccagaaaactgtaacaaagtaactaataataccagatggagggaaaagcataccaaaaatcacagaacaaatttagagaatgagcacgagtacaaatcaaaagctttttgagttccagcaacagataaaaccaagtcacaaaacgaacataaaaggaagcaagtccaacccaagagtgcaaacacactacataaatatatatagatatagatatattgttatcttactgaaaaaattcaatctttcaactcccttaatttagaaaatcctagttatagaaaactaatagaaaggggagactaatcaacaagaacaaacaagcaagacggcaacatataaagaatcatgacaaaatcaaatataccgtttaaagcacaacctgacctcaaactaaattctcaaaacccaataaagtgaagaacacagagacacacacaacaaaaaaaggagtgtaactttaacatatgatagaaacagggaatctactcacaaggccggccacagaacaaatccaaagtaatctagaatcatctgaaacgaatatatcaccatttgtttatctgaagtttttgacacataagtttattcttattctcaacaaacaaaaaagtcatcttcttccatgatattacaaatcaaagaaccaaatcataattaaaaaaaaaaacacataaagcataatgtgaaatcaataaagataaaatcaaatcccataagaataataaaaaaataaaaaaaacacttcaacggtaaaaaatagttcattaacatcaaaacacttgaagctcaaaatcaaaatcctcaacagcttacaagagtattcaagtcaacctaatgagaaaaaagcaagacttcgtttattagggcacaaaaacttcaaaataagcaatgaataaacatatataaacaaaaacactcaccgattctcagtctgaaccgaagatcgaaagcagacctaaaaaaaacgaagtaaacaaagaatcaatcagtaaaaaaaatatatcatcatcgatccaaaaactcaaagattgaccatttttccacacataagaaacaaaatctaaagcttttccattaccatcgatgagaccgaggaatcacataaagatggtgagaaagagagagagtttcagaggagagagagaagagagagtaacgtttttgagaaatgaaattcaaatgaaatgaaaatgaacagagaaaaagagaagaaaatatatttgttttaattaattaattaattaattttcgaaaaaatagaaatataaattaaattaaataaaaaaaagcatcgaaatgcacaccaaatgaaattcaaattaagtccaaattcaagtcaaattatttttttattttttattttttattttgagtttgagttccgccaatgggatttattgggatttttaggaaaatattttttttagtcaaaaattaatttagtaattgtaagaagaagaagagacctattatggttgaaaatgaaatatcaaaatgaataatcttatttaataattaattgaaatttaaggaaatgtttacttcatacaattattttaagataaagatattaaatggcacaatggaagtttttgtagtataactatggagtattttattagtttttttttttcatgattgtagatattgtaaatatttaagattatttataaatttttaaaaaattctgaatagtttacaggaccaaaaataaaggtcaaatagttacttactacacgtataaaaaaaaataattgtgtgtaaaataaaatatttaaattttattttcgattttgtaaatgtaagatattcaaatttttttaaaaatttataggtggagatattaaaataaataaaaaatttactaaaacactcgtttaaagaggtgtgttataaaattattttatatctgtattgttattcgtgtaattaaatatcgattgttataaattttagtttaataactattataaaaaattattaatcattcacaatatggcaccttatagtaatagtgtctgacatcaataatatttaatagcaatactcatattataattaagtaaattaaataccaaatcttcttggctaaaaacattaaatcacaatttaatgtaagattataaatttgtgtcccaaaataagaggttaatattacttactttatttatttatttatttttcttttgaagaaacttactttattaataagcttgtatataaggaaagaaacactataattatcttcaatcttttactacaattaacactaatttagtaagttttttgcttactatttatacaaaaaccaacaattaaaagctattaaaccacaagtatattacactaaactaactccacctaattattaaacttttttttttccttaaaaaaatcaaaacaaaacatttcaagatgttttaccttttatttttccacatattaagctaaaactttcaacttaagtcatatatcacacatcatttaccaaactattaatataaaaaaaatgtaaacaaatttaccaaactattaataaaataagctcctttatttatgtgaccataaatttatcttgattaacaaaacatcattataaaagaaaagttacaattataagagttaaaaattccatactatttggagataattccttaacaaaatagaactctttgtaatctaacttacaaagatcaaacaaccatataatcacaattatgttaatcattgttgattattttacaaaattaagtatgtaactattttcaataacaaaattaatcattgttagtatttttaaaacatttaagtcgatactatagattattatcgcgagcagagcttattaaattaaaattaaaatttcattttggtaaaaattacaaaataaaaactatacaaaaagaccacactatataccaattagatgaatatatacatatattatatatagtcatactttgaatgataatcatccaatttggataaaaagatgaacttttttttgtgaagcttagtttgctaatgatgtttaattaactcaatgccccacaacaacaacacatgtttaattaaattataatagccctactaccataattgcctcttgcatgctttaacaattttataaactttgactaaaaaattaataaacatgcaaaaacaataaacctaccctaccatcctctaatgtatgattaatatttggtaataaaatactatggcaaaaaaaaaataataataacacttatgaatagtccaaaaatgataggtgacctttcataaaattgaacattaactaaccttattagaagctaagctaagaattgagtattgaaaaatttataacacaaaaaccaaattcaagtggattgttgtgctttgtttgaggtacaagtcatatgggtgtgtaccctttatcaaacatcccattgttaaggacaatgaccttcaatttttttatttttttttgtcaaattcacatttaaattcacattcaattggttcctctaatataattctactgcaaaaaatagtacaatattaaggtctttatgttttagaggggaccccactttttgatgttgactactaaacccttcttcattaccctacacttgtcaaaccatgcatctctcttctttttaaaaaaattatgataaaaaatttattattataatcttttgccaaaatatatgacagttcaaaaaacaaattgagtgtttggtatgttttataatcttttgaataatcttgctaaaaataccttgaaatttttttaatatgcatgataaattatatatcagaaattttattttcggtattataaattatttaaaatttttaaaaaataatattatagctataacatgaataacactatgaaaaaataataaaaaaaaaatattactcatgtcaattttaatataaaagttcactaagaactaaaagagaaaataaattaaatgaaaattatgatgtgatagatttttatgtggtgttgttttgtttctaaaagtttctactagttaattatattttctctctttctctatactttggtgcattttttttttttaatttttcatttgtcgtttcttgataatgtgaaatcaaaatcatatcttgttctaagtgatgttgactactcaaagaacattttggatagaagattacatagcaaaaagtccaaacccatatgtttatgggcccttccatatgggcctatttcataactactttttggcccatcaatggtacaaaataaatgtatctcaccatgtgattctattaaattgtttaactaccccttttattttttaccctcaaatacttctcaaagagttgttcacacttcacactttctaatcctatttattttggcatccaaccaagttcataagtatgattttttctagataaaattaaaaaaaaaataccaaaacaatgaaaaaaaaataatataaaaatacagttcgtatagaatttttaacatttttttgtgattttttaaattttatttacacaaaatatagttttttggtgtatgtatattgtacttttgatattttgttgttgattttttattatttatatattattttttaaattgttttgatgttattttgttattattctggtattatttttttttttgtatttttatagaataccgtaaaaatataaaaaaaaaaatattaaaagtaaaagtgtaagaaatttataagaattagtgttttatgtaattattcttttttatatatatatagtacattttgaatttttttttaatattttgataaaatcaaagactgaacattttggccgggtttgacatgaactcagccaatctgcccggacccgactcatgcgggtcgggtccaacccagtcagctctttcaagcgcgttcagtcctgctttttcctaacctgcaggttcaggttggacccatacccgccaacaaacccaactgattttttttttctattttcaatttaatatatgaaataaaataaataatgtattttttatttaagattttattaaaaattatatgtatatgtataacaacaaaagtaaatattaaaatataaggttaattaggaatttctcctcccgaactttgacatgtactaaattatgctccctgaacttttaaggtcgttaaaaattctctctgaactattgaaattgttaaatttaaggacttttgtctaatcgtagtaaaaatattctattatggatgaaagttcagggggcatgatttagtacatatcaaagtttgaggggaatgatttgatagatatcaaagtttggagagcatgatttagtacataaacaatcactgaaacaataaaattaaatgaaattagacaaaaatccttaaatctaacaatctcaatagttcgggggaaatttttaacggccaaaaaaaatcaggggcatgatttggtacatgtcaaagttcgggagaaaataatcctaattagccaaatataaatatgattttttttatatatatatttaaagtaaaataatataattttttttttgtgtatttttatgtttttcttttattattttgttgttgattttttattttttgtatattattttttatgttattttgttattattttggtgctattttcttgttacttttatgtaattttcttgtattttcatagaatacgaaatgtatgcataaactatggagtatgcactttgaattttagtcacaataaattttttcgcttttagtttttattatcatgttcatcatttatgattttcatgaacaataacataaatttgacaaataatttatttaattttgaattattggatttacaatttaattttggatttaaaatgtttttctctttttcaaaagaatttgggtggaaaaaataaacgttgagtcaacccgttgactcgccctatccaaatccgcgagctcaaaatccacaaacccaaatcctttaaacgagcatgctaggcttttattttttagacccgaaacccaattaacttgtccgatgttcaatcctaccaaacacatcatttatccaattaccaaaaccttgatttataaagtacatttaataaatgagaatcataaaatctaataaaagtattaaaatctaacaaaatcataaaaatgtgattttttattttctctaaaatcaagttgttgataaatttgcttgacaccctcaagccaaacataaaagctatcaaaaaatcaagaaagcattaaagtatgacatctcatccataaacacttttgcttttttgggtcatgtaaaaatgtgtatattatatatctctcttaaaattgtgttaggattaatatgactaatgtcaaataacaactaggtgtgtgattttttttatttgttttatttttacaagtgtcaaaattgtttgtaacaacttaggttttcttctcatggggctatcaagccctcaattgtgtaagaaagagacttagcccaatcagctttgtagagcaaagtttgcagagtatccataacattgtagccaggatcaagtttacattgccaaccctacaccaacaaaatcagaaacacgttatgtgaattttcaaagccgaaagaacactgaacacataatggcagcaccactagtagcgtttggttgggatgaatgaaaatataaaaatgagaataaggataagaatggaatcaaatttaaaatgtatttctttttatctggtcattccttctatttcaaaattgaatagccattccaccaaaatgatgaaaaagctattctattcaaatattttaaaatgtaaccaacaaaggaatggaattgaaattgtttcctttccttttcattctattccatttcattacttccaaccaaacaccacctaagtttcggtttccatactaagcctgcagttacttgtttttcatgccaagtgaagaagaagaaaaagcaaagaattttacctcaagaaccaatgttgttaccataacggtacagacattgccatcgatgttgactctatgacgcctaactttctcaagcaattgttggatgcactcaacaggatgtattacctcaccttctggtgaaccccaaaatgtgaatgattcctccacatcctggaagacacaacaaagttagattgaaaaaaagaaaagatcaaatctttatgcattgtaatcccaaaacctgttaaagaaacaagtagaagagttttgccttaatgaaagcctttggatttgggcacttttgttgtttagatagcctcaatgtgctctcagcagctgtgcgaccatcccgacgagcaacggctttgaaaaattctagtaaatttactctgtcacttccagatagttcagcagtcatgcctacatcgaggaatacgacatgaggtttagatttcaaaagccgttttcgaggagaatcgctctgacctacccgaacaaggatatttcccggatgcatatctgcatgtataaagttgtccacctaaaaaaaagatattattgaaattcagaactttgtactgcaaatttaaaggaacgaaagctcatgactgaaataaatataatttcaaaatatggtataaaaagtaatccactcaaacaaagaattgcaagaaacaagcctctcctttaaaatttccttttaacaataagatcaaattataaacacatgatttcttggatgtcatagtaagatgtatggctataaaagaagtgactcgattttatatgtggtattaagtttccacacattatcagttactaatgtgggattctctattattttttattttttattctaacactatcaaacaacaataaatgctattacacataattttcaaaatatattcatgaactgtgttaggaagagatgtctatattgcattatcaactaattagcactacaatttttagggaaatttgcaaaactaacaatgtgaaatgctaaaatttgtaaaataacctcacttaattaactctatgcgactatgatagtcgcatagtataaatctatgatcgtacattataatttatggtcgtttatgcgactatacaatattttgctcataattttttgtaaagttatttttttaataaaaaatttcaaaaaggctatttttacaaaagactctaatatttatcatcttagttattcgggctacagttatttatttatgtgtatcatcaactgaaaactagtaatgcatgtaaaggaacaaagttgcagccactacttaaaaattaaggaaataaccaactatagaagtgatattttcatagaatgatcatgtgtaagaaatgttaccaggagcatctttaggagtgcatttgtgccaatgtgagcaagtgctgatttgattcgagtatggccttcgagttcatcaacatagtgtgaaacacactccccttgctcaaaagtttccaccagaacagcagggtgcacaagcggatagacaggcttagggaatgaaacatccttccattggcggaaattgtatataaatcggctcaagtgagcagcttctcttgcgagatcaacttgggacatcatgaaaaccgcaaactgctgtacactttcatccagtcttaaccatttcaatgtaggaatgaaattagaagcttttgctacaaaatttattatcataaaatctctcttaattaagtcaccaacaccaggatgcctgactttcacagcaaccgtcattggcttaaccttttgaccagggtaacgaaacctcaaagaagctcgatgcacctgagcaatacttccagatgccacgggcgtctcttcaaaattctcaaatatttcagataatttgcggccaaatgctctttcaatacttttctttgtatactcaaaactatgttcaggcgcttttgtatgaagctcagaaagctggttgcataaatcccgagggaaaagatcaggccgtgtagcagcccattgaccccatttgatgaatgctggccctgctttctccaaggtacgatgaaccaccagaagccaagttttcctgaactgaactccaaaactatccgcaaaaggagccatcattacactaggtgtgaacaaaatcgataaatagagagctcttataaacaacattactccttctaaaattgaccaaagtaatgaggttatgtaagcatgcccatcttgtgcatacatataaaaagaattctttgatgtgtggtgatggtggtgttctacttccatgaatgatctctctgcccatgctacctgtccacaagtgaaggcgaaaataccaggaacaatgggatgagaccgagttatcgctaagctgatagcttgagcaatcctatttatggaggaaatagtagtagcattattggaataacagttttgagaaagccttttccatgcaatttgggctgaaaacactgagaaattcctggaaaaactagtcttggtgctgttatacagtggcaatgaagcatgaactctatcagaacatctgtattgtgagtacaatttgtatctgggaatatttagccctatggaagttgtcccattgttccctgaatttgtataaactctcttgatatattgagaagtcaaaaatctgcattatgataattcaaaacaatcaattaatctcactctggtgacattactctaacatcaaccaacagagaaagaaaaaaacattatctaatccttgaggtagaatcatgcttccacatcaatgtgatcataatttgatactccaattactcacatgatctaaaattaaagaaaaccaagatttctgatatgaattggtatatatccctagcattgaagaatgaagtcatgcacaaaaaattggattaactaagctgtttatacctaaatcaaaaatctgaatttttataatcaaaacaatcaattaaacacattactcaaacaacaaccaacaaaaagagaaagaaaaaagcacgatctaatccttgaggtataattatacttttatgaagctcaacatcaatttgtgatcataatttgataatccatttacttatatgagagaaaattaaacagcaaaacattaaaggcatgagaaaactaaagatttctgatatgaagtcatgcacaaaaattggatcgactaagctgtttatactgaaatcgatgacttgataatctttctgaatcccaaatcaattttatgaaaaataaaaacataatataaaaacggaccttgccatggttttcgaatggttgtaattagcattttattctcatgaatgaaatcggattgtgtaaacagtagttgtaaatcatggatcccggcgctgtgtgagatttctagggtttaaggggagagagtttggggaagacgaggttttgattcagaatctttagcctcagattccgtttctttcccgaatgggtctccttatgccacgtgtctatattcttcaagtcaaaaactcaaaatcatcatcatttttttttgaaacagtcatcatttttttttaagaataaccacttttattattattattattannnnnnnnattattattattattatgaaaattttaatgcaccttatgatacattgattcacctttaattatttcagttttcaaaaaaaaaaaaaaaaaaatagtctaaattttttatatttatttacattataattatttaaaatatnnnnnnnnnntttaaaaaatttaaaataatttaaaatataaaaaataatgttaaaatagtctatttcacacgcgtatataacatactttttaaatctaatttttagcgtattaaattttttcaaattttttaaaattttgtaagacgtctaaataattataatgtacatgaccatgagaaaaaatttgactaacaaattattttaaatgccaaaacagataggagagtacatctcttttaagtggtgcattgtagaattttctaatcttctttacaccccaaaaatttataaatacaccttatttcaataatttgtatgttatataaattctacaatgcacctcttgaaagagtacactattgtactctatctgtttcggtatctaaaaaaaattagtcataattttttttatgatcgtatacattgtagttatttaaaccgtagacgattctcatgcttcaattttatgcgtttcggatctgaaatgtcattttccaaatcttaaatttcaaagttttactttccctattttaaatttcattttcctccttttaaaatataatccccccaaaaaatcatatctcatttttaaaaataattagggtgcgtttggaaagccacaatgtaattggatttgtgtgtaattggaagtaattacacaatttggcatgtttgtctgaccatataattacaatgtaattgtgtaattggaagtaattgaggggtttcaattacactctccaattctcatgaccccctatgagaattgaatgtaattacactgtaattatcaccttatatccaaacacaccttgcattttataatatatgtaattattaaactgaataattaccactctaataattaccttacttagtaattacacaattacttccaaacgcacccttagtaaattttatttcatttcccggttctctttcttttgcaaccatgaaccacgctgtccttctcctctactctctcactttatccctttcctctgctctctcatgataacataaaggtaaacacaacattctattatttattatttaaatttctattaaccacgatttagtttgttgatattgatctgtgtgtgtgttcgaaataaatctgaaacttgcaatattaaagatcgtcaaatgaaaagcaatccaaaacttgtaaaaaaaaaaatttaacgagaatgaagacaaacacaacaacagtgaaaaaggatgaaacttataaggattttcgagcggatgtaatatatgcgaaaaatttaaaggtgattaacgacgataatttttttttagacaatctactatagcgacagtttaaaactattagctatactataagctatggttttttaaacgtaacctataatatcgactataactgacagttttagaccgttacaaattcttttacgacgacatttttcttctgtcacttattttacttaatattcacaacgcttgtacaagtaacagttttatagaccctcaaaaatttcttacccgacagtataaaaatgtcgggaattcagaatttttttagtagtggagtgagataaatttgcttgacaccctcaaacccgaaaattgttagtcacaaatcaaagtcctttcctttcttgatatcaatgtacaaactcaccctaacacgtacaaggagacttagttaaaaaacaacaaaatatgcaaattaaaaagataattaagaagaaaaaaaacatatattagtcccataataataatattaatcatcatcatcatcatcatcatcatcatcatcatcattggtgggtttccaagtcactattttttgttcccccaacacattgttgaacaagttgtttaagtcctttcttagtatgagatttcttcttctccttcattttcctagccttaattagttcctcctccatctgcaaacacaactaaataattacacaaataattaatattattcatatatataatatttaattagcactactaatcttgtattaattaattaattaattagaatatatataccttaaggactcgatcttctacacggtgaagcctctcaatgagatttcctttaacctcagcttccaacaccacatgattgatcggacggcagtgcttctctaagcttcttggagaaacatcatcgatggatgacacgtgtccttcacttgttaaggtcccacttgattgagtggattcatatgagctttttgatggtgatgaacatgatttgttacttcctttattaatttcctccaactctctcaactgtaattaacaacatatacacacacatcactatacatatatatatatatatacacagttgtactaattaatgttttgcactaacaacgtttgtccaatccaaaagatgtgttctttgttaccaaaatcccaacatgcccacatgtttctaaacatcaaaaattcagttataaatccctagtataatccaacatatagttacttattattatttaaggaaatatgttaaatttgcaaaaaagtagaagaaaaaaaaatgtaaatttgcaaaaatgacaatataattttttaagacatataagtatataactaaccgaagtaggagttttattttattttttattacaattatattaatttgttgaacaagtgaccaataaagaaaaatcacatgttaactaattaatttgtcttcaaaataaataactaaactatgaaaaatcaaaatataaattatcacatgctaactaactaataatgtctcttcaaaattttgattttaaaaaaattgtcttcatataataaataactaaattatgaaaaatcacatcttcactaattaatttgttttaaaataaataactatattatgtaatataaataaaataaaataaaataaactcaccatgttgtctaagcgatcaagtttggagagaataggttcgccagtgagagccacagtagtactcattgccccaatagataccaacttaattttctttctcgggaaacaaacagaaaatcctctttcttttctctttcaactaataattaaaacttttagctactagttagtaaccaatgctgagagagctttttcttgaaagggaaatatatttatagagaaatgaaaataataatatttgtataccaatccatttcaatgattaagatcatatcaagattgacacgtgtcagttttgtagagtgaaagcgtgtaaagatgtgacacgtggatgattatgtaacggagagggttatgagttatgatcatgtagtgacacgtcataaggtaacatgcagagagatggggagttgttaccacgtgtgagtcgcacgtgatctggccatgctcgttgtgtcagaagtgatagtagtttagattatctctacatacatattaaggataggataagtttcaatcttctttcttgtttttttttttgcaagaaatgttaaaaatgagaataaatagtggtataattacacaatatttataaaattataattttttttttttagttttatcagtataaattatttttgaatttattaaaaaaatatttaaatgtaacttctatttagatctaataatttagaatcttgactatttgtttaagaaaataacagagtttttactaaggttgtttaaaaaagtggtttcttgataaagaaactactttttttagtgatttttctgataattttttcgacaaaaataccaacgacttttcaggactgtgctgtcggtattagaaaaatcgccgaagtagctatcgatatcgaaaaagtcgtcgaagttgctgctggtgctaaaaaatttgtcagaattggcattgtcgtcagaaaaatcaccaaaaaactagttttttaatgtttcttcatcaagaaactagtttctagaaacatcaagaaactagtttttaggtgatttttttggcgactatgccaattctgacgattttttcgaaatttgctatcagtgccgtaaaaattgctggagtagctgccggtgtcagacaagtcgtcggcagcaaatccaacgacttttccagtaccgacagttactccagtaatttttttagcaccgcagtaaactctgatgacttttctagcattagtgacaaataaatatacttaaacaaataaaaacattaaatatgagatttaaaaacctaatttacatacatatggcatattaaataccataaaaatacttaaaaataaaataaaaaaaataccatgcagctagataatgggccttacttgcgcaatacttgtaactttgacatttttcaatatattcttttgtaaataccatttgtgggtcaaatatatgtgaaaactcctttaataagcctaaatccactataagaaatgtcacttttnnnnnnacatttttgtgctggcaaaagttggtattgcgctggtaaaatagaatttacttgtgatgtg

SEQ ID NO: 14419 - DNA, 6305 bp, Cannabis sativa
  modified_base (5286)..(5289): a, c, t, g, unknown or other
atatatatataaacaaaattcagtgtcatgtgtcggagatttaattactgtatactactactatagctaccgactctctcccaccattatatctccaaattaaatcatatatagttccatatttattaattcatcatatcaacaatatcgacttggggaaaacaatcaaatatatatacgatctctgacaaattatatatcaacgaaaattctgaccattcttctttagtttatttccaatcttttaattaatatatagagtagtactatacatatattttgcagttatatattctattatattaaccatttatatacataagcacacgatttcatatttatttaatatttaattaaggaatataaaattttccaacaaaatcaaaaattcagaatggtgggtcagttagatgatcactctacatgattttaaaaggcgatttgtgctatcaatatcctgacctcctcagttcagttagctaagccctatgtatatgtatatatatattagtactagttcacactacaaagtgtagtagagagaccaagaaacgtgattaaaaaaattgggggagacaagcaggaatgtaccactgcaatttggtatactatttataaaatagagtggtccggagatggtcattcatccctagacacaacatataaatatatatacattgattatgaagagcaaaaagcctgtacatttctcgtctctctcaatatcaatttattaattaagtgcatgcatgcccatatatatttataacaatatttgaatatatatatatataatgtttaaatgccaatttaacatttgatcattataaatttatttgatacggatcatcaggggcttaatggtcattaaaaattatataaacggtaccccggccccttcatcttcatcatgtcctgtcctttttagacacgtacaataaataaaaacttacattatttaatgaacaaaaaaagaagatggtctactacatataacattgaaggatttctttttttaatatatgtattttttatgtggtatatacaaacaaggaaaccgtaagaggtatagaatagaatggtagagggattgtggattctcttttgggatagtagtagtgtcccacacaaagttatatagagtaatgatcatgcgtagtttgtgaactgaaagtactagagtggtggcaaaactatcaaaaacaattctaggggtttagctcatggaagcctaggcgaccgtgacacctagctatacccaccaattgatcaagtcctatatatatatacaactccccatgcatgcttcggtgtgtgtctataatacaaaacactactgttcttagttcttaccaaaggctactgatactgatgagagagagataggacacgtagtacactgtcctgtatttataatgtgtgtgataatatgtgcaaaaaaaaagggtcgactctctctagctacctacatatatatatatatttatgtatatttttattttacaactcatcactatatatagctagctagtgttcaaaacaacagttgtcttagtaaaaaaaaaaagttaggtttatttatttatttattttgacttggacatgtaacacataaaaacgttacactatgctgcataataacgcaattatataaatatcaattaaatgcagccgcataattgttccattaatgttgtttttcttcaacgagtttgcttgataatatggttgattctcatataataatgtacatacaattaaattagccgaaatttttgaaaatacagtataattacatgaattgtagtcgcctaattgtaccgtcattaatattatatatagttaccatagaacttttgttccggccatcaaaaaaaaaaaaaaaaagaattattggttaccataaccatatagtactagctatagcttaataactaatttttttctttttctttttcacactagctatagttttaattaacaggtgtgagtgaatcttaactgcaatgaaacccccgggtcctttattattttcttgctatagatgcttctgaaaactgtttaattaattgaataaacaaccgaataataatatttaataactagagtacttcttccaaaaagttgagatttaagtagctatattaaatcaacaaataatgtataaggatgtagctatatatatatacatacgaatcacgatgtttgtaacgtagaaactcctgcctgggtacgtgatccaatggggcctgattaatctggatagtgtaaagtccaattctaaaatgttacatctatatatgtactacactagctagtttttaagttaatgtatatataattagctggaaaaatagtattgcttcactaaatgtgtcatatttgaattcatatatattttgtttgcacacgtacgtatcattattcgtaatggttgattctttttataaaagggagaaaaaaaaaagccaaatgatcatacgtacgatataatctactgtagagctttccttcaatacaggccacattatataaatatcatgtacaatacaattaaatatagctttctatccatatagctagggtttgtggaatgtttagtcttgaaggttgaggacagactacgcatgcgacccactattcatctctttcttcttggcacaatttgtaaagtgctcatgacctccatgatcatcaatgtcctatgtggtccaatccaaccatcagatctctttcacattcagctagctaagttgactgtttagcagcctgtattatatctttatatttatatatatagcttagagctatagagtgctaaaccttgtgatttttatcaataataatttaaaagcaatacaacatgtataataatatatagtaataatattggtttttagagtggggtcatgatcgaggtaggtcgagcccgatctgtctaattttccctgactcttgtttaatttttgggggtgtaatcatatacaaatctagtctcctagttattgtataacacttattaatttaaaaagttatagaacatccaaactagatagttttttaccgaagtttagtaaacgaaatttgagacctcttttcttagtttggagaaaaaagatcaaaccttggagtttttaatatgacatgacagctggctcttaccactgcagcaacgctacctacatatatgtatatattactgtactatcaaataataacttttaaattagataattaaatttctaaactttctacataaaaagtagccaaaagtttcataaatttaatttaactatatttaaaactacaattaggtacgtagaaccttgacaacctaattagtaaaaggtacggccagctgttaaataatgttattacatatggcgcttgatctgttgagttgttgtgtgtaattacatatataataatattatacacagttcttcacatgagcttaaaacaaaaccgttcaaaggttttctttattatacaaaactccaaattatatatattgcaatcatcactaaataactaatcccttatatccaagaaacacgtgatgattttttctttatttgtcctttgtggtcaaagtttgaaagtacgtcaaatgaatgataagaaattcaaattcctgaacccctgtcgaaaatcgaaattctttacacgagctatacagtatatatatttatatataaaaatatttatacctaaacgataaaatcttttgagtagtcatcaaattattgcaatatgattgttgttagactcatataaacatttggatcccagattatataaacgatatacgtaatttttttacgagcagactccattatatgtcctatatattacatatccgaagcctatatatatatatatatggaaaaatatatatattaattatctaatagtgtaagttgaacttagactacttacaaaattttagaaaattctcaatgccaaaagttaggtttaaataattttttataaaaaaaatagtgaaacttgcagataaatatttgaactttatttaagaccacttataataagagatgtgaataaaattgtgctatgtttgacataaaaaataactttgtagtacatttacatgtcaaatattagcattgtgattcaatgcacaattactaaaacttgatgtgaaatttaatatctaattaatatttttattaaaaaaaataaaactaataactttattatcaattttattatgtaggacaataaaaaaaaatataaatacttcatatatttttattgataactaagaggggatcatgtggtgcatatcctttcctcaccccttcggtcattttgataatctcgggaatcatgtgtcagctataaatatcttaaacttcaatctgccttagttaggtcatcggtaactacctcaaggattttcattacacagatgacaccacctacaacaagctagccttcagaagagcgaagcctttaaactaagggttgtggtgggtttcaaaatcttgatccaagcaaggatgccagtaaaagaaatccctaccactacgtacactacaccacacaataggtggtaatacttcataatttagtactaataaaataatataaatgacgtcaatgtaaataaaaaatagtgcatttattttttgcatcatagcaaatttactatgtatcaaatttatatcattttttgacacattattggaatacatttttttgttaaatgagctatattttaactttttttatcgattatttgtaggagatgctttaacctaattcaaattttctaaaaatttacaaattttttttataactataacatatatgatcatgaaataaagtcaaaaaaataaattaatggttgtatataggattatcttatttttatatgtaaacaaacaattacgacatgaaaacaagacaaagcatggtcaactatatcataaaggaaagtttacaataatatacattttctgtatttaatttataataataacgttacaacgcgccacgtcagttaaatctaacgttttccattttttattttttatttattttcttgcgtttttaaaagtaagtgtttagttactaaaagtgttgataagaaactaatagtcacctttatatataatttgagatacattttagttacttctaaaattttaaattttttttgacaagttacctctaaaacttatttgtatacatcttactaattaattagttgtttttaagttatataatggtagattataatttaaaatacatttaggtaannnnaaaaattattttcaaaactaatgagttgtcatgtattataacaagctactatttttatatgtcaattattttatgtacctttttattattttgaaagctaattagttatcatataatataattcaaattaacaaaattgtaaaatgaatgttaactaagatttaataaaattaacaacaactaatcattatacaagacatttatagtaatccaccataaaattaacaatatactaaatattgttttaagtttaaaatttaattacttgtatgttaataaaatatatatatatttatatataaaaaatattgcttttaagtatggttattttttgataccaacagaaaaatatatgttttccacacattttaaaatgaccaccttaaaaagtaacacaaatataaactaattagtatctaaatgtctcatttttttatgagtaattagcgacgaaatccccttatgttttaatttttatacacttaatccccttatcttttatttaatttggtggcaaaaccctttatgtttatttttctttgcaaattcgacatgcaagttaaatattatccttaaatatcaactagatgaccactatatacacatgagtacagtaaaacagtaatatcaaactgaaactttaaatttgcaaagaagagtaaatttaaagggattttgccacaaaaaaaaaataagaggttaagtgtaaaagttaaaacataaaagggttttgacgtaaatttctctttttttaataacatctggtaattttttttgttaacaacatataaaataaaataaaagattatttttaattataaatatatattttctacatattaataatcaaacaattaataatataatttttttatatatatataattatagaaaagaaaataaaggtatcaaaattcctcattcacagcacgcataaaaaaaaatttacatacatttttacgtttaaagaatgttttttacatttttacggttttccaaaaaataacacgaaaaca

SEQ ID NO: 14420 - DNA, 7776 bp, Cannabis sativa
cgagaggcattagccaaaatcatttaatgaagtaagttcctcccttgtctacaaaacacttacatagaaccatccatccacttcgtactgtatgtcaacctcctcgcccgctgtcaagttaagctgcattgacataattaatcattaattatcttcatcttccgcatttgaaaaaaatggatgatcatagtaagtaaaaggaaaggatagagcgaaatcaagctcataaaaataatgataagcgcatccaagattcaagcgtcatctcctgtacataactagctgaacttgttggaatgccacatctcacatcaaacgacataatttctcatctttacctcatcatcgccaccggcagtgaagtcgtaaagtgctgttccatgttgcggattactggaagaaacccgttcctcatcttgagattcaaaactctgggatccttgaccacccagaggactgtcaaaggactcaaacctttgcctaacaggtgatgagtatggtggaggttcttctcgaatctggaaaggatcaaagcattagaatttaactcggtcaaaagctacacatgaaagataagtggcaatgagccccaccggggaactaacaccctcatacaatgagggaccacttgtggctggagtgctaaatctacttcctcctgacctctcctgttgaagattattaattagtaaaatgaatacaaaaatgggaaccaaattactttaatataacaacacacttcaagatcaacttaggaacaagaatgccagattgttttgtgatcttatctgataaatagagccccttaaaccttattaaacctatcaagtaccgcttaattaaaatagaatcgtggttactcttaaattacaaaataaagtgatctcaaatcaattttaatttgactgtaccggtcgtgaactgaacaatgaagggtagctcattccaccaaagtgcgatgatatggaagtttcaactgatcctgttgaatctggagatgatgatccagatgatcttgcatcttcctgcagttcaaaagaatataaatagtgaacagccagaaggttttatatatatacatattaaatatatatatatatagtatactaaacttagttttctttagtgctaagctaacaatacatgatagcttgaaaaatacgtacttctatttctgtagtctctaaaagtgtctttgcccacatatcatcataactgactgaaggtctggagatgatatgttcatcgtcaacatcaggagcatcagttccagcaccagccagaaattcattaacctaggaaaaaaaccaagttgaaaataagtcaacacaaaataagtgtagattccactgattatttactaatattaaaaaacatcttagtaacaaatacaacaaatatttactactgatcattttaccctgttcacagctggcgcattctttccaaacaagccatcatcaccaagatttgctgcccaggcattcactaggtcgtcatcgagtgcatcagagtcatcaggtgccggtttggagtcataaataagatcggagattccagtagcaacagctggatcactcaaaccagttgatgcactgatattgtgctttgagcgatatttatcaatcagttttccactggagaaagagaaacattcagcaatgtcaaagaacaatgcatggccaatatattaatacgacttacaacatatatcagtcaacaatggatatgcatgtggaggaatcggcttgttaaactttcagtcgatgaacattaccaaggactaactactatagcagatggagatagtttttatataaggacctccatgacgtaagatctcagtctagtttattaagaattcttacttgctaaagagttttgaaatagactagaattaactagtccaaaagtcagtccttaggtttctaatttcaatataccgttctcaggttaaactatctaaagctattttgagatttcttaatctctaaactacaagcatgagtataaacttctcgccttgtgtctctttagcctctaaacaacaagcatgagtacaaatttctcacttgtttacttaatatagcaggttcctcagtataagcaaactacagctggacccatcaataaatttcttgtttcttaagaggtaaagaaaacatacttacaaaagaaggaataaaggaaaataggcccaaagtatcattttccaaaaaactcctaatccaccaacacccaaaacaaagagaaacagtaaaaaaactgcaggaaacaaaactcggttctaatataaaaagtcatagtagtgtgatgatgtacagaaatgagagccatactacgaaatgatataagatatatccaaaccaatacaaggactgacatttcctacatggagagaaacatggaatattgatgtaaaaatcatttaactatgctctttcctctcaaaaagaaaataatcataaaaacttgacacctatcaaaacaaacacaaagtgatctgcaaaatagtgtctaccttattggccccagtggtagatactttgctcttggaacataacaaaacagtgaaaccagatcaagcaacctttcatgggtttcatagagttttttcagttcttcatctgcccattctttttgtgcattgtcatggtaacgaatatctctgagtatcacaaaggaaacttttgtcagtataagatgtagtacaattaaagaagctagatagtcatatatttttatcaaataaagaagcaaactttttcttgagctggtctccattggttaataattcttttacttactttaatacaacagttattgtgtgttaaataaatagttatcatttcttatgtatgacacatcaataataaagaagcaaaataatcaagagcttacttgattaattcatcttgcgctctatacatttcatcaagaacctttatcatgggactaatcaaaactccaaggccagtaccactggccccttgatcttccccattactgagatgcatctctgatagttgagactgaacaccaccctgagctaaagtgtgcaagaattcatagatctgtagcctataaggctcaccggacctaattgccatggttgtaagagcttgagcagctacaattcgaacctggagaatcatgtaacccaagaacatataagaaaggcaaatcaaaacagattactcaaagcagttcgattctcgaacaccaatttatttaaatcataaggggtaaatgattacaacacttaaactaggtaggtaatcccataaaaggatggaaattttggttttacattgaattcaacctatcatcacccaagatacagatggtatgcacatagataaaaactgaccacacaggaaaaagcttatacctcccagctgccactgaatgcacacctttgaagtcgagtcaacgcaccagctagagttgggtttcgagagctggcagcagcaaccattttatcagcatctaacatcatcaatgcagtcccaggaggtgttgcggattcccaggcatattcagaagcagcataatttgcattttctccaagaaaccatacctgccaatctatacgctcagcaagaaacaaaaatctaaatggtgatcaatacctaaaatagaaaaagacattaatccccttactgctgcttgaactaatctctgcagtgccaaagctgacttcggatctgatgctgatactctatctactgatgtcaaccccatcattgatccaggttgtggtggaggtagatcaagaactatggtaactgcctctaaagcagtatgtttcccatcaggaccagctccaactaggcatgtctgaaaaaggacatttcgaaaatactatgaatagaaatttctaatatctatattaacaaataataaaacgacattattttgtgggataaaaattcctcagtattaaactggaagtatttaaggtacaaaaggaacaacatgaaggtaagattacaatccaattgataaagaaaatttaaaatagatagcctcagtaagcaagaagataatacagaaaacaatacttttcagatagaagcgaagatacagcaattaatttgtaagaaattaccctgtaactgctatataacccatcagcaagcaagaaaataatacatgacagtgtttttcacaaggagacaatgattaaactataagcaatgatatcataattacgacattaaaaagaactttaacatagaattaatatcaaagtcagaatgggaaacagtttgaaatgagaacagaacaaaacccactttccatagtagttgtaacacatcagcatcgatcttccctggaactttggtagcaaagatccttgcaatttcaagaagagtgacagccatatctggagttgcctaatgaagaatgatatagtaagaacacttagttagaacttagaatagaagaggaggcagaatatattttgagagaaaaagcataaacagaaatcataaacatcacattgataaaatccaagctttggcaacagaaaaagaatacttaaatatccaactgagtcattgattatgtaaaccacagagatcatcaaaaaaatgtttaaatccccctaacccatcccagccaaaccacaagtgttattatttgaatgtatcccaaacaaagacacgcaacaggcattaaaaatcacaagtacaagaatagaaaaagaaaaatacaattcagcgcatgagcagaaaagaatcttaagagacattttcatgtccatttaataccttaaaacgagcatgcaaagtaagtaaaacatcgttcagaagcgtggctggccaagctggatcagaaagttctgatgcaataatggatttcagctcatcaaatgattcgtgtggactttgcatccaaatcagagctttaataaccattgctctaacataaacacattcacaggcaacagttgtccgcacaacttccatcaatgatgctaacaaacttgcaatcgtatccttgccaccagttccattagatatggaagcagttctccgggagcctacatgaaaggagcaaaaggaacaaagtaagcaacagcaatagcatatgcaacgtaaatcatttaaaccatactgctcataaattatgatcctatgttttcaaatatgcaataatctttccatacaatgaacatataacacctgccagacttgttaaagaaccaaaaccagatggccaaataataatcacttagtactgcatgcacacaaaaattctactaaatgccttagtccataaaattgcaatctataaactattacaagaaataaataaattctaactatcgaaaatttagaataacagaattcaatgtcaacaatcctgtgaaacactaaacagacaacataatacaagagatgggtactcaaagataattactttcagtatgagaagcttcagtactgtctgagtcgtgtgaatctaatgtctcagaaaatgaattaatatgtgccccttcatcaatgtcttgtacacctaaagcaaatgcagcagctcggcttctccccatctcctgcacaactcttgctgcagcatgcagtgttggcctagaaaaactacgaaaagaactctccagcctgaatacaaaaagtaaaaaacaggacacgtattactaaagtattctttaaacgttaataaaaaaaaatcatttaagataataaatcctgatatttgaagatcacaaaagactactgatgtaaaaatgaatatcagcttaatcctaatatccatcaagaactcagatgtttttaatcctgggtagagaaaaagagagaagcgtggtcaacctcctcattacaagcttaataagaggttgtgggcgccttgtcttttgggatttatctttagcagcttccttcagagaaggtgcttctggtaatttcagaatctctctagtcaaacgataccacccagcagctcgctcttcagtcctatatgaaggaatagtagggggagcaaaatcaatttaggaaaggaaacaaataacagctcatcaaattggaaagcagctagaagtagtcagaccaaaaagactatgcaaaaccccctaaaataaagcataaaaagaatagccaaaacagaggtgcaaacaattaaaaaacagagaaaggaacctctctgcagcattgtcatgttttcccaaaacacataagattgcctcaaaacagactctttcactgggatccagaagcagttgataaagcacagagttgaactgagatttaatatcaggcctctctgtacaacaaacaatatgatttagaaagccgatcatataatatactcaaggaaatcaaataccagatggcacttgggaagaaaagacactaaccatctagtgctcgggctctagatatagtataacacaatctagctagtgcaactcttgcaagaacatcatgcaaatgcagcacatcctgcagagcccctgcccgtgaacatatattattaccacaaaataaatctagctagtatgtaacaaagtacatcaatcaagaccacaaaggaatacctccaggctgtgcaagtttccctgcataaaaaaagtggcattagatactgtaggtggaacaaaaaaataccagaattacacgtaaggaaaacagattcatttgcttgagcaaaacatgatcagtgacaaaaattaaaaactttaaatcaaatcaatttacctatggccatggcaactccataaggatctttcgtagctagctcggaaagaatttccaaagaatgtctcacagcaacaggatcagcaaatgaaaccctgcactcaaatataatataatataatataatgtatcggatagtcaaaatagaaacccgcaagtgcagcacaaagaggtacaggtaccacaggtgctatgaactagcctaaaacatagaaattagagcatagaaagatttccaaaagaaaaaaaaaatccaatataatgaaaaatgtagcaagaccattaggatcagggtaaccaaataagagaatttcaatcatgctagaaaataattgtagatgtttagtcaaaactcttaaaaaaggactattcaacatagagtgctcagcgtcacatcgacaaaacttttgagaaaacacaatcgattccaatatttcccataaagcaaaaggtgaaagatgttggaccatgtgatgttctctatttaagtagtatgtaatcaagtgtaacaacgaaaaattaaaaggaataactgaacattttcatattgtgtcaacacttctttattgtatgtgcgtgtcttccctaacctttgggaggtagaaaactttagcaacacattataagtgggagaactataacaaaagctagcaaagagatataagcacaacaactaattacttgacatttctattcaagaactacatgcatgcaattgcaataagaggttaacaatcaaaattgttggaaaaagactaacccctgtgacgctctaagcagaaatgctgggtttcctggatccagaggaagccttcgcaaagcacttaaggcagcatattgcaaattactccggatgataaactaaaatttgaatttttaatagaattaatttaaagtgtatcagcttataaagtacttcactagaatttatggaagtacgtgggttaattacctccttatcgccacctttagtcccaaacacacctttcttgcgtttgtgtggggcatcagccacctgagaatagatggattgttgtttaggataaatataaag

SEQ ID NO: 14421 - DNA, 7946 bp, Cannabis sativa
  modified_base (2472)..(2492): a, c, t, g, unknown or other
atgttttcgaaacttgaaaagcttcgctcaagctattcattttagaagccgtgttagttttaattattagcgaaaattatatattaggcaagagagttgggttttttttttttatgttcttttgacaaatttgatctcttattatcaatttctctttttccatagaaaaagttttagaagtggaagactagcacttcataggagttccattgtccctctcttattttctcgtttaagaattaatttagctcttaaaaataaaaaataaaaagtctaacaataatatcactctatactaaaattgaattatttgcatggaaaaaatattatggactaatgatcatctataatttgaatgtgtttgagagatatattactttttaaattacaatttctttcactgattttattttattcacaatggagactagaaatcatcttcctccttcacacaagtaccccaagtgtcaaatttcatttcgctttactattttgtgaaaaaattaacttctagtaacaaaaaaatgttaacaaaattaagtgtatagataagtaaaagataacaaattgaaaagtaaaaagccaaatcttaataataaatactgtatattacatgaaccattagcatcaaaaacattaataagtgatttgatgaaaaacaaaaaaaaacatacacacaaattataataagtagaatgttattaatatgaacgggaattgatgttccaaataacctttgtaagtattaggcaacgtctttttttttaagaaaaaaaagagaaacttaagttactaatattcatcactcactatcacctacttaatttaactggttttctaattcaaacgacaaaaagattagaaaaaaaaaacatattaacgcaactaattatcttggagttgtatagttagtagggaccctcctttcggaaaagtaataaatcattattgaccactccaatattttttttatttatcacacgacaaaatataaaattgaaatcctaatattttgcgcctaactatatgatatgagtcatctttttctggttactttagacatattcctggttcagataatgttctataattcaactaaatttctttcattttttccttttatgtttgtcattttgtagcttatagattattattagttgaagtttgtcaacaaaattctaatttattttctctataaaaataaaacaaataaaactatatcatgagctgtctattacttaattaggctacatgcatgtgactatatgtgagtttaagaattattgtgcatttcataatatatcatgctttaattatctcatatatgatcaagaccatttttctcaagctaccaatgggagaggtgagaacatgatgcatgatttgtctacatacacatctcttaaaatctcttcttttttgtttcaaattacaatggataattgtcagagaagatggcgggtatgatagcctagcaatatattattgttcaaatatgtatattaaattaactataaaataaaaataaaaataaaaaataagacaaaggagatcataatggtagggccctaaggaccctctttaagatgacaaattttgtgacattttatcgtgtttgggattagacaaaatggaaaggggattgctgtttgaccccatttcagaattttaattttaattttgacaaaataataataataataatacatgggtttgcgcgtgggtcctctcgtacctggatagtcatgcagaaaggttcatcatattcacatgcacaacacaacaatattacggagattcaaacccaaaaagctataatacattcacatattcactaatccatacctaaaaaaagtttagttaatttaattacgtcttgtgaagaacgatggttgcgtcataaattacctaataaatgataaatgtacaagttctttgatgaacttatcagtttttttagcgttttttttatataattttaattatacaatgatgtcattatagtgatactaaatattttgtatttttttgggaatttaaataatataataccgaaaatagaatttaaacattcaataatatgcatatccaatttattttacacgcatacaatagattaaaaagaaaacttacatacttaaagtatgaaaaacacgaaacatctctaccgtaatagcaaaaatgatactcatttcttagctcactttatttataattagagctttaaaaatggattgggctttttgacaccgtacaaaattgacactagttcgagaagcaagaaaaaaatatggatttgggaacaacatgacatgatattgcaaattgttacggcacgacacaaaaaaatagacttaaacacgacatagcaagacacaaacttgaatgcacgacacgtaaatacaaatagactaatccaaaaaaacacaacacgttaaaaattcttataagttgataataataataataatnnnnnnnnnnnnnnnnnnnnnaataataataataataatacatatgtatttattaataaatattcaaattttaatcattctaattattttttttataattatgtgtaaagtattgttgaaacataatataaaaataattgaagctataaaaaaatatttataatttagtaattaactcattaattgtaaataaaatagtgagaaagtgaagctcgagttagacccgtataagaaaatggctggcccatttatgaaaaacagggcatcatgagtaaattacgacacgaaaaatgtgggcttacatgatgtgtcgggcttaccattattattggcacggcactgcattttcatatctttttatgggttggcacggcacgattcatactattgtggacttttcaaaatatatgtcggacgcatatatttacaactatactcattatcaccggtcgtggtaatcctaatttatttaaaaattgattttataattatattgttaaaaattgtgaataaatttttcaagaaaactttttataaagggtagaattgtataaaattataatgattttgttcaaagggtggtagaaataatttattatccttcaactttaacttcgatgatgtttggttggaggtaataaagtggaataaaattaaaaaataaaaaaaattattttattttttatttggtttcattttaaagtattagaatgtcattctaattataactatgctttcattccttccaactgaatgttacctaatgagatattttttatgtgagtttgagttggaggaagaaaaattaggaatagacttgaaaagaatataaaattaaatgttagaagggattaacattaactaccattttaatttaaagtaggactcattgggaaatataaacccctgatcattaaaatttaatttaagtctttcttctttgtaagaatgacaactaaataagatttgtaactcttaaacacatcatgtgtacacaaatgtatacatttttggcatagaaactctatgtcaacaacacccttagaaactaaaattagttagagaaggaaagaaaagaaaatgtttacttgttataagcaaatattattgactacataattaattgattagaaaaaaactacaaacggtaatgaatgttctacaaatcacttcaaatcaacaaactttttgcttttgtgtctagttggttttcactaatcatttttctctcttttttcaaccattcgtgcactaacgcggtttgcagcttcggcctttttcttccggtcacttcggtattagtgtattacaattgcatgcatgtgagagtgggatcagtgctgggctgggcccttactctactcctcacataagatcattcaaatcatctaccacctaataaacaataatattattccagcttttaatctaaatcaggtgaatatttaaccagctgtacttaattaaaatttactacaagtactgatataatgaagaatgacccctttttgctgatgtaatttaattagcttacttaacttaaaaatgctatgatatgacatatgacttggaatcggtctcaattggtttaggacttggttccctactctactcggtctcaatcggtcccattaaaattattcgaaaagattcggctttaatttttatttttgttggttccctttatctaatttaaattttggatttaagtttaatgtataattcttttttaaaacagaaaagtttttattgagtctgggatatttgtagtgaagctagctaagtttttttgtgagaattacaatatttttattggctgtaacactaactagtttaaaagtttggcgccacactattacaagtaattatttttaaaataaatttaagatgaagaccactgcagggttcttccatcaagcttgatgatgatgtaaataatagttttgactaagacgggatgaagatgaagttgatggaatatttcgaacttggaaatgaccatgtgagggcgatatttatcttagaggtcttcgtagtgacaaaatcgacaagactgtagctcgaacttgaatagaacgacaatggcgacttgctcttgacatgacaaagacgaagataatgttggcttcatttattgtcagaggttgaaatccgtagataggcagctatgttcgaggctgaaaacaaacacaataatattgtatgtttgtaactttaattaaacagttgattctgctcaactggtaacttatatttttttgtggtagttaacaatttttaaggcacatgtgctcaaacagtttatctttagaaaataatgggagtatagaatagaatgctgagacttgttagattaagcatatgtcccaagcatgtgttccatacttactgtcagtttcaaagttagtgggcgtatcaacaaattaagctaacaattgaaaaattacagcataattgatgactttagaataaataaggactggatgttgtatcaacagagttagtgagggttattcaaatgggaagctagcaaagatggcacatgcattaagaacattaaaaactcacagcaactaaagtctaaaacaacaaatggaagaacagaatgagggtttctttcagtgtttaggaacaaatgaacccatgctcaaacgatgtttaatcagcctgttatccccggcgtacctttgatccgttgagcaacgttaaatagcaaaatgcaagttttgctgatgttatgaaattaatgataaataatggaaggactacattgtattagaaggagaaagaattcccattaacctgtgattaaaggcatgtattacaatgatcataatcaaataatcgggacaattttatgaatctatcgattgagcaactgaggatgtaaaaggaaattggcccagatagaatttacttagaagctggtacttgtacaaaagacactacaatatcaaacagaactcctttacgtctgctattaaaatgcagaaccataagaagatactcactcagttctgcgcatcttaactgtaattggtaactctttgtaggattgaaccttcgtagctgctcggcgtagcggtcttccaacagatgatcgcctaaatccttgggctgaattgagggctgtatttttgtcatctttttctaatgttgatccttgtaatgtttgaccacttgcaccaactagatcaccatgcaaagaagatgacaactgaccatttgattcagctggatcatcatgttgagaagaaagcatttcactactttcaatagctggttgatcaagtaaggaagatacttgaaatttatcatcttctatctcagaaaagtaatccgtttcctctaattctttagatttgaacctagcagacagccttctagaacaacgcctgttagaaaccaccaaatcccatttagctttacttcctttctagtaggagattaattaaacaagccaattatgcaagaaaatcaaaaagaaaccttttactgttagcctcatcttttgcacaaacttctataccagcaggaggagggggcaaagctgcatacatcataaatgaaactggtcagtgtttttaaggccaaaaaactagagcaaaactgctagtatgttagttacattgggtccttgatttctttctctggttggccttactaggcttcttttcctgtaccactgggaattccccatcctgataagttgaatcaaccagcaagagttgagagaaaaatcatgataatacagaaaatcaatgaaagaagcagctaatgaagaacccaacttagaatacaagaaaaaataattcacattatactgaatacctcatcaccatcattattctcacataataccctctttctctttccctaggagaacaaaataaataaagtcagcaatacagtccgatcaaatagcatagcatagaaaaagtgagatcgatatagaccgtgcctcaaattttctggctttgagtaacccgtttttgcattgaagctcatgctggagtaatttcaactgaaaaagaacagaataaacaggtaatgctaaccacatcctaaatgtttttgaataaatcaactagttgcattaatcttaccctatctttacttgaattaagctcctgcaagattgaagcgaaacttaagccccaataaaaattcaaagaaagattaacttaaaaagcaaaatatcagtatctataatgttaccgccagcatttggctatttgtttgggcaagctgcatattttgtagctggactttctgaatgcttattctcaatttctgtatttctactgcgctcagctcaataagtttactgtaaaccaataataaagacaaccaatttcaggaaacaattcataatgagcagaacttatctggagaattcgatcgaaaataatactttctgtcaccaagaagcttcaccaattctgtattttcctgaaaataaaaatatataaatataagatcagccaaattaaacataatcaatttccctgagagagcctatggacagctctgcaattcaaaaaacacggagcattataccttgtggagcttttcaacatattctttagcagtaattgtagtacgcttaggcttagcatcttgatttgttggattaaatcggcgctgtaagttgctaatgtcggctagctttttcctttgggcactaccatctgctaaccataccaaagatataccaaccgttcaaacaaaaaacccaaatgccataacccccgaaaaaaattacagcaagccagagttctaccgaagaggacaataacagcgttttcaacttcctaagcccccgaagagggcacatagaaacttaacatagtctcgccctaaaaaccctaaaatcgtatgtgtagaaatgaggtctgaccaccaaattcagaaattaatcgttaaattcaacatatagagtccaaatttgaagttcccagcaagaatttcataaaagaggtaaacattacgcaaagaaaccaagaaatggaaaaaaagttagggtaacagaaatgcatttgccgacttgagaaattacctgaatcaacgaggacaacattttccatggcggaggtttccaaaactcaaacctaaaatccctgtgccgggattggatcaagtaagattagtgagaaatgaagtagaaagaatgtgggaaagcgagaagacgatggcaaaaatgtaaaaaaaaagtacctcaacgtctctccgaagtaaactccgaacctagtttttgaatctgagtaaggtattattcaaatttgttacccaaataaagggcgccaacgttaatagaacctatttagggactctcattgtaaatgtcttatttgcaactaggttgtccaaggtcgtcgaatcctatgtgtaagggccgggattagacatttatacccataaaacaaaattaatgaattttaaagaatttttttcaatttttgaatcgaattaata

SEQ ID NO: 14422 - DNA, 4642 bp, Cannabis sativa
aaaacagagagagagagtacaaaaagtattatatgtatatttacttgatagcaaagggactgtaaattaaaataatatcatatggattattcttattaacatgatttgtctatgaagatttcactaattattttttattctattgttagcttctttgaagttaatttaatttaattagtaattaactcggattttctaattcttctacaatgtattactagaggtgcataaatggacaaaactattcagcccaaccaacatataacttatttttttataataaagaattatgttagaagtgggctgaaatgttatagaccatataattatgaattggcctactctaaatataaataactcaacttaacacaatttttaaaaaacgtttcaaatttgagataattttcacacattaaatatattttacattcaaaaaaatatgtacaaatatatatttcactttttttatatataaattatattattataataatcttagaaagtgaattaaccaaaccacatcactaacaggtatctataactactctattatttttaccaacaagtctaagagcactcacaataacttttttaaaataggaaaactttaaaaaaattaaagaactgtacggatgttagaaaaattaataattgcaagataaaaaaaaattggatataatatagaacactatagtatatataataataagatatacatacttgattgatccatgcaattaccacaatttgatagtgtaatactatcaactaagtcttcctccttagatctttaaattagaagcagttttatttatcttattattaaaaagtatacaattgtaatgagaatatgtatttatagagttaggagacttagctacataacataatcctagttagacttggcctgctcatcaaaggtttcagttaactagaaaagtccacacttctgtttcaactagactttagacatacaatgctaagcccattaactattgatcaatatgagctaacacaggaaagaactattcaatcaacctaaattttaataaaatcgataaaaatctaatattctcccacttgaactacaataattttaatacatatatatgaaactaaaaagaataacataaaaaaaaaaggtaaaaagctttcttaatatattgtcttgtcttgtgacatggttgtgaaagttccctctaggtaatcttggttgttttgttttatgtgttttgtgttaaaagtcttttttgtcattttggttgagaagtggaactactatggcttccagtagttgtcctatactggaagaggtggaggaaggagggaatatttggttagaggaaggaacagatgagggttagcttatgatactcgtgatcaaattgaaagagattatgatgatcggtggtgtcttgtgggtagattcttgacggagagatccattgactttgatgatatgcaacatctttcggcctcgctttggcaacctggaaaagggctttttgttaaagaattggaaactaatctgttcctttttcagctctatcatgaacttgatattcagagtgttatcgaacgaagcccttggacgtttaataagtttcttctagtattttcaaggcttaaaaagggtgaagaccctaagttgatttaattgaatgaagtagatatgtgggtacaacttcatgatctaagatcgagttcaaaatgataattgtggttaaggatgttgccaattatattagcagatttgttgagtccgatgagaagaactttatgggattatggagggattttctacggatgagtgtcactattgatgttactaaaccactaaaaaggcgtatgaggctacgtaactcagagggagtggaattttggacaaacttcaaatatgaacatcttcccatattttatttcatatgtggcattatgggccactctgagagattttgtcctcaacgtttcgatgctccgaatggaatacttgttaaactgtatggggattagatgagagttaagccaagacgtacaagtcatatgatcaatacaaaatagctaaagcatttcatggtagcggctgaagattgtagcaccaggggaactactccaaactctgaccatgttaatcgtatgactccagttgcgacagcctaggtgccatttggatccaatcatacaactgtgatgatggagcatatcgtgggttaatgattaagtcataaagattgtgataatgggggtaaatggaaaggctaaaatcgtaggggtagatttgttgtctaatgtggattgtgatcaagataatggcattaatgttgatgaggattgcttgatggtggctgatataaagaggcataggactgagttgggccttaataatgggttagatgaagtattgggtgatagcgtcttagcccaagttcgagatggttcaaaaaatggagaattggtgggtgcggttttcaggcccatctatcattatgagtcttttatcttggaattgtcatgggcttgggaacccatgtgctttacaattccttaaggatgttgtgatccaaaagaagcccaaatttatttttctctgtgagacgctctgtaaacgtgaccaaatggagaaagtttgtttagctttgggttttgaagggttgatggttgtggacgtgaaaggtaggagtggaggcttagctttgctttggagttatgcagaggaagcttctcttcttgggctctgactactatattgatgtgcaaatagttgtggagggtaggatggattggaggtttatagggctctatggggaacccaataggagtcaaagacaagttacttgggacctgttacgcaccttggcaggtcgttccaatttgcctcggtttgttatggggaatttgaataatgtagtgttgcatgaagataagcagggtggaatcgttacgtaccctgaatttttaattcagggattccaacaagctttatcagagagtggattacaagacatggacttgtgtggatatccgttcacttgggaaagaagaagggggcaaataattggactgaagttcgtttggaaagaggcttggttagtcaatcttggcttaagctttttaattctgcaaagctgtataatttagaattcttcacttctgatcattgcccgattttaatggagttaatgtccgaggtagaaagtcatcatgtgcgaagattccattttaaaaatacatggcttcgtgaaccattatgtgttcaggttgttaaggatagttgggaggtatgtttcgaatctgatgttgaaagcaaaattgcttattatggtcagcagctacaacatgggggaaagattacaccgacaattttaaagaaagaattgttaaatggaagaaggagttttgtaaatggaagttaggctgtgatgatctatctattgaaaattacaagcaggcgaaacaaaatttgactgaaacctatgctcaaagggaggtttttcggcgtcaaaggtctaagcaactctggttccaaaaaggtgataacaatagcaaattcttccatggtttagcctcccatcgaagacgtaataactcaatccataaacttaaagactcagctgatcgttgggtggattggaactctggtttagttgaagttatgattgattatttttccaatctttttgctactgctagaagtgattggcgtgaggttactagctgtgttcagtcgcgtgttttggctgaacaaaatttaagcaatgttggtaatttatttttttataactatcaaacaatagtgtttccacaccactaagaaaatggtcaaaattttcaagatcatcaagaaactcctcttgtgattcatcaagcaattctatatgataatcatcaacatcgttacacttaatatcatctacccccaccaccctaatggataagggtcactatttgatcgctctgcgtgccaataccatgtactgtagcttctattgaaaccccgacgatatatgtgatcctttatcatagtaatattcattttcattctatttccacaatctacacatggacaaagaatttgttaggacaaactttagaaatttgttgaaccaatcttaaaattgtggtatttctctcctcttatgcatccacgatttatccatactaaaatttaaaaaaaaatcctaacaagcagctaaaaacaaactaaaacccttatcgctcaccggcctatatctgctttattgtggtaaagtttaagcaatattggtaattttagttttttacaaccatcgagcaaggatttttctacattactaagaaaattgtcaaaattttcaagatcatcaagaaactcctcttgtgcttcatcaagaaattccatatgataatcatcagcttcattaaacaatatgatctacccccacctccctaacggatatgggtcactagttgatcgctctgcgtgccaatatcatgtactgtagtttttattgaaaccttgacaatatacgtgaccctagtaatatactgatacgaagaaatatgtacaatacgcaagtgcacgtaatcaagtagtactcacactggtgaggtcgatcccacaagaaattagactgaataccactagattagatttatgtttcta

SEQ ID NO: 14423 - DNA, 12741 bp, Cannabis sativa
  modified_base (12380)..(12384): a, c, t, g, unknown or other
ggactaatcggcaatcaaccaagttttttgggaacttttgccgcaattatcccatataaatatataatacatattaaatttttttatgtaatgttcttttttttattttaaaatagaataattatttttttaatatagtaaaataacattctaatattttaaaatacaactaaataaaagaatattaacaccaaccaaacgcaatcttcgtggaataacacttactactgatatacttggataaactgtaacaaaataatacaacaattaaatttagtatgacttacaatatatgcatcagtaacacagttcatctgggcaaaaaaccgtaactgcaaattgcaatctcaaaagcttgcattctttcaccacgagccaagccattgcaatcataaactgaaatttcatgtatgttgagatcactacaagtcttgatcagctcctcaccaacgcgtttagcagcatcctaaacacatcaaggcagaactattataagcaagacaatggagtttattctgtctgtttttgttcaacaattgataatgaatgagtgacattactccccaagcgggtaaataaaacttacaatggtgctaaaatggggattctgacgtattgatttctgcagggtgctaccataaaacagacacttcttattttgatcatctaccagcatagcatacaactgcttgtctgaacaaaatacagaaagtctcggttttgtagaagtgccattaaactggagaaatgttacagaaatgtagttttagtagattaacaaacaattataggtgatgatattctgaaattatttttttgtaattggaaggtgtaaacgaaaatgttacacaaaagagccaagagaaacacataggataccaaaaatatgataatcacaaagatgaagagtcaaaagtaaggaaaatttctgatattttattttattgtgaatgatagaatatatacacgtataaaaagttgccctaaaacgatacaataatcatatactttaatatcaaatcaccctatttaataactttcctagaataaataaaaatatcaaataaaatcaactattttacagctttacacaatcattctaaaattagaaaacttcctaaaatagtttgattttcttcaacactaaccctccatctgtgaagatgtcttccctaactagcttgctactcagaaaatcaaattgttttgaataatccctttgtaaaaatgcctgatacttgctcttcagttggacaataagtcatgcaaatcaagccttcctctatcttttctttgaagaaatgtttgtccacttctacatgctttgtattacaatcgagatagcagccttattatcacagtatagtttcataggggatgcttgagatatctccaactcttcaagtaaccttcttatccataatatctcacacatacaatgagcaacagctctaaactcagcctcagcactacttctggcaaccacattctgttttttactctgccatgtgactaagttacctccaacgaatgaacaataacatgatgtagatcttctatcaactatattttccactcaatctacatctgtatagacttcaatttgtaaatggtctcttgacttttttaggcgttccttttagataccctaagattttgtagatagtttcgaagtgtttaggtccaggtgcatgcatgaattgactcaccatactctctgagaatactatatctagtcgtgtgtgtgatagataaattagtcttcctactaaacgttgataacgttcccgacccttcacattctcagctagtgcgggttgcaacttgacatttggttcactgggtgtttcaacaggtttgcaatctagcataccaatctctttaagcagatcaagaacatacttacgttgattaacaaagatttcttctttggacctaacaaattccattccaagaaactattttaaagtacccaagtctttgatctcaaactcttgaacaagtctttttttcaactcatcaagttcaccatgatcatctccagttaaaacaacattatctacatacactattaagataactatctttcctttctttgaatgtttatacagcatggtgtgatctgcttgactttcaatatatccatggggcctcgacactctaccaaagcgctcaaaccaggctctgcaagattgcttaagcccatacaaggattttttaagtttgcaaactttctcaaaaccaacaccttttttcaaaaccaagtggaggactcataaacacttcttcttctagatccccattaagaaaagcatttttaacatttaattggtataaaggccaactagaattaacagcaagagaatataagaaccgaatggaatttattttcgcaacaaaagcaaaagtttcatgttaatcaattccataggtttgagtaaacccttttgcgacaagcccagctttatatctttcaacagttacatcaactttggtttttattgtaaaaacccatttgcacccaacaatctttatccccttcgatacttttacaatctcccaagtatcattttttctcaaggcattcatttcctccataactgccaaattccaattcggatcctctaatgcttcttgtatatttttaggcacaaaaagttatgtaatatccgcagtaaatgctctatggttttttgacaaatgattgtaagaaatatatttagcaataggatatttagtgcaagtacaggttccttttctcaaggcaataggaagatctaaattggtatttctggaattactcctacactagattcagtttcaataagaggagttgtttaccaagatttttgaaaactgattaactaaaacttaaggaaaatataaaaaagtaaatgatagacaaatggatttttacgtggttcgggagttaactatctctagtacacgagtccgttgtattagccttgtaagtgagtgtttaagtattacaagtgtctactatggtaactctgtattcctcttctttctctcaaagaagaaagctctctaagaattttagagattctgtaagtaaagattgttcaccctctctacgtaaaaaataagggtatttataggcacacatgactttttacctacctagggtttcgtactctacaccctgcaagggttggtactacaacaggatgatctgactattggttggtaagaagcttccccattgtgtgacgtacagctgtagagaaggatttcatgcgaacgcgacacgtgtcgcgtaaaggtttttcctttgcaaaataccctctaaacaggtcattgggcaaaaggcatgcccagaggtgcatacgcgcactaccatggcctagcatgagggacaagatctgatcttgtgtcagattaaggtgtcaccgcctatagatcaatttccatacgaaactgacatggtcatttgccttgaggctgctatcacgacccaaaatcaatccgtggtggtctccacccggaggctacttacttcaattgtgctccaggtcttctcggaactgggatcaactgggtcccgaagatgctacttgtgtttcagatagctcttcccatcagatatctattacacttctcccggattaccaagatatctctgcgggggaccttgtgagttacctcgactaatcccgctaactaacacatcttttcctctaatcatgcaacgtgtttctcgctcgaaaatacagataacaggagtagaagtaggagaagagttacttgaaatatttggaagaccatcgcttagggcttctgtttgaccatgcaacgggatgattacctagtctttatttctttcaggtacatttctcctagaataaacaaaaggctcaatattttcacgattttcaataaatcctagaatttctttttctaataaaataattttcgattcacatttagtaggctgagctctctctagtatgatattagggagaggagcaatttcctaaatttgattccactaaagtccccctaaataaaacttttggtaaaaaagggggtttgttccaaaaaaagtaacattcacactcatatgaaatcgtttgataacaggattaaagcacttgtaacctttttgattaggtaaacatccaatgaaaatacatttttcagcttttgattctaatttggacctactagacctttctggagtgtgaacataagcagtacaaccaaatattttcaaaagaaatatctgaattaattctacaccctaagaataattttttcaagcaatcaagagtagtatattgtaagactctagtaggcatcctattaattatataggaagcagtaagaacagcatctccccatattttggaatattcatgtaaaacatcatagctctagccacttcaaataagtgtatttatttcgttcatctaagctattttgttcaagtgtatcaggacaagaagattgctgaataattcctttttcctttaaaaatctgcctaatgctttattaaaatattatgttcccttgtcagatgtaaaaatctttaaaaagttgagccacatcagatttttctttcattaaaaagattcaacaaagacgagtatcaaaccatttcttacttgaaacactggtgaccttggagggtccccaaacatcgttgtggaaaaggtaaataaggttgagaaggacaataagattttttaacataagtgtttttatggctctcggccaaaacacaactttcacattgaaaatataaagggtttaattttttaaataaaccagggaacaaatgtttcaaataggaaaaactagaatggaccaaccgatgatgccatatcattatttgatcaaaaatagaaaaataacagatactactaagtccttaagcaattttattaacagaaagagtatcctcaaagtagtagagaccattaatcatcctaacactgctaatcgtctttcctaagcgttggtcctgaaaaatacaatgaaattcatagaaaacaacacaacaattagaatctttaaatagctgactaacaaataaaagattacaatgaagttgtggaacatggagaacagatttaagaattattccctcaacaaggccttttcccacaataggtgcgagagttccattggctatccatcctaacttttttattacctggacatgggatgtaggattcaaacactttagaagaatttttcatacggtcggaagctccggaatcaagtatccatggaataaaagttgaaaaggaatgaagagcatatttttcaatatcaatttgtgccacagatgcaacagaaataccagatgattgcgaattggacttcagcagctcatgaagatgaaccatgtgctcttttgtaaagggaagagcttcagtagcattgcgcccatatttctcttgtagtttccagattgttggttttccatgaatgtgctagcatgtctaacgtgtataacgaggcttgttgcaaaagccacaccaaacccgtggcttttcatcagatttattccaagtggatcggttgtagcctcctccaatagtagtagctaaagttgacccttcaacagctactccagcaaccttctttcccaacatgacattccttcgactttcttctcttctaacctccgagaagacttcagaaataggagccaaaggtgggcggccaatgattcttcccattgcctcatcaaactcaacattaagaccaaccaaaaacttgtaaatctgattgttctcgatggtcttttatgatgtttaccatctttaacagattcccattcatatgtggcaaaaagagcaagatcaaatccttttcaacacagtaaagtatttggtaacattgtcgtcaccttgttttatgtcaccaagtttgagattcaactcaaaaatttgagattgattctccaaatcagaatacatttgatgaacatgatctcataattccttagcagtaggataacacatgtaatttgaactaatctcctcctccatagaattaaccaaccaagtcataaccctggaattttctgcatcccatgtagcataagccaagtcatccttcttaggacgagttcaatggggtggtatggtagggttgcttgtcaaaagtgggaccaagtgtgggtgaggtggaggagagagggagagagatttatagaaatattgtggcaaagtggtttctatttagctaagtagctctgccattttttttttattttattttaatatttagaaaagatttgattggttaagagctgagggtgggtcctctaaaacaacactaaaaattgcttccattaatgatgctcttaggagccttcttatcacccgtcaaataggccatattcccacgtcctcgcatgtacatttgaattgattgagaccaacgcaaaaaattatcaccattaagccgaatggtggtaatttgcactggatgggattcagaaacatgtttagaggattcagatatgttaaggttgatagatttcgttgatgggatagtagtggactcatgggagatatctgacatcgtgaagagagaaagagactagggtcggctctgataccaagtcaaaagtagggaaattttcttatattttattttattgtgaatgatacaatacatgcacataagttgccctaaaacaaaacaataatcttctactttaatgtcaaatcaccctacttaataactttcctagaaaaaataaaattatcaaataaatcaactattttacaaatttacacaatcattctaaaattagaaaactttctaaaatagtttgatttccttccacaaaaaggtttagccatcaaccgtataggacttccaatcatacttaatcaataaaataaacactcaaatgaatagcataacacttttgaagaaagtttaccttcttttgcattcttctatttcgaattttcggactttcctttctggtatttgccctggcactaacaaccaatggcttcaaagtcaaatctgtagcaaatgtaactaattatagccaactaagtgtgcttggttaaggataaatatgaacataataactaatattaagccctcacttcaacgtcattgtttatttctattttccattatttgtgcgagtaatggtagagcgtgcagtgtttcacatacaagttaaccggaaactcatctacttatgaaaattgtgaaataagagtaactcacttttaccgtgcatatttgtagatggcaatgtgaagattccacaaagattgggtcttctaagctgcaatgtggaaagattaacaagatccatgccgtgttcttttccaaatttctaattgcccagaaacaatttatagctttgaatccttcctctgcaagtcattgagtttttttaaaaaaaaaaaagtgtcgtaaaattggaacagatcctaactagggtgaattgtaatatttaccaagcccttcttcagctaatagggctacagtgaatcattactcaaagtagaacaatgagaacatagaaaatagaaaataggactgtttggcattgttctgttttcagttttcaaaattctatttatagaaatgagaactgaaaacgggtttttttttcttttgtagtttatagaatctagattggttcatgatggaaaactgtaattactgattttgaaataaaaatctgaatttagtgtctgaaaacatgtttatgaaaatgtaattggttcagtaaactatatttgaattttagacgtattcaatatgtgacttgtagaaaatattaaaatataatagcattagaatatattattattggttcagttaaatatgaaaaattattctaatttaatatttttaaacaaatataaaataattcatctatgtatgtctatttccttttttaacttgcccaatacttgactattaccaccaaattccattcctaaatgaaacaaattcagaataatcacaatgacatcaacctaatattcataaactatcattaagaataatatccatagccacaacaaataagcaaattctatattatacatgacaacgtcatgatcacagaaaataataattttcttatgcctaatgatctttatttctttatttccacaagaaatgctcttacatttgtgaggtaacctatttcttcacgttatccactcgttccatgattactgatccaatatgttttttttttatttttttttgagaggagatccaatgtgttcttgttatagcaagtttggaccattttgttactcattttctattctttctaatttctgcaaaattagatcaaatgacatcttcctcctaaaaagattacagattagacatcattataattatacatattgttcacaggcataacgatatcaatgagcatatttgtaaaagccattttaacatgcacagcacatcgtcataaaaaatatagttcccaaggtaaatacatactgttatgaattaataacaaccgggagcacatcaacaagtagactaaaaaaagtaacaaggtattctaaaatagtgccatggatacccattagtcaattacattgaattcttgaatgaaaatgatcactaaggcatttcattaaaatgtacttcataactaaattaaggcatttttttcaaacacctaatagatggcaggggagcaaggagctaaggacaggaataatttttgttcttatggaccgccttaccaatacaatgggaaaggtccatctcaaagctataacatattaacccaaaactgataatgtcattctagtataatgactaccttcatgtgtaagccaacgtgatctagctagtatacgtttctaactttctaggctagagttcaaactagctagctaatctttttcttaaccaatttagcataaagacgaaaaaaagttgaagattatctgaggtcagtgctcttgttttctagacccctttccaatcaaagaaactttaccaatattatttgtatagcatatcatgtcccttatctagcttgtcctaaaactttgaatcaataaataaaaagatcacaaataaacaatgaaatacaaaaattgtaaagcctgatgaacaataaagcccaaactaacaatctagcacactcaaacaattcatacctaaacaaagaggagatactcaaatataagcaaccaaagaaacaaatcccagcaatcaaatactccaactggaacaaagaaaagccttggaaaattaaaatttcaacagtaatgaaatagtgacctaaccttgcaaatcaacttgtcttctctttagaattaaagctcagaccccactaagctcattgtaatttgaaacctaatcaaaacacaaaatttccaaacactaataactaggtgacttcaatctttcaaaaaaaaaatagattgagaaatcaattttaagctctaatcacaacaagagtcaaatacacaatttcatgtaaaatctatcattttcttgaaattatattcatcaaaaaaatagatttaagaatcaagtttaagctctaatcacaacaagagtcgagcacacaatttcatataaaatctatcattttcttaaaattatattcatcaaaaacatagacttaggaatcaagtttaagctctaatcagaacaagagtcaagcacacaatttcatgtaaaatctatccattttttgagattatattcatcataatccacttcttattattgatctaatacttttgactcaaccacgctcatatgactcaacaactaaacaaaacaatgataaaaaataataataagacaaaataccctaagcaattaaatatgcatagcgtaatataccctaaaattagaatttcacattgtgctcaatgtgagataagaaaacactaacataaatatgaataagtaaaaactaaaaaataaaattaagaaagagattaataaaaaacaccctaaaaattgagcatcatcaaagcatcaatctcctgtggatcggcattgactatcgggccctccttcaatcaagaactcttcaccattaaaaatcaacttgcaatataattattcttcctatggcaacaagaaattcccacaagatcctaacaaagtcaatcagcttagttaaaagtatgattgttgttcattgaaccaaaacaacaatttcccaccaccatcaccaccactcaaaacaaaatgacaacctgatttttcaaatggcaactacagtgttccaagaactccaccaaactaacctagtcattgcaataattccccaaagcaaaagcgtttcttcacagatcatgctcagaatttgacactatcacaaccatcattaatgcaaaatttcacaatattcagcacctcaaaatttcagcaagacaatttgaaatcttatcatcaaaattcacatatatgccaagtaattcccaaatatgctccaagaaaaatctggcagtaaaaaatcacgccaagagcacaaataattgtcaaaataagttaacgaaacctgatctgaaatttgtgtagaaaaatgcttgaaaaacggctcatgaggatctgaacacggtctagcggctaaactcgggattcagtgacaaagctcggctcccgtgggcttcgacatggagaatcctcggccagaatatcgtccgtccctgagatttttgtttaactggtgcgtgatgcggatttagaattgtagaaattggaaattttgaagatttacctttgtttatgcatatttttttttatttttgtattctcatttttcattttatttttttaattcacatacgtttttttctgcctaaaataatagaactcaaataaagagagagactaaaaccaccataactttgtaaaaatagcctttataaaaaattttattaacaaaataactttataaaaaaatttattagcaaaataacctcctatgatcgtaaaaacgaccataaattatactgtgctaccataaacgatcattatgatcgcaaaacgactatgaatttacactgtacgaccatcatgatcgcatagagtaaattaagtgaggttattttgcaaattttagcatttcaaatggttagtttgacaaattttccatatctcatcattcttcgctaaccaatctccacctcctcgaatctcacttcgctgcaaaagttctgccaactcctcatcctcgtcctccaccttcctcgacaataacagttgactatggccaggacaaacaacaagtcaccactcacctcaccagtttcagaaaagatgatatcccaaaatggcaccgtttgcgtgttattcgtgaccgattcaagaaggactgggccttatcgaaggtctcgacaaggtttaccagtaccgaaattggtaagatatcgatggcgttttgaatcactgggtttgccaattttctaggaagaattttcctcttctcattagggtaattgactcttttcttttgaaaaaaaaaaaggaaaaagttttggtttttgtattgctgaacttaccaaacactcagctaagtttttttctacatttttgctacaactactttttttcacaatacaactacaactgttctttcccacagcacatctatacaaactgacgcttattatagtcgatccaataccaggtggcgtgcccaaacccatccaatatcacccgagaagggtgttattgggaccattgtgtagccacttggtcccatgtcaaagaggttaccatttcaatagggctgaggataattaactcacagtccagcgagttgatcgatgcctcatgttaatcccgagaaggtcatagagcgaactttatatcactctctcgggtcccagcccaggagaggaaaaagttaacacgcaaagaatcccgcctgggcacactacctgaatgaacaaaggcttaatggtcacccagacacatgtgatcccatgtggaatctaaagggtctaggggcagcttaattcgtcttccggacagatgttctagtgaaacccttctcacagaatcccaccgaatccaaaaaaatgtttcctttgtcttgtttgaggaaagagcttagacaaaatgtaggatcaccataaggattgaaatgatcactattctaacacaacagtttccccatataaaatggggaccatgcccatcctgactcgtaggtgttaggttgtatggttccatgagctggataaaattaaattgaagtatgttattgaactgaaattctggattgttatgcataaataaaaaatttcatattcatattattgagtctacttgaaagttactctgagagacttgtttaacttttatttttttcattttaatgttttactcgacgacgagtaaatgtttagtttggggnnnnntgttaagttatttttagtattaattttaggtcaatttttagtgtgtgtttaatttagttctactcttgtttggagcaattttatatttttttatctttcattttcgcagatttaaaatagaagaagatttgaaataaggagttttggtttttaaataagcgggccgcagcccgtgtgctcctttgcccacgtgtgagatgcttaatatctttttcttctagtcaggattccgattttccacattgatatttttctgcgatcatctttttctgttgatatttttcaaatctatatatataaaggagaagtatgaggtagtgacgtgacagtttaaaatctctccaaaactatttttct

SEQ ID NO: 14424 - DNA, 9547 bp, Cannabis sativa
acgacttttcgacaatatttattattagaggttttatcaaatttatttatcttctttctttttgtttcacatattttaaactttaattattttttaatatcatatctttttacatgatttatttatgctatataaaattaactatttatctactaacaaacttaaatatttatattataaattacttattaaaaaaaataaaaacacgtggaaaatggtcgggagatccttacacccataagagaagtagaaattgccaccggtggattcgtaactaagccagactgtccgtagcaattaccaaattattgatcaaaataattttataattagtattagttttttcttttttttttttgctaaaatataattaattagtattagttattgactcgaaagagacacactaacccttacaaagaaaaaaaagaacgaaagagacatactaacaccgcaaagtacacgtggcagtattttattgcagagttgtagacctgctgttggaagtatgtcatagctgagaagtaggtgatttcagctctagatacggctcaatgaccagctacggctacggctacgacttgcaatatactgattgagttatagattactgattagtggtggaagctatcttggagctagccatgtaagccgctatagaaccttaagctgtcggtaggcaccggctaccggtttaaccgattagaatactaaaataatcctcaaaacaaagcgataaaatgacccactgcagccgttagggagacaaagatagtacggcaatggcgtattgaaggggcgaagaattcactgtcttcttctctcttcactacgcaccttattatctgaataccaggaaaacactctgcgatcagccactgaaggctgaggaatcaagttgaagagtcatggaagccaatgccggattggttgccgggtctcacacgaggaatgagctcgttcggattcgtcacgattccgataatggggttagtctttacaaacttcctttttcttttgtgtgattaattttaaagctgatcgctttgtactggttagatctgattggtcattctgaggaagtgagttttcacttcatgaatttgtaatttgttttttttttcctaaatactttattttgcttggatctgagttgccggtgagtgaaagaagtttttgatcatatcttgagccctctcgaaaaggtgaggggcgtattgttcttgtggagtcaaagtttggattattctatctgtttttggtgttaattctagcggtcaatgcgattctcccaaaaaatttgatattagctatgtgatttatgtggttaattttctagattatgtcggtagctgctgattttgcttgattttcttgctgtgtgctttaattttcttattctggctgtaaatacgggttaggctttttgacacgtcacaatgattaggcacgaaaaaatatgagtttgggagcatgatacggtaccaaaaatgtattcttaagcacgaaaaacaccacacataatttcgaatagattagtacgaaaatcaggacatgggacaagtctgaaaaacaccgcacaccatattaaaaaactttataatttattaataataatattaagatataaatttattaattataaataaattaaaacaataataacacttaaatataatattgaatagtataattttataattaaaattattaaaatatgaaaaattaaaattaaatatttatttatagggtgtgatactaaaatttgagtatttataagtaaatatttaaattctaataatactaataattttttttatataattatctataaaatattgttcaaatttatataaatataactaaaagctataaaatattagtaattgtaaaaaaatataaaaaagtaaagtataagtttaagcccggatatgaaaatggactaacttatttaacaaatagggaccgacacgagtagagcacgatacgaattcgagcacggcacgaaaatactggacttacgaaccgtgccgggcctactctttaaaaatattggcacgatattttttacgcacggcacgacacgatctattttttgaaaagcacgaataaatataggccgggcccaacacgcacaaacttacaatattagatcttggtattgtgggatttagctattaatcacgtggtaagctagcttttagcactaattagttatattagttctgagacttagtgtctgaagactctttctccactcagctaaatctcattactactgtcatatgggtttagctcgataaaaaaattgccataatttagtaccaagccttgcttagttgggtggatattatctaagacctctcctatgttgtataatttgtactaaatttagtccaaaatatgaacaaatgctatatttgctaatattgttattgtactccaatggacaatatcattttaagatgtaaattaagacaaaaagtaaaataacattaatgactattcataaattaaatattttaaaaataattaatagcaatattataattaaaaatgtgtattaaagtatatcattaataattagagcattgttattgggcaccaatggtgcccaacaccttctataggtggcggcttattattggttaacgatatttcctaaaagctatttctttaaattatatagggccctatactacgccactatgttagctccccaacggaaatactttaattcagctctgcaattaaattcttactgccctatcaagatttgcagtcaatacatgaatttgaagctaaaactggttgcattttgtttcagagggtcattatattaaaatgtttgatgagagatagcttgagtttttttctttctggtgggcaatttgaattttcaatccctattatgacttttgcatgttctgtgcactgttaaagttctacaattgtaaaattatttcaaagtgaagcttgtttagttatattaaggctattggttgaaagatctagttctttgtttcttttatctttttccctatctaaataattatcttaaagcgggccttatttagtttaaaaaagagttccatctggaatatttgatatcttctgtagttttaatttggaagctgtctttgaataatgcagcccaaacccgtggatttgagtggccaaatatgtaagatctgtggggctgctgttggtctgacagctgatggtgatgtatttgttgcttgcaatgagtgtgcatacccagtttgtcggccttgttatgaatatgaaagaaaagagggagaccaatcttgcccaaagtgcaagactaggtatcaaaggctcaaaggtgagctaggatggtactttcatgtttttgtttgtaaaatattgcatcatttttggaccttgtaagaattgtccgatggatatcttttagggagtcctcgtgtggatggcgatgatgatgaggatggagatgatgatctggagaatgagttcaattatggtcaaggtaatagcaatgcaagacgccggtggcaagtagaagatgctgacctctcatcttcctctagacatgagtctcaacagccgattcgcctcctcaccaatgggcagccggtaggaaactaaagcaatgtctgctgatcaatataatctctgtattttttcaccctacattttcaatataggttttgtttttcttttttggctaacatttccttcccacatctctcttatttgtttctacatagaattatctaaagtaataggttgcctaatttgtgtagtgttatgggatgtggtaaataactaggttcagtgacccaggagtgtaaaaattaaataaaaaactaggttccggtattctcagagatgttgtcctttgattaaagaaaatgagctttgtcctgtaacttggattaactattgtaaacaatactgtaatcttacaagattggtattttctctctaatgatgtgcccataatttgtgcaggtatctggtgagattccatgtgctacacctgataaccaatctgtgagaacaacttcaggtcctttgggtcctggggacaagcatcttccttatgttgatcctcggcttcctggtactaaaagagcttgaaaccattcgtagtaaaatttaggaatgtactattgttttttaggcttatatgaaagtccattgactgagctaattgccattacagttccagtgaggatcgtggatccatcaaaagacctgaactcgtatgggctagggaatgttgactggaaagaaagggttgaaggttggaagcttaaacaagataaaaatatgattcaggtgaccagcaaatatacagatgggaaaggagacatggaagggactggttcaaatggagaagaactccaaatgtgagaacattgagtaaagctttatctttgctaattttggtttgctcttttctcacccacctttaaaatctcaaaatttctcttattttgtctgactaccaatttccaattatgtaacattggatcactcattgtatgtataaatcctgtataatgaagaaatgtatctatatccttagtcttgtgtgcatatgattagctttttgtatgattatatatctagtagacttacttatgttctgtctcaggactgatgatgctcgacaaccattgagtcgggtggtgccaatttcttcatcccatatgactccttatcgtattgtgatcatacttcggcttattattctgggtttctttttacaataccgtgcaactaacccagtgaaagatgcgtacccattatggctgatatcagttatctgtgagatttggtttgcattatcgtggcttctagatcaatttccaaaatggtgtccagttaaccgtgagacctatctggacaggcttgcattgaggtagcttgaacttcgtattagtggtgtggtttaatagtctgagcatgtgaaatgatgttctgtgtttatcttaccttggtgatcatggttttactgttcaggtatgatcgtgaaggtgaaccatcacagttagctccaatcgatgtttttgtgagtactgtggatcccctcaaggagcccccacttgttacagcaaacactgttttgtctatacttgctgtggactatcctgtcgacaaagtctcttgttatgtatcagatgatggttcggcaatgttgacctttgaatccctttctgaaactgctgagtttgctagaaaatgggtgcccttttgcaagaaacataacattgaaccaagggcccctgagttttattttgcccaaaagatagactacttgaaggacaaaatacaaccgtcttttgtgaaagagcgtcgagcaatgaaggtacgttgatgataagtttgatcacactgcttatatgccattttttttttcaataattttgagttatttttagatgttgtggcatcaatcttgatgttcttccacctaattgatattttctaaaattcacatttcaaacaagaatgttatgatgttttaggtgaatggcattttgttattttgtttacaatagatttgtccgtttagaaactcaagaggtctgaaacaatgtttacacaacacgataattcaccgtgtagtatggaattgtttatctcaacaaattacaattgaataatgttaataggcaataattgtgcgttttttcccttgcagagggaatacgaagaatataaggtacggatcaatgcccttgtagcaaaagcacagaagatgcctgaggaaggttggacaatgcaggatggcactccctggcctggaaataattctagggatcatcctggaatgattcaggtaaaattcattggaacattatattgacatccctggcctgtcttgtttcgcttaacaaatttttttggagtttaccaacaggttttcttaggacatagtgggggccttgatactgatggaaatgagttgcctcgacttgtttacgtctctcgtgagaagcgtcctggtttccagcatcacaagaaagccggagcaatgaatgctttggtttgtcctttgcacaactttttagttttttgtcctgatctaagttagcttagacattgcaaaaatgctaattatacaccatcctgatttgtttagcgagttttgcaccaagtttttactagccaaactcatgtctgatgttgcatagaggctgtttatgccttgtgattttgtatgtaccctgttgcgatctaatttaatttcccttgaactttgcataatggcctattaaggtatgggaatgtcctgacattttctgctacgttaaatgaatttgtttgagatgccacatttatcatttgcaaacatcatctcattgtagcattcctagtatctcataaaatctgttctgatttcttacatggataacatgcagattcgagtgtcagctgtccttaccaatggtgcttatctcttgaatgtcgattgtgatcactacttcaataacagtaaggctcttaaagaagcaatgtgtttcatgatggaccctgcttatgggaggaagacctgttatgtacaatttcctcagcgttttgatggcattgacaatcacgatcgatatgcaaatcgcaatattgtcttctttgatgtatgtttctcttaatttctttgtttttcctgaagtgccttatggtttactgtgcttatatttaataaactaaactctattattgttcagatcaacttgaaagggctggatggcatccaaggtccagtttatgtgggaacgggttgttgtttcaacaggaaagctttatatgggtatgatccaatattaaccgaggaagatttagaaccaaacataattgtgaagagttgttgtggttcaagaaaaaaagcaaagcatagcaacaagaagtacgttgataaaaagagagcagctaaaagaaccgagtctactattccgattttcaatatggaagacatcgaggagggtgttgaaggtttgtttttctggaaatttttacttctctcctgatggcatcgttaataattatgcaaatatatattcattaaatttaaaatatggtgacgtccctttacttgtattttttctgtattatttcttattaatatgtactatttatcgagcggcaaatgaacattgatttgaaatgaatgatgcatcaactatgaaatggtaacaaaattcttgtcttctgcaggttacgatgatgagagagcacttcttatgtcccagaagagcttagagaagcgtttcggacaatctcctgtttttattgcagccaccttcatggaacaaggaggtatcccaccatcaaccaaccctgcaacacttttgaaggaagcgatccatgtaattagctgtggatacgaagacaagactgagtggggaaaagaggttagtaaccaaaaaacagaaatgaagcaaagaaaaagctgtaagatgcagttagataagatcttatattaataatgattgagacactctcaaattatacatatttcttacacacaatgacatgtaaataatctgaaccactattaaaagtgatgtggtccccgttcaaaaatataaatggctaatatttgatgcacatcggtctgtgcaatttgagtctatatctaaggtatcaattaaacattttattttgtctacagattggatggatctatggttcagtgactgaagatattttaactgggtttaagatgcatgctcgtggctggatttcaatatactgcatgcctcctcgcccagcatttaagggttctgctcctatcaatctttctgatcgtttgaaccaagtgcttcgatgggccttgggatccatcgaaattttgcttagcagacattgccccatttggtatggttacaatgggaaactcagacttttggagcgattggcgtacatcaacaccattgtgtatccccttacctcaattccactacttttttactgttgcctccctgctttatgtcttctcactgggaagtttattattccggagctaagcaacttggctagcatgtggttcatactgcttttcgtctccattttcactactggaattcttgagctcaggtggagtggtgtcagcattgaggactggtggagaaatgaacagttttgggtcattggtggaacatcagcacatctttttgctgtgttccaaggtttgttgaaagttcttgctgggattgatacaaactttactgttacttccaaggcatcagatgatgatggagactttgctgagctttatgtgttcaaatggacaacacttctcatccctccaactacagttctgattttcaacatggtgggtattgttgctggtgtttcacatgccataaacagtggctaccaatcttggggaccactctttgggaagctcttctttgcaatatgggttattgcccatttgtacccattcttgaagggtctccttggtcgacaaaaccgcacacctaccattgtcattgtttggtcgattcttcttgcttcgatcttttcgttgctgtgggtgcgtatcgatccattcacctccgatgctgcgaaagctgcatctcaatgtggcgtcaactgttagtacacttaacacttcattcattcatttttgtgttatgtgtatataacaaacaaacaacaaaccaaacttttgaagttatgtatgtgccttttgcttgggtccgaaaggtaatctggtggtggtggatatgataaattattaaacattttttatgtactttctctaagtgaagtattagctatctacttggaatattttgtgtcttgtgcagtcttgttgtgatgaatttcattcattgcaaacggttatatattatcttcatcacttttatgccttgttgtgatctttgttatcaatcttcttatttcaatactatatttcccccctaaacaaagctattatacaactcttactttttaatttatagccatgaaatactaaaaagtagtatttattacaagttgaaagggaaaagatgtaattgcgatttatattgtgatttgggtttcaattttagagaatactttaagcaaatagcaacaataccatgcgaggccaagtggtttggaacgccgtggacagaaactagcacttcaaatggtttatagtgatttatgattgcaatttaggttgccactttgaattttgatttgggctagaactctgtggacgaagactagcaatgccgaatggttcgatagtgattttgggttgtgattaaggttgcaagttaaattttatctcgaagaatataatttcactaaagtaaaggaaaaaagaaaagccaccagcaaagaaaaagacagctaaacaatacaactcaggctgataggagtgtcggtaccgactggtgaggaatgtagggacgtcagtggcagcgattcccacaaattaattttgacaatattcaaacttgtactaaaaaataatttatatgcttggaaaattgaagggtttaacattttcagatgcacccaaaatataacgttgagtagtttttttttttttttt

SEQ ID NO: 14425 - DNA, 6230 bp, Cannabis sativa
  modified_base (5510)..(5525): a, c, t, g, unknown or other
tagaaagctaaatatgttaaggactagagttctaaccagcagctcgatatctgtaagggtaaacccgaagtggatctaaacgcgtaaccatctccagatctgccttagtgagttcccgatcacagtattcagatctcttctcataagcagaggcattgttctgggccttctcaatcaatcgagtcatttcctcatacgcagcagacttattgtttttcatggaatgcacccgtgctagcccctggtgggctcgagtatgccggatgttaagagcttcagtgtagcattcagctgccaaatctaatttcccacagtcaacataaacactgccaagattgttgagtgcctgcaaatggatattgaaaggtggagaaggttagaaatgttctgtggtatgctcttttcatgcagtaaggttgaggcaattccttctagggcttttatcactaagcgtccacaatatacattcaacaaataaataaaaaactttcaacatcctaagcttcatttgtcggtcaaagatttaacctaaaaattttgtatttcctaatagacactctaacaatacagaacctatctgcaaaccagtatggccaacaaatatcttttctatgattgttagtcttcggtttctttcagctaatctgcattttcaattcaaactaacctcctaaaaaacggtcaccattgcagttcttacttccaatcagcaactgtataaaattcaaggccagcgttctctcttccctaatcactatcactaagatgccaataagtaatgtgttatctaattctctctagaagacatgcgaacagaatggttaatcagtcaactaacctacggtatatgaaaaattatcaaagcaatgcaggtacgatgctcgagactattagaaaacacattccatttctattccagcaaaagaaaaaggaaatatttaagaaatgagatgacagtgaaagcacacctggcctttccgtagcctatctgaggggcactttaaggcatcatcaagtagagaaataacagttgatgatgaacaagatgggtcttggctagaatcagccagtgcatatgctttcaggaaaaaggcttcaaaagatctcttgattttaatagactcctcagcttttcttagtccttcctcgcaatgacctgtatcatataaaatccaaccctcatagacaagctgttcatggtcactggatgcatgctgacgagccaactgtaaactccgcatggctgcttcaggacagtttaacctggtcatcgaaagacataagacttctagagaagttgacggctacaaaaggaaggagcccaagagaacgtaaactgttcaaaaatggagcatgaggccaaaaacaggatttaaacaagttatgctagatggctggtacacagcatttgctgcaaactcatacaattgtttttcttggaggcaggcttggcaactcaggaacacaaatttttaggttagacttggacataatagattgttgagacctagataacacaacaatatgctgtatttaaaaatattgatggtaatgtactagactaatctcctggtattcatgaagataaaaaactcaattagatcaccggtaccaaataacataccaataatttaatgttcatgttaatgtaatataaaactataagaactaaaccaagaactacctgaggagaagcaacgactgtctaaaatacaagacgccttttgctgaatctgattcaagcatctggtagataacagatagtgatccaatatcatccacagatgaccaccgatcatacagttgcagccagcaatctgcagttgtccaattttgcacatgctcacgaacaagcgttcgaagttgggatgctgccacccgtccctcaaacatcctatattctggggagagtgtaagaattgcttgaacatcacaaagtgctgattggtaatcctcaagagcaagatagaaacaaaaccgtagctccaagcattctaatgccagtttgaatccaaggatccgattaatctctgcaagtgcagcttgaacattctcatttcgcatcatggaagcagcacggaacatgtaagggtaagtaagagttgggtccaattcagttgttttctcaagatcttgccacctcttatcaccttcacagtataatgacctttcttgatacatccatccaagtggggaaattgaggaaattacagagctgagtttctcgtaggaccaaagtttattacccttaatgcaagctagtctagctaaacctgtaacagagtaaagatgtcctacttttaaagctgcctcaaagagacgttccgcttcatcatactcttttctcatgagcctcacacatgccaactgatgaaaagccagcattctttgccggtcattttcagcgaattcagccagcctttcaaggaagcaagctgttgtatctgaacgaggatcaaggttcacagcaacttcacttaataaacagtagagcgaaaatgatgccggtccaaccatgataaatctctgttgcctatcagcatgccggaatatttccacaattcgactatcatttatacaattaggaagatcatttaaaaaaacttgcaaacaagatgcggcaaggacacggcaattctcctccaaagcacattccaagagctccacagcatcatctctagacaacaccaaagatgcaagtatcctatcacaagcatctttgagcctttcacaacaaaactgatttgcaaaaactaatatttccaacaaaagatgtggtcgggctccactcaaacttccagtcactgagaattctctgattaacttcataccagatgcagaaatattgttttcagataaatctatgtcctcacagagtgattctgagaaacacccattaagcatggcatgaaatggagctgaaaggcttgatattttctgcctatcacaaactattttttcctctccaattctaaaaacaacacttttcaaaatttggttcccattcacggacacagtctcgtaggaacttgtgtttacctcaaaaggaagctgagaagaaacatctatggtgccaaactcttgagcacatttaccacaagtggcgagcaagtcagctataagctcttccccttgcttctcatactttaaccatgctccaaaaacaagtttttcatgaacagtgctagcattttgccaagcagcaaggaggcttctccgcatcagtttaacttctccaaggcccctaaagacctggaattgtaacaagtagatattcgaccgctcttctggagaacaagagtcaagctcttcatgaatttgggctaatacctcaacataatcagcaggtttaaaaaaagggagtatggcaggctcagggaccttgatgagagactctctacaaggatttgaccaccaccatcacaaaaagaaaacaaaaaatgaaagctttagtaaatcgattcagtgtttttatatgaaaaacatacatatatattttgaaaatgaagtgacttacatagatgaggagaaagaagtagaagtagaagtagaaggagggggtgatgaaactttaatagctttccctctttcaacctggagccaagactgtggattgagagcgttgagctgagtgtctttgtatgattcagaggggaaaaaagtcctcatggggcataacagattaaacaaatcccagatctccacaatacccttatgggattttctctcaaaagctcaaacaaatgaaaatatatatggagaaaaaataagagagaagagaactaccgcaataaaataaacaagggactaccactgatctcaaatccactattcctgagatgacatcttgttcccatccaggaacactatttttcaaaaaatgaaattgaaaataaaatttacaaacacttgaaaaattaagtgggtgctctaatttcctaagggaatgaaaaaaaaaagggacataaattaaggtttgttacgacccaccaaaaaggcacaatcttctgtgagtttgcctcctcttcattctgagattcgcagaaatgaactctagtttacaacaaaatttcattagcttcttcagtgaatttttttaaaaaaaataaaaatagcccagaagaagagcaaaatcccccagcgactacggaatgatctgtaccagaagcttagcgaaatcttgaacagtgtggagccaaaactctgattaaaaacgccaaaatagcagaaagaaacaagagagaggcagatgaagagagacccttttcagttcaaactcgaatttgcagcataacccgcatcagagaaggaggagcagaattaaatgagatgagatagatgaaagtagtggaatccaaataaaaattgatactttaacttttctttactttttcttttcctaccatttgtttggtaaaagagaaagcttctttttttcctttctttctctctcactttctttatttccttccgttaagttaacaggctcaaaagtcgaaaatcacagctactgttggttacgtctgaccctcatacattaaaaaataataataataataataaaaataatttacactataatttcaatttaaataaatatctaatttaatttttatcaataaattaaatactttgtctgataatttcttattcgtcccaagtcataaattttaattgcttttatatatataatatatattaatgatttggtggtaagtaggtttggttttaatatttttagttatttttatttattagtttcttaatttttttaatagtagtttactatataaaaattcatatatatataatttgagtgtttttctctcacatttttttaattattatttttgatattaaaacaaataaattacatataacaacataatatataccaacggtttgcggtaagtagttttggttttaatatttttaattatttttgtttattagtttcttaattttttttaacattagttaactatataaaaattcatatatataaaatttgaatgcgtatccaccaaatatagtgtttgtttattggtagtgtagtttatgtgatttttacaattcttttttttttttctctctcacatgtttctaacagaatttgaaaatatctctttgattaaatgaatataaaaaaattaaaaattttaaataagttaaaatatctaaaatatacgtgatatataacggtttaaaaattaaaataagttaaaatatctaaaatttaaatttaaataaaaaaaaaaacaaagttaagaaaaagcataattcgggaaaaattatcctattaattattctgattgttacatttttttgtattatttttctcattttatattataattattatttacacattaagagtctatgctccttgtactaaaaaacaagtctatgctcaaattaagagaaatagttcataaataatctaataattgtaaggccatttcgagagcatatttataaaattaattaagtaaattattattattattatnnnnnnnnnnnnnnnnattattattattattatattgtgattgagatagaaatgttaaatgttattgaaataatttttatataaataattaaaaatatttataaaccgcacgcaaagcgtggtggtttgtttcctattatattagtaaaaaataattaatatttttgaaccaacttgttataaatacgaaatacaacatttgcagttataagattaaattttattgtcaaaaagctaatttgtttctttattgttttttttttcaataaaaaccctaaaaatttattgtggcttgatatattaggtcgttttgttttttttttttctttcgttttattaactaaaagatttattagtttttaaatcaatttcattagtttttataaattgtgaccgttctgtttttgttttatgagttcttgattaatgtttaaaaatattttttaaaaatatttatatgtattagtatagacatatattatttatatttatgtataaattagattgacgttacttgcaggtataattaattttctttttaattaggtttaattaagtgatattaagtgtaatacgttaaatattttaattaggtaatgtattttatttttaaatttttaaaatagaatttgagattttgatctatacgtattttatagtaattatttcacaaatacacaaaaattataaaaatacaatttcgcggaattttaaatatttt

SEQ ID NO: 14426 - DNA, 5020 bp, Cannabis sativa
atttggtaaggtaaggctagtgctcatcttctcatgatagttatttctgatttgtaaaggtaaaccatgggaggatgagagaggatgaagcacgtagatatttccaacagctaatcaatacagtcgattattgtcatagtcggggtgtttatcatagagacttgaaggtacataacctgttagcacatggtgatattggataccagctcaagaagaaattcgtgaattacatatatatttttttcaatgttcatttgcagccagaaaatttgttgttggatgcgtatggaaatcttaaagtttcagattttggattgagtgcactatctcaacaagtcagggtaaggatgatagcctgattcctattcttctccattcaatctcggtcctctgtttgaggccattgctgccactggtggttatgttgaattttagctgttatacaaaatcacgtatcaaatattttccttttctcaatcggatatttctaacatttgcaaatactagaaataattttacatttggacactggctgtctcaatcttggacttttttttggctacatttatttagttattattaattttattttatttggcaggatgatggtcttcttcacacaacttgtggaactccaaattatgttgctcctgaggtgtggacagttcttgatagccttttaattttttaacacaactagcgatttatttgaatatttttatcatgtttgtaggtccttaacgatcaaggctatgacggtgcaacggcagacttgtggtcttgtggagtgatactatttgtattacttgcaggttacttgccttttgatgactctaatcttatgatcctgtataaaaaagtaagcatttttatgatttctagcatgccgcctctatagctcttcatcttcaattgttacatttttttttttccttcttcatttgcagatctcgtctgctgaatttacttgcccaccttggctatctttcagtgcgatgaaattgatagctcgaatcttggatcccaatcccatgactgtaagtaattgaataggatagtatcagtgaagttgtagcttttatgtgattcacatgtcatttggttatagtctctacctttttgtacttccacaagtacttttcttgaccaagaaaggaattataaaagttctgattaggggcaacaaatggccacatttttttattccttacaacagttagacatttgtcagggttgatgattgatactcttttctgctatactttattttgatttttttaataatatttctccagcatgggcacatgggatgctatttcctttttaaatgtttgaatttagaatatttgcttgggttctgattgttaatcatgcctctgcatgtgatttcatacttcccattcttcattctttttgttgagtgtgtaaagatctatcattattccagggcttttatgattgttccataaaagtctccagtatatgtatgtattatatgatactgtaaatgcatgtagttttgattttcacattgttatcaaatgcttgatgtgaggagaactgctaaggagttactgtcgaacatctcggaataccttacaaagaaaaaaaagtgagcatcgtaggatttactgctggtaatgctagattgagactgttaaatgatgcagacaatgtagattatggaccctataggattgaacctcccaactatcaactgaagaacaaatcttttgagaagcacatggttaaaagattcctctaattttaccttaccagctatttgtttagtggagaataatctatgcaatttggttatattgcattatcatttggagtttactattgggcctttggcttaaccgaaaccgctatcatattacaaatgcagattggcattgagcattggagtttttagttaattgcttaattctatgagtaacagaattttatcttctctttttagtggcaacagttggggacacaaactgagaaatctgcaaattaagaattaaaatgtattgttctatgtgccccatctattctttttctgaattttttgattcactacaatactattgtgtaggtgctatttttccaaggctcatagattaagcttttctgtttagatatttaggcattgagccacaaaatgttccatcataagcactagtttgattttgttaagtatagtcagtatgtttaattgtatctccatgcatatgttgctcatttcctgcattttaaaagttaaagtgtcctagaatagctttcaactgctctagaagaatttactggtatggaaggagattgatagaatttactttgtatgtttacatttaagattgtcaaaagtgtgatattcatatcttaatactttactctctatggcagcggattactataccggaaattttggaagatgaatggtttaagaaggattacaagcctcctgtgtttgatgagaaagaagatacaaacttagatgacgtagaagctgtgtttaaggattcagaagtacgtttcaaagatggttgtttattttattttatttttctagaaaaaaaaaacaaatttctagtgatataacatggctgatcatataacaggagcaccatgtgatggaaaagagggaagaacaaccagcagctatgaacgcgtttgatctaatttcaatgtctaagggactaaatcttggcaacttgtttgatgttgaacaggtttggacattagacacttttctatatggctatggtttggtcagtttgagaccctttttttcttgtgcaccaagtcttagattagataaaccttgtgaagtaacatccttgataggtattctgctttgaatttagattttacttcttcttttaaggaatttagcacttggtaaaaagagaggtttcaattttggtcatattttctcactattatcaactattcttacgttgagttttcctattcttgcagggctttaagaaagagacaagattcacatcccgatgccctgccaatgaaatcattcataaaattgaagaagccgcaaagcctcttgggttcgatgtacacaagaaaaactacaagttgagactcgaaaatatgacagccggaagaaagggaaatcttaatgttgccacagaggtaaaaccattgtgttttatcattccatgaccgatagaatcaacttctggttatacatttttgacatttttgtatactcatcatcagatattccaagttgcgccgtcacttcacatggtccaagttcgaaaagcgaaaggagacaccttggaatttcataaggtacccttttcctcgccggcgttggtttctgttgtgattgtgaaagtaataacatatataatctaaccaattaattccaaatcatatttgtggtatattatgcagttctataaaaacctctctacttgcttggaggatattgtttggaaaactgaggaagacatgcaatcaaccaagtagcaaattgtgtccatccagaagagtgatgaccaatagttttttctttttttttttggtgtatttggaatcaagctacatgaacagctgtttctcttctcccattgttctatatgttcattctttccttatctttttttctgttttttttttcctcttatctttttctctttcttgtcatattgatggacagacagagatggctttcatcaaatgttttcccatgttattatagttggaaaacatggatatcattcataccccataccaagtggaattgtttgtgttcatcttcattcatccttaaatttattagtcatgttctagtcaaaaaaaaaaaaaaaaacacttaatagtcacgacgtgagagatttacaattctatagagattcttccctctatatcaatttctaaaataccttttgatgatatgcctactcaaattatatactaaaatagtacatatagtgatgtgtgtgaaaaactgatttacagaagaactataaacaagtgaataatgtattgagtctcagttggaagtttggagctcttggtgactttgtgctggtaattgggtgatttggtctcgagttctcgtttgaatcctcttatctagtcgagttttaaaatagggaatctaagggattctgatgaccttacttggtttggagtggaggtaacgggatgttttgtgtctagaacggatcgtatcatccaaagttttgtgggaactttcgctaaggacatgctagtttgaaaggctttgaaggatagcatgttttctttgccatcgtatcatccagacatctctgcgaactttctctaagaatgacttgttagtttggaaggctttgaatgatagcttgttttcttctcttaatcaggataggtttgaggcttctaacccattctttaagaatctttggaaaactcatctccataagaggcttacattgtttgtttggaagctttataacgatgttctcctaatgggttcccacttgcaaaccacttttggaagtttcccgagccattgtgtcatttgtaatgaagggggtggtgacaccattgtgcatatgttcagtcgatgtgttgttgttagacaattgtggtttgcgagctaatggtaaatcaggctagaagagtttggttttaattggggtgctgacattgctaagtagttgcttgatcctcatttctttagcatgttttggacctttagcttaggaaggagtttattatttatgggttgttttggttcacaaggtgtagggttttcataacgagtgctaccataatgagattatactcccatttagggttatgaaaagaaagttgaggttgtcttttttgaacattgggagctggttatgtcagagtctcaattcagggtgtttaaagacttttcgcctccttcggtggagcattctatccttaaaggaaggccttgggtgtatgtaaatgctgcatttaaagtttggaatggtctctgttggtgtggttgttcgatttgagaggagtgatgttcaagccttatttg

SEQ ID NO: 14427 - DNA, 4352 bp, Cannabis sativa
aaggcgaagactgaacaagagtgagccttgagctagggtgaggttgtacatgtcatggtggcgggacctggaggtgttcagtctcggggccactggggtttttattttgtagtcgcagtgcgacctaactttttgtgtttggaatattttgtacaaagtttaaacaacgggatcccgacacttgtaaatatttatataaagtttataaagtttcatagttaattctaaaagttttaatttgacacgatttttaagaaaattttttgattggcaaagatagcacttcgattgaaaaattactgtagcatgccttagtattagggtattacacaagtattaggtttgtgttgggtaaacacaataagttgacatttcaatcagatttattagacaaaatcaaaataactcaatttgtggattaagacttattagaaaacttgagaagaagtccagatgttactttattaaaacttgagtttgtattccaagtagtattgaattcagaagagaaaccctaaatgaagctcataccactccctaatcattacatcctagttctaccaagatgtaccaaaacttgaaattttattagtaatagtgcaacatgcagaaggatgtggtagattatatttttcagatacttaacaaaggtgtgcatcaattaagaaaacactgtagcgtgcctaactagtagggtattacactataagtgggacaacttcgattgttttatggatgcagccatctgtagtttggaggttgtggggattgtgtggtgctgtatatgtgtggctctgttattgaaacattcactatcaagtttcgagctcattcttcgctggcggaagccttggcttgtgtccatttgctttctttgtgtaaagaggatggaaaaatcctagagtcttctctgactatttgtgtttgttgtaggtttgtaggagagatgggaacctagctgcatagacaataatcagtttgttgatgttaattttcattggatttcaagtgtttataactctatggctcacactatcgctgctaaggcagtctctgagggaacttttggttttattgcggttaaggaggtggagcttcttgtgtccactgtgaactttgctttttagttttgcttctattaaaggttttcagattgattaaaaaaaaaagattttaaactcaaattaagtttgtgttcgatgtctactaaaagagtaattttccaatttccattaaatatccatccaattgagagtaaagttggttgtaaaaagatgatccgatatggagtgtgtccttttattagtcctaaaagtaatacttttgatcgcatcaataaaattagtatgacataaaggcttacacacattacagctcaaatatgtaaagcactttcaaaatccaactcatgtatctttcattcttcataccccacattttacaattacattagcttttaggaaattaaaatacaaagttatattttattaaacattctactattctagcattcctttcaagggggaaaaaagaaaaacattctagcattaatccttttttaatgaaaaacattccaacataaacattaactttactaacaatgtaatgtaattaatcacgattaaatctatagcacgaatcacgcgccaaattattataatattaatagtacgattcaccattaatctctttttcttaatcattattataattaaataaattcatgaaattattatgtaacatcaagaaaaagtacaaaacaagttccccctcttttacctttttttccctcatcagttgtgatctttctcttcattgattgcttaccaattttcagaaaaatataaaataaaaaaagtattgaaatatatcataaatactctcccttaagcttgcatgtgctcacatgatctgtataatagccatcacagctgtgtttttcttcttcttcttcttttcctttttatttttcttgttttttgtttttttaaagaaaaatgtatgaaatgaagttagatgacagttgggtggtcggcttgttattggcaccctaaatattattagggaatgttatataattgtttttttaataaaacgtctaagccttgtaaaaattaggacaatttcaactttatattatctggttctgaaatgaaatgcatgccaccttttgtgccataccaattaataattattataattattataagggcttattggtctcaaaaactatagaagcaaaaaaaaaaaaagtattaattgggaacaaaattttacattttactattttggtgattaaaacattaaatagttataagtagccacatatacagatttcatttgatctatagagaaggaatcagatgagacacacgttaattacatgctgatctgttcttatgtgttaattcatatgcataaatgtagtgtaagccaatattgtatggagagttaattaaacattaaaataaagtagttaaaacttaaagtaactacagtttacatctccaaaatatgaatttttgttgaaacaatgaactgaaagaacacctgcatctcacataaattattttatatttgacagttaaattaaatattagctaaaatgactaattaattcaattggagataatgataaagaattggaatagaatgcacaatttttctcagatgttttgtttatgtaattacagaatatattgaaatggttaatgtaatcatttaattaaattttttgattgggaaacttataataaattaatcatacttaatttatcatgcaaacaaaaatttaacaaataaatataatataaacaagtcaatagtgtcacgttccacctacaaaacaaaggaccagctgatagtaaaggaccgaaatgaaaaaaagaaaaatagtttagagatatatattaatgagccttttttcatggttgaaaatatatgataaatttaataaaataaacaaaacgaaaggggcaatagttatacataaatgatgtctcttatttatttattttattatttcctttcattgagaatatcctcttagtttagttgggagattttcttaaaatatttttctagtgttttgaagctttccatccaaagaactttatttattattaaaacagtttgcttttatttgagtgttaatgtatatgtgccaacatgatttaatcatattcgtcatttttttttataataatcaaataaaaaaaaatattagaagttatgctatgcaaagaaatgttaaatcatatcttataaaaaaaaaagttgtatatggttgttagctagtaaagatttttgttgtatgatgacataatcttaaggtaaaagttactcatcaaaaagattttgttagtattttgaaagtcttatggttacaatgtacattttattgcagtgtatggaaacaaatttacacggcaaacaaaggtagatttcaagtaaatgattcaattatcttatgctacgtattttctgattcatatttaattatttattcatcaatattaatttaagacccaatcggtgaagaaaaaaaaaacattaatataacaatcacatattagttttggaattgaagaaacatatcatgtgcatataataatgatttgcttgttcagaataataataacaatagcaataagtaatatcaacaataatgatatgaaaaaatcacttcatatattatatatatttttatttgtactgtttaagttaattccgtaattgctgtatgtattttttttttttatgagaaaaatgtctcaaccaccaccaagaattatgaaactcatcaaaggaggggcgagaatgcattactgaatagcatctgttactaataagttctgaatacaaattagagaacctgatcacaaaacagtgctagaggacgttgtaagagagactttaactaaggcgtggacaacaaaattaaaatatctaagacaacgtaaaacacaaacatctttaaagctattacaaagattaccaattatattcaagacaagacctaaagagaaaattgaagacactttgttcaccattttttgaaaaacattcaagcaaattcattttaaaaataatattgtcatagccaaagaaaagacattggaccatgacattatccgccactttaggatcaagacaccctttcaagcgccaaacagcagaagcaagaacggtacccaagtgatcatgcaccaccataccatggccactacatgcacgtattttatcaatagcagcatcactgttaaccttgatagatttagccaatagaggagaccatttttgaaacatcattagaaggcaaagatgtcgccgagagagagagagagagagag

SEQ ID NO: 14428 - DNA, 9696 bp, Cannabis sativa
aatgtggcagaaaatgtattagatcagggaacaggaaacacaattcagctctatcttcaagctgtagatcaaaggaacaaaaaaagtgtaggcttgtaagaaataatgtcttgtttgagttggttagatgtcacaagcagttttcatctccagctactgcttattatgctgaaaccaatagtgagagttgtgatccagaggctgaggctgaaactcagtgtggtggtgaaatcgaatttaatcgggttgactgtcttgtatgggtattacatgaatcagctagaagcttctcccttgcagttgaatccctcaaattgactggaactggccctgagcttgccatggcctgggttggtaaggatgtacacgaatggcataagcggatttcttatctggtaaattgatatttcaatatactattcactttgattttgatgccatcttacaatggattggattgtaatcatgtggaactgaaatcaaatcaaatcattaatccttaattaccatattgtggcttcccaggttgctatttatgctctgttgaagacagcaattgaagtagaagttcttctctcccaggaacgccgttgtaacctttcccctgtaaaagaaatgtaagtaagaatgtcataactgcactatggttttagactttttttaaatctcaagaacttaattttgcatatttgaattagactaacatatttatctccatatggggagtagtatacactagatagatttgatctttgttctttcatctgattcagcttgacaccaaagattgatttgattggcgagtacatcgaaaatcaattgaatgccaggcattctgaactcggagaatggtttagggacgttgaactgccgcatgtaacagcatttttcatccctttgttaaaaaagtggtccatggagtatgctggaaggtttgcttttatcatttttcagttcttagttactatttgttacttagattatcccccacttcactatcaaatcattaacatgtgaaagcaaatattagtgtattaatggattgccaagtgtttgttgatagtgcatttgagatttcatgtcattttaccattacgagtaaagcctaaacacagaagtgttcagtggtgtcgcagggatggttgtggctatcagctgctgtactgcagtggggaaattgggtcctaggcgtgtctcttgtccttcgtctacgttttctgttgaggatgtaatggttgagctcatggatcttgcacacagctttgtatccgtggaaaaattgcatcaattagctactgaggcagggtttgagttagatttcttgtcccattttggtaaaaaggtctttccaagtaagaaaagtgaagagctagaattttggattggattggctcagaagaaactctcagttgcattccacgaagtaactgttatttcaacagggacattccctgacaaggtcaattatcatgaaatcattcttccactattctaatctcaaagaccagtgtttttattgttaaacttttctgcttataaatttgttataaaaggttctatatttgatatatgaatcattgatgttgttgggtttatctaatgcattggtaggttcaagcagatactttggctactttaggactttttgcatatcttggagggaggactagattattcttatcaagaatgggtataaaggatcttgatgagccagttagggacttgcttaggtatataccattcataattgctgcattctgaatgtatcaactattcaaaaaacctctagattttaatggttttcttgcagctacttggagtgcggtagcatatttatatatccagaattttctaacatatccatgtaccagtccttcatggaggtgcatctctattctcctccttttaattcaatgaaatctacacatcctaatcttagaaatatttacaggtagtgactgatgaaattgggtggcttgatttttatgctccatttccttcagtaagcagtcaagagagacgaagatccaagcaacatgtcctccaagcagaaaaagagattgttctgtccacagtttttgctgcgtgctatgatgtttactcaggatttgctcacttcactcgttcaactcaacagctcttggactctgatttgttatcattcttgttgcagaggtaattttgttggtaccttcttattgcagaaaactatatggtaaatgtttagttttactaaatttaccaatcagctttaaagttaggttgtcatcaaattttcagtcagaccctgttagccttttgtttggaagactactgggctgtttatggtaaatcaaggtaatttgtctatttccattcataagttgctcagattttaaatggattgcacaagagtgaaatatttattttgttttgatattctgaaccagtgaatttctaagaactatagaaagtagtgtttatgatcctgcactaccatcaatgaaagccataggtacaaccaagacttctctaaccatggattctcgacaaatccatagtaacttagttgcgaacgggcgtccaaatgaagagactttgcatggtgttagactaacaaaggtatagctttttgaagagatcttttataatttactggtatatcttttttggctctaactattgtctgtggcagggtacttgctcaccaggatctgaaacatcaaattctacagaggagaatactgtgaaaccaagtcctattcataagagtttaataaaaaagtacagcaccaagttggcatctgctagctctgtaaggccattaagtccccaatcacagtcattatggatatttttccgtaatctgcagatgctaatcttcaaaactgaactgctttgaaggatatatggatgggcactcgcttgctgtttgtagacattaagagtgttttggagctgttgttcaaacaattgagcggatacaagattacaaggagagagaacaataaattgaaaagaacgcttaatgacatggcctcacttgtcccaattacaattctaatgctacttccagtaagctctcataacattgccttgattttgctagtgccatgccatttactgatatgaatcaaatgcacgcaaattgctttcttctttttctgtgacaaggtatcagctgtaggtcacgctgccatgctagcagcaatcaaaaagtacatgccatccttggtaattttttttatcacctttcccattgtttgtatgatttcaaacaaatttttctttttctttacttttgcattaaatttttattaaaaaggaaaattctgcctatagatcccgtcaccttattcttcagagagactggatgttgtgaaacaactaaagagaactaagaagatggaagtaaggataagaagcaaccctgatgatccttcctccaagatatcataagagaacaactggttcaggctgattttgaacctttaacaaagcttccattttgacaagctgattatgctttctattactttgtgcattatgccccttttgaaaggggtttacatatgtgcgtggttttactagcacatgggacattttctcaaaacaagaacaaataatatcaactttctaggttggtctaaaggttgaaggcccgttctcgaaaccatttccggttgatgtttggaaattaaagaggtcaggcgggtggaagatgtacaagttattttggctaatgcctctatatgttgctaaattcaatctgttaaagaactgatttataatttcaaaccctttgtaaaaataaaacaaataaataaatgaagagtggcatttgacgatttatcttgtattgtttaagcagagacattcaaaacaaacaaagacagcaatatctaagccatattatcactatacaaatccataaattattaaagtataaaagcttgacaataaaagcctgctgttttctttccccaccccgctaaccaaaactgtgttcggagaaacgttccacgagtacttctcgtggattggagaaatcaaagtacaaaaactcttcaaagaaaacgaaagacaaaatcaatccaggagtcttggcaaaaaaaaaagaaaaaaagaaatagccatgaaattggtgcctgcattacagatttggaaatcggaaaaaagtaactacacaacattcttttccttgttcgatcttgaaaatggacaatattcttaaccattcccaccatctttcatctaagctcctggacgtttaaccatcttatcaatttggacacaatttacatggaaacaagtggggtaatatctgtgcaaatgttccatttattgtaaaagaatatttgaactcatccatctcaagaaaatacacttcttataactcatccttcaaaatacccatatccatatttctggctttcatttgaagagttacacaaatctctttggatcgcgagcagctgcaatatggtcctggaagacaagtcatgaaaaattggtaaggtttcccataatagagccaatagatatatatacacattatagcggtaatcaatgacaagttatacataaaatcacttcccattccaaagcttacaattaaaatcatgcagtagacataactataaaaacaagaataagaatcaacttacagagataaaatcgaatgcctttgtgtcttctttctttgaactgttcactattggattagcagctggacctggaaaatttggttggaatatgtcaggtagtgcacctactgtcgttccagcaacctgaacaacgccagagttttgagcatttagatgcccaagctgttggagggctagctgttgtgcaaagagatttcccatagcagcataattcatctgttgagaaggaagcgcttgattatacataaaccctggtggcatattgtacggcatagcaccctgagggaacataaaattagcattcatccctaaagattgaggaccaagaacaccagtcatatcattagtgacctgctgactgagatgactttttgtatctgagaataaagcttgagaaagtaacccagaagagctttccttttgctctgcctttgagccattttcattaaaggacaaaccactcattaaatcatcaacgtctttcttctggttttgctgctccattgtaattccagaatcagatccaaaaatatcaaataattcagtggcagttttatttgctgaatgatttgcagtaacatcctccttactgtcaacagacagcccagaaaagagatcatctgcaggttctttactctcacttgagtgaaatgaaacatctgcgaaggggtcatcatcatttatcagttcactagtgctgacggcattgctgaaactatccccgaataaatcatcaattagtgggggtgttgttgttgacatattcgtgataattgggtcattttgcttctcttctgaattgtgtgttccttggtaatcatcttggtcaccagtgtctatcaagtcaggcatttggacagcagtaacggcttcagccttcaaatgcttttcagacacacttatagtactgcctgtctgttcgccacccaggaagctcaaaacctgtcacccaagacactaaactttatgcaaccataaaacctaacaaatattctagctcagaaagctaaaaggataaaataataataatgccccaacacctaggagcattaaaacataaaataaagagcaccgactcagagtaaaagaaaagacttatatcttataaaggccacaataaacctttttttaaaaaaaaaaagaaaaaaaaaaacaatcaaaacaaaacaaaataatagcaatattacaaataagcgtgtaaataacatttcatcaaatagcctcttccggaaagaaaagaaaacggcctttaatctaaagaaatgtgaagattgaagaaagagaatatgcaattactgaagttaatattagtgaaatttgtcaaactaacaatatgaaatactaaaatttgcaaaataacctcacttaatttactctatgcgaccatcatggtcgcacagtgtaaatctatggtcgttctgcaacataatgatcgtttatggtcacatagtgtaatttatggtcgtttttgtgactatacaagattattttgctaataaaattgtttgtaaagctattttgctaataaaaaattcttaaaagctatttttacaaaacactcgtaatattctctaatagctagattacgtctatagtaacacaaatgaataagcatttaggtactccatgccgcctctgggaaaattgagtattgcttcccagaagttatttatactaatcaaataattactatttatataaaaaaaaaaaaattgcaccttgtttgccctttccctcagggaagcttggggagactcggagcatttcacaacagcatctatgttttcaccaaaatatgatgcaacaactgtaaatggttcatcatcttttttcctcaaaattgactcgaggacacatacagctttcatgcgaacctgaatgaataaaacgaataaaacagagaagataccttaaaactttataacgaaacagtgcagccaaacaaagataaattcttacatttctacaaataaagcttcgaatgctgcaaccatattccagaagaaaataaataaatcatagattatacttataaacagagaagtataaaccgcagcactgcatacctgccacattggggattgaagcttaaattcaagagcatggcttaaagctaatccattcaactttgcggcctcccctaggaaaacctgaatggcatcccgagtaggttgtaatcttacaccacctgacgttacaatagtctccaacagtctctcctcgggagtcttactttcagagtgacttgaagatgaattcccattggtcatttcagtgttacttgatcctgaatcttgattccaaggtccactggccacacttcttgtatatccagaacttccctgagcctcattgcgcaattgaactggttcatatctttccgtatactctgattctcttgtcaatgacctatggagagttgggctcttgtagtttccgttgtcattctttctcatcgagttactttgtgtgaagctacttataccctgcttgatagatgcacttccaataccaactacctcactgagaaatgatttcttatcgtccgatggcatttcatagtttttatttccgaaaccttggattcttctattccgatcttcaacaggagctggcttattttcctctgaaaagatggcagagatggtttcatgagcagtgtctcgcacagctttgttaagtgcatcccctttcaaaggatccaactgccccttgtagtgaaataactgccgcacagcaacagagtgtctttgcatttctctcctaaactccgtgccagatttccccacagaatattttatcaacctaagagcctgcaaaagattcgagcaaaaaccagcattatcatgttaataaagaaaaatccaacttttataatgaatttctgaacatgtctcctgtacagtagctaaatgcttgctccttaagctacagattgacctataaactatgattccatggtttcaatttctgtcctaatcgtgccaatcaatgaagatcaaaatttacatgcaaagttactattgaaaaataaacaatagatggattgatccaatttaatataaagctaaggtttacattttttattcgttttaaagaacttaaattttgcaccacatcatagtcaatatcaaaatcatcgtgttatcttaagcatcaatttagaaaatttgtacttgccaacagacaagagcttttcaaattcagtaacaaagaaaaaaaatcagttatgaaacttccactcgttgtcctccatttactcaacaatcaaaattcaactgtaacccaattcgggaactttcagatctattatactccaagctcaatagaaacccataaagagaagaaaaaaaaattataccttctgcttaacaattggactcttatggtcaagtcgtttcaatataaactcagaaacctcctttacaatactgccatgcgaggaccgcagaagttcacaaatttcttccaatttgtacacgggtgtgaccttgtcttcatcggaggttgctccatcgatcatacgcgacctccagtacgattccaccgctcttcgactcgtatccatttatcccaaatacaaaacctaaaattgaagctataatttgcaggattccgctattacgtagagctgagaacggaaccgatccaattgaacctaaaactaaatgaagcccaatcaggatcggtccggtgatggttttcgcggagaaagatgatttgattgaatcgatgaccctagaagttcaaagtattggataatttagcggttgtcaattgatggaattaaagtataaggtacgggatgaaatgggggaagatgaaggctttaatgagagaagtttgagagtgagaataagaccaaagaggagaggtggctaagtggcttggcttagattggcttcgcgctaatacgggcagttgggtttggttgaagagagaagacaggtcagactgtgcctgattcaccgtcacctactcgtattgttagcacagctttacaattttatttgttaaatagttttgggaaaggtccgattaaattataattttttgaatggaacaattttactaatttctaaatcaattaaaaataagactgtaatttaataggaacatcttttttactggaaattcgatttggaaaagaatatgacactttagcaaagctgtgaacagtcatgttagcagatcgtttaataaaaaataaaaaaaaatgttatttaaaatagataaatgctttcgacaatccatcaccactcccccaagcggcaaaaccatgttattaatgttgctgcaaaaaggcgtaactgtaatttttcttgtattgctagaaactgtaactacacggcccataatgtggccaaatgagcgtttaccaataatgttacaggtatggtagagatatctacaatacctgttaatatattttgcaatgaccatgatgtctaactttaattttatttataaacgtatttttcaaaaaaaaaaaaaaatgttgttgcaaatagcaacattacttccactcattgtgataaaaaaaatcaatctgaaataataagtgtgagtgtgagatatttatagtagggtttatgagtttctaagacttaatcctataaattttttgtaattggataaaagatatgtttttaaaacaaatttacaaatggtactatataatataactacaatatacacactaatgaaaaaaaaaaaatgaactaaaatgattccttgccaaaataaatataaaaaatctaccaaaataaaaagttaaactggaaagctatctgaactaaaataacttctgaatgctaaattaatatttttgctaaaatttaaatactttcaactatatgttggtccatctatttaatctaaatgggggcatgatgatgacaaataaaacaagagagttgagacatttaaaattaacagagaaaacatatgaattactaattttgacctatgagggttgagaaaatatacaaacactaccaaattaattaagaaaaacagtcgaaagacagtcataaggttcaattatgaa

SEQ ID NO: 14429 - DNA, 5548 bp, Cannabis sativa
cggccggttcgaaatcacaaccttcagagctgatgaggacgggcgagacctgttataacacagagactgagagagagagagagattgagagagagaaatattttgatcagtggtgggagaacccacttccttcatttttttattattttcttttttcggttttttattattttcttacttgccctgagatcccttagcccctagttgtgcttgcttcttttcatatttttcttatactttgttgggcttgatttgagaaacatagtgggtagattcattcttctcttttttagcttgctttctttagctatacactgagaaattaggtcattaacactctatgtttaattataagtgttgtaggttgacttgataaggttaaaaagaggcggaaaatgtatgaagagcactataaataatgtaagaattaggaagagaaatattatgatatttcaacttggactgaatattcataatttttataatcaaatctcctactccttttagctcatcatacttaatgatttttatttcgtccatatgatgtttagcattgacatttttaccagtgtcatatagtttttccacaattttaaaaaattcattagcatttgtggtgtttgacaaaccactaaataaatattcaggaatggaacttttcacagtaatgagactaagaggttttgacatttttcattgtgcatgaagagttttttgggcaataatatagtattagtaagatcaacaatatgggctaatataacaaaaaattatccagtcaattcatattttattaaaatcaataaatattaatgtaagttaaaataaaaatcacttacatatattaacaactgcaactctttttaatgttttcatatttatatatctcgggcggaaacaatatattgaatgcttaaaagattgatacatatatgatatatttgatgtttctataataatgttaaaatctacgtaaatggaagctctgctaatttaattcataaaaatgctagatacacgtacccatcaaagtttgaatgaaaagaaaggactaaaaaataaagagtccactaagaaagaactaaaatacagaatattttctctattgataataaccttataagacctgtatctaaggcaacttggaatctttctacgaaataactagccaggcttaaagaaaattaattaaggaaaaaaaaaaaaagaaaagctaaaagtaagaaaaaaaggctatatttggcaatagtacttataagttctggtacgtagctggtaaaatagggtttggcaaattatagaagtcatcagaattatatttgagttaattaagaaccttctaatccactccatataaaccaacaacaatattaaacttagaaattagtaaagtacatacgtaatcagatattatttttagatattcgtaaaactttacaagaagtaattaaagtttctaatatatgtgcctgcacatgtgtagtggatttttgacttagagcgttgactgtgtagaatgtatatatatatataggatcactactctctctaaacaaaattattattctttctatttaataatggataatggtgccctctagagtcatcaattgtaagcttactattgttttttatggattctttgaaattttgtttcccactcactaaatcttaggttaatcaagttatatatgatgagtccaaaaagaagcataaaaagagcacaaaataaacaaaagaataattacctaattaaatcaacatacatatatgtataatatatattaattatgatcagtagctagttcttccctagctagctagggtgactttattacaatcacatttgaaaattgaaaattaaattctagatccgttcctatatttgcttatatatataattggatttttacttcaaaattactactatatatgtacatttttccagaatattaattatctttggttggctaataactgaactcgagcaacgtacgtacataggcttctcattacataactttacgtaccgattgcaaaataataaacatatatagttcagagcagtactaaaacctttatgtaggggtcttgtaattttgtgagaccttaaattacttataattagcatatatatgagtcagtgtatgttatatataatatttttctcatcatatatatatataaacagaactagagagagacgaatctttttgaagaatcgagaaagtaagtatataataattgaaattttctattgtaaacctgatgttagagcagctttagtgatgagatgagatgaatcttatagtgagagactaggaaaattgaaaaagtagacaataaagaagaaaagctttaaagaagcctcctcaaaaaacagtactagctagctagtaagctattttttcaaaaataaatgaaaaccataagctaaatatatatataaataaacatataaaatatatattgagtagtactgggtgggcgtgcctggcaaagggttattaaaaagaagaaaacagctctcacctcaaaagtaatataatactatatatatacatttatatatatatatatatatataagcttgcccatgcccatgctctctgtgatctcacatttcccatcaacttttcgtctgatgtgagcttttgtggggttgatcaaattattaaagaccttctttaatgctgaatcacagcttaatcataatatgtatattttcaaattatactataggatcgattttttttattttagtataattaatttctaactcaaatctctcgatcttttttgtatattaataattaatcaaataaaagataaagagataaaaagttctgagattatttgtccccctctcagatttgtcatgcatgctcatcagactcagtagtagtgagggtttctgtttttaaaaatactaatctataaagagtctgcctttgagaatatttgtcaaaaaaattagaatgttatctcttttctctaatcattggagtatttttatttttggtcataatttttaataaatttttacataattttatggtaccaaaaaaactattcaaaataattaattatatataggcgtttaaaagggcaaaataaacatgtacaactatttccgcatataaaaagattacaacaaaattatttgtatgtggtggtgtataaatatattatagtttcagtaagtatctcactaatttttccaaaattttgaataatttacaaaataaaaaatatattcaaattatttagttgcacacataaaaataaagtatacatgcgtatatacaactaactttttgagtctaattttattattggcaccataattaattactcatactttttgttgaaattagtgtaatatctgctatacttatacgtataatgtatatcattgtataaaaaatattggttataatttctttatgtggcaaaatgtgaaagaaaaaaaatgatactcccataattatttttatactagtgtattcttatttttccaaccaaattaaaaagtatttttacaagattgtatacgtaaaaaaagttaccttagtcacaaagaaaggtccaagttaaaacaccaatggtaaaaccaaattaattaaactaataaataaatatgacatttgtaaaaggtatatatagtgggacaagatattgtagttacagggtgtacatcacaatttttggtctggaaaatgtcaatatatattccaggttttttatctatagttttccactacgcaatatcattatatagtccatatataatgagatttctctattcttgatctcatctacaatgatgagtattttgaaaggaaaaaagagttaattataacatttaaccatgatcttgttatataaagttcatctctatgagggagctatgttattaattattttgtactttcttaatataattataaaatagagcattattattaagtattagtggtactcaatattttctcacacccaattttacgattgattagtgatattttttagaaattattttcttaagttatataagacctgatacttaattacatcaatagcagtatgacactaaaaatactaagcaccaataataattttcgtatatataaataaatattttacaaattatacatatatatataaaataaaagagtaattaggtttggacactaatgcaaattatatagaggaaattttgaatttttatgcatataatttggagaaaattaatctcttaaactaataatatacctaatatttttaaaataggccaatatttgtgttcaccccaaaataccttccccattttgaactctctttctctctgtctctcgaactctctcgaccacaactgccccaatccccaaaaaccacggcaaacgaaccgacgaccacccacgaccaccaccgaggaccacccacgaccacccacaaccgtggtaatgtcgaaggttagtttttcgtcactccctttatctattaatttaatttttgcataatttatggttaaattgtaagagattattaataagttcgttgagatttagggttaaaattctatgatttgtgagtttggcttagatttagggtaggatcggtcggatttgcattttgagaaagaatctagtttttaagtcaagtccgatgccaccctaatgcagtccgatgtaggtctgatggtctataatcaatgctgggtactgtcaagattgaagacatcgggctcgatgggtggcccgatagtgtccgatttatgttcatttttgaatgcccaattgttgtatccgataggggtccgattatcagtccgatatgtgtccaatgggtgttaaaattgagagaattttagagaatttttgaaggtccgattggaccgatatatggtccgatgccccccgatatatattataaatttagagaatttttgtaggtccgataggggtttagggtccgattagcagtctgatatgtgttcgatatatttttcaacattcatgattttttgaatgggccgatttaggtctgatggtcccccgatagttgtccgattgtagtctgattgtcattgcaattttttatttttttttatgtccgatatgagtccgatgtatatccgatgtttgtctgatgttttgctacaaaatttttaactttcaatttcttgttttttttttgcaaagacccccacaactaataattccactctcggagcattacactgttgtgtcacttggcgcgggggaagttattactacctgaagattaaagtcaagtttgaggaattcagattatgggatagggtaagggaatccctttcaaataattcttcgagagagaaccattacaattttgggggcattgatccatcaattattgttgcataagattaaatctgacaagctagacgaggtacatttttacttggcgaagaagagatgaagatttggtagggtggagtttggtttggtaactgggttaaacttgttgcccaaacatactaaagaagaaattgaagagaaaggaa

SEQ ID NO: 14430 - DNA, 5817 bp, Cannabis sativa
  modified_base (35)..(35): a, c, t, g, unknown or other
  modified_base (3775)..(3797): a, c, t, g, unknown or other
  modified_base (3876)..(3877): a, c, t, g, unknown or other
ttttttttttttgggttttgttttttttttttttnaaaaaaaaaaaaaaaaactctggaggcgaacagagagtatcatacaagacacattttttttagggtaacggaaaatcacacttttgagatttattttttaaattagggaaaaaaaaaagaaagatttttggaaaacgacaatgacaatgaaaaacgacattaatattaacaaacgacaataatttggaaaacgacattaatgaaggaaagaggcaggtttcttttatcattagcataaaagacacgtttatttgttttatttagggtaatggaaaatcacactattgggatttttttatttcttttttaaattagaaaaagaaatagagaaaaaacagatttttgaaaaaattgtaatgaaaaacgacgttaatagtataaacgacaatgatttatagaaaacaacattaataataaaaaacgacaattatgtggaaaacgacatgaatgaaggaataacgacggtaatgtaagacgtacgaggttaaaaacgatcaatcaatttataaaaacgatcctaattggtagaaacgacacaaatttaaaaacgacaataatttagaaaaacgacgaaaattgggaaaaacaacgagagtttgcaaaccagatttttaaaccagtcacacttttttttttaagggtaatcgaaaatcacattgggatttttcatttattttaaattagattaaatggatttaaaaaaaaaaaacaatgaaaaacgacgttaaaagtaaaaaacgacaatgatgtggataaaacgacattaataataaactgacaataatttgaaaaacgacattaatgaaagaagaacgacgaaatttttgaaagcgaacgacataaatatttaagacgtacgacgtaaattttgaaaatgacatcattacgtagaaaacgatactaattgatagaaacgacaagaatttggaaaacgacattaatacgtgaaaacgacaataatttgaaaaacgacaaaaatactggaaaaactacgaaagtttgcaaaagagaacaccaatacatattattaaaccagatttttaaaccaattattggtagatattaaaaaaaataatcaaacaatatatctagaccaacctaacattttgagatcttattcttactgtttttttatcttgtttattatacaaaataatttttgcctaatctgtattagatgagcttcgtaaatatattattaataggtattaccgtaaatttctatctttttgtagtgatatagttttgataaggtttataatattttaaactatgtgttttgtaaaaattaatgattgaactttctgttttgttaaatgataaattaaactctatactttttaaaatagtactaaataatactatgaattgattttatgtcaaaataaaacttaataatatcttgatctggaggtgttgtgataaaactagttacgtttacgatatcttttcgtgttaggaattatttttaaattagttatattaaaaaaatagttaaaagttgaggtcataatcttatatatttattctattttaaaacatacatggtttattttgatttgatctctgtcttttctaagagatttcatttgtgtattgatttaggctctctatttgatgtatttttagtttactgtccaattttcctaaggcgttctttattcatgcaaatcattcgcccaatatggctatgcataaattaactatacatgcacttagagtgaatggtgatctaatttagatagaggatcttcgatctcttttttatgatgtactcaatgctattttttttctcaatgaagtttattaactcttttaataattatgataaacattttcatattcgaaatctctcataatttttattattcatttttcttttcgatcctactaaacaaatatattctttatcactattttgtacacttatgtgtagttctttaatattgaattaacttgttttttcttaaaaaaaatttagttaaatttgataaattatcttttaagtgtgcacgaataatgatttaaattcatataatttccttatagtcaactaagcggatgaaagctataaaaacaacaatacatggttcaactaagtaatgaagtctaatttaccagtcacttgcatttgataaaaataaaaaacaatacaagactcaagttaggatttttgacttaaccatgttttaccatgcacaaattgacttatctttgcaaatgagacctttgccctaattataggcaacttgggggtaattatgattagtaattaattacaactttaagtacattgagtgtggctaatcctcaaacacccacctaggagcttgtgatggcaccaagggatgttccatcttaccctcataattaggttctcaaaaaagtgataaaattgtaagtacgaccatattctttggggaagtggtaacaatgttaggcgacgctctccttcacaaggtaaccatcattgacatcaaagcaaggtggtacatgtatgtgtgtgatcctaacatcctttcaagagatgtgtttccacgtcccctacaaagtgaatatgggacacgaacatctcattttgctcttggggtcaggtattctcgattgccccacgagggttaggatccttagggtaccatcgaccttataggagttgtgagggctcaattgcgacacttgttactcaaaaaatacaatatgacaccaaacaagtggcctagtgttaatacttgctttctcatggcaaaagatcatgggtttgaatatgggtggctccctctcctaagaagtatttaataaattcaatgagccttaaatgtgaacatttggtgctagctcattctccaaaccttctacttcagaaaagacattcaccactagttgtttgatgcagttctagtcacgcaccccatcgtaggtgggggagaccacacgaattgggtcttgacgaacattctagaatgggattggagctctcgtagtaacgccgagagaggcaaaccacactggtagccccctcttcccctttttcttccgaaaaaaacattactttaataggaaaagaagaaagaaaaacaaaaaatataacagacaattagagatgataacatgatggggtcagcacaaaagaaaaccttcacaacccaattgagaaagatacatagatgtgatcaacctcatttattatttcatcaactaacaactcatatcaaagttattgactctttcaacttgtattttattattgtcattgtctctttttagccataatataacaacttttcattaatgtggccaacatgtctgttatttttagctataaatattttgtatataatatttgctatggataagtcttatttctgctcttgtttttataaaaataaaaaatcataacaatttatagtataaaatgaattagattattagctagtaataatcgactaaataatgttcacccaaattcgaattatatgtcgacttttgaatgaattattactagatataaaaacactataaccgatataacttgtgactaatcaatttgagtgtgaattactttaaaatatttgtttaatatagttaaaagggaatttgtattgatgaaattgaaaaaaaaattatgactttataaatattgggtatttctggatattttattttggtggctgcgaaggagatcgagagagtgatagagcgagagagatgaacagacgaaagaaaaagaaaaagaaagaaannnnnnnnnnnnnnnnnnnnnnnagaaagaaaggaaaaaaagaaagaaataaaaaagataaattattttttttatttataattttaaattaattttattttnnttttttaatttttttaaataattgtttacttggaccaataaaattgtgccacgtgtatactgtgtccagtccaacatgacacttaacacctaaaatggacagaaatgttaaattgctaatagaatacgagtattgggggttttaccgtccaaatttagattttggggttaagtgaaaccaaaataaaaattttggagattttgccgccatttaatattaatatcttacattaattttttagagacaaaagaccatctctcatgaaagatacaaaaattgtactatatttagcaaaaaaaaaaaaggtgatatatttgcatcaatttttgatattgtagtctactacataattgtaaagtttgatgtaaaatttaatatttttattgaaaatatataaaaaaaaatatataaatagtttatctataactaaatatattaataaaataataaaagtaacacgaaagttaataataaaattgtgcatttatggtaatacaaattttatatcatagcaaataatatgtcaaatttaacacgatattttctatgtgtcaaatttgcagcacatttttcttaatagataagttttattctaattttgcatcacttatttacatttttattgaagatagttatcatcttcaccgatcaatttacttaaaaaataatataaaaatcaagacattaatttttttattctaagttattacttgttttgaaccaccaatagcatgtacatttatgttcaaattttcaaatattttgctttaaagattttttttttgaaaccattttcttttaggatttaataatactaaaagaatactttttaattcccaaattaataagaaattgacacttcaatttcgaaccaatagtacggatccaacaaaaaagtagcaaaactttgtatttatgtcactaagtgctaataatgtccctatattatgctattatcaatattttttcatatgtaaaacactatcaaattcatcataaaaaatcaaacataataatgtttttctctctttcaaccttgatccatcctcaacttcatcccatccttctaaaaatgacattttttgacacctttctcttctttgtaattacttcaaaacctctcaaaatgttatcataaattaattattgttattataagtagttaattaataatgtatatttatgtatgtataggtgatacacatggtggatagggttggaatatggcacaaactacctgtgataataggaatagcatacttgggaagtaggagacacttacaccagcgttacaatctcttccacgtcgggaaaatgaccggaaaagagtctaatgttaaggaaatttggtaccgaacggccgacggaaaatgcaatcatcaacaagatgatcttattgggagtcaaggaaccttttttggtcgtaatatgcctccttctacttcaccatatggggtaagtacatattttgatgaaaatattttgtaagagaattgctattgagtatcagtagtatatgtttaaatcggaaatattttgtatgagaatgattagcaatttttataaaaataaataattataatactaaaatataaagaaactgatatttaattataatcatagtgaaataataatttgtatcagaactatcttatatggaatataattattttaaattaaaatatttgaaatttgatattaaattatactagacatttcattagtgttttgagcatcaaaaaattacatgaagaaaaaaaaatagctaaaaatcaggtcgggccttgaacataaacggactaggcctgtgcctaggacccacttaacccatgagccccaattatttttttttttaaattacacacatttttcttattaattttgaaaaatatcatatatatattttttattataaaggtctaaatatatatatatatata

SEQ ID NO: 14431 - DNA, 6619 bp, Cannabis sativa
  modified_base (1872)..(1882): a, c, t, g, unknown or other
cacacacacacacacacatacacacacacatataattttaatttagtccatattgcctccaaagtttaaattaagcccattttgtcttcgaagtctaaagatgtataatatattagtgtttccaaggatacttgatatatgacttttctgtacttcttctaaatttgcaggatgacacgataacggttgttctctatcctgattatgttatatatcgggatagttattgttctgggtcccagttgactttttccaacaatagtatcaaaatgagttactcaactgcatctaaatacgaagaagattttgacattgaatggaatattgatgatctcatcaatatcagatgtcagtggtttcaaactgtgagttttttaattttaactatccttttcacaattaattttttatttctgtaatgcttggtatgagaatgtacagttaaccttgttaacattgttcgcttcagactgaaactgtcatcattaaactccagtttatatcaagggatacatttgaagatgatattgcccatggtacatcaggtgagttctcagtgacatattaattggtatagtatgcaacattctacttgttgttgaaattatttcagaccagtcatgttatattgtaaactcattccatcattgtctcttctttattttctgtcaactttttcttgttattgtattgcctttgagctatattgcgaggaccctgatattaggcacatgctacatgaactgaacattacatgactttattagcctagaaaatattaaaaacaaatatgctggttttatttgcatgaagctatggaatgatgattttccttgtagagaaatccaagtactaattggttggtcgcctctaagtaccaatgaggaaactacttaaactttacagccatttttatggtttcttgtacttgcaagagatgactgaaagcggatatagtgtgaaaaaagtatttacaatttgtgttgaaaactgaaaataattacaccaaatggggtggattgggtccgtggtttgtttttgtggtttggggctttggctgatcctctatatttctgatttttgccgttcgtaaatattttcaggtgttgatgaactgaagattgcagttgttgaacgtaactggccccagaaacaggatgagatagcatctttaaatcagaaatacttggctgtattggatcataatccacagtaagatgttctaaatttctcaagcacatgcatctctgacattcattattttcatgccaatagtttaagtctctccctctctcaaaattagtttttaagtttaaaaattttgccaccatgaagtttatgtaaatttttaagtaagaatgcttgttactcaagtagtgataggtcattttactatgaggtattcaagatacctcaactctcccaagagccaaagctcaaatatgatacaattatcatgatcctcccattccttttactctcctatatatacggctctattccatcttacttactacccaccattacaataacccatttatccttctattatatatcccactttatcccctctactagtgtcttatcactagtgtgttaaaccccttaactaatatactagtggaggggccatctgctaaacccaaccccagtctaagtaaaaggaggtttggctccaagctccaactcgatcttgtggtaaactgccccttatagggggcacttggcaactcactcgtggggcatgatatccccaaatttatttatgtaactctacaatacatggtgtgtactttttcacaaatgatacctgatttgtggtttgacaacattaaatgctgtcattggctgtttattattattattattatnnnnnnnnnnnttattattattattattttactttttggaaattcttaatgaaatagctgatcattaattctcgacgtccttttttttttcagtaatgatatggcccttggaatagatggggatgatttgcctagaccgaggcgttattttcctgtgtgagtacacacttaccttttttattgtcttggtggactcatgaagatgttaaaattattttagcaccttgatctatttgttattgatccttattttcaccagtttatcacttacatttgcacttttgattgcttttgtactcactaataaatatattatttttcagttttgctttgtgaaagtttatcactttgtgtctctagatgcttaagttttttaaatgttgaatagttaaggtatctttgctttcacaaccaaaaacaacaattaagatatttctacgttagataattagtcaagtgattttataagtgaatgatgatccttggaaattgggtaaggaaaggaaaattttgataatatatatctagagagagatagggagggagggaggtgagaggttttagcctatctattaattcagtacagagaagaaaatagaagatgaagatgaaaatggtactggtattactgacttccccaggaatttgagagcctggtccttacacttagcaaaaccttttctaaaccctcccaaacaagctacacattatttaaatcccacaacccagctgtctactgtgagactaagccacacacacccaaccacaactcccaaaacaacttacacagctaattaattccttttagcttccccatctttaagtttcatatccctcttcctggtatacacgtaagtgacaagtggcttgaagtttcaccttgtcctcaaggtggaagtgagtaaattgatcttgaatggcggagaagtcttcccatgtagcttcaaagtcggagtggtttttccatttaatcaaagcttgaggacttgtcttgtgagtgtctgggcgaatagctagcagcgtttttggttcaagcaacctttcaagatcagaattgagatctgggggaaggggagaggcttgttgatggggacctaaagcagctcgaagtaaggatacatgaaacaccaggtggatcatggattctggaggtaactgaagccgataggttgctggaccaatgcgagcagtgaccggaaatggaggactgagcttcacataaacttggtcaccaacctcaaaattgacatctcgatgcttacagtctgcctgagtcgtcattcgttgctgggtgcgaagaagattttgttttagcaaagtcaatatgtcatctttgtcaaggaggacttgtttggagataagcgagtactagagggctcaaaacagagtaatggtggtggacatgacggtataaaacccggaaatgagtcgtactaatggatgtgtggtgagaagtgttataccaaaacgcagcccatggtaaccacttgacccacttgttgggtttgaagctaacaaagcatcgaaggtaggtttttaggcatcgattgatctcctccgtttgcccatcggtttgaggatgatagggcagtgctgtgctttaaggaagtgccttgcaaatgaaataattccttccaaaacaagcttaaaaattgtccttgtctgacacaatggagcgaggaaacccgtggagtttcatcacttatttcacaaatgttgctgctacggtaacagttgagaaagggtggcgaagaggaataaagtgtccatatttggtgagttgatcgaccaccacaaagattgaatcaaacccattggaaagaggcaatccctctatgaaatccatagaaatgttgtcccaaacttgctcaggattgggaagaggttgaagcagccttgctagagattgagctaagtatttgttttgttgacacatagaacattcagccaaaaacttttgggcatccttgcacattatgagccagtaaaactcaaaagctaacctttgagaagtcttgaaaacctcggaatgaccccccattttgctgctgtgatattcttccaataacaagggaatggtgggggaagtggttggtaacaccaaacgaccccggaatttgaggcagccatgagtcaaagagaaacccccaccatcttgtcctagagagatcttcgtaataatctaagccaagtcggggtcagcggcaacttgagcatgtaaatggggaatggataagacattgggaaccgaaatggcagccatagatacgcaagctctgaaacccgagagagagcatcaactgctctatttttcgatcctggtttcttttgaatatcaaaatcataacccaaaagtttagtgagccacttttggtgttccataaagaccaagaactaagaactttctgccaagcaaataagggcgccatttttggattgcaaggacaatggccatcaactcactttcataaactgattttgattgagcccgaggagataaggtgcaactaaaataggcaaggggccttttgtgttgcataatttcacccaatcccacaccagacgcacccgtttcaagaacaaagagagctgagaagtctggcaaggctaatacgggaactgtgcacatagcttgctttaagtgttcaaaggcactttgagcttcttgggaccataagaatgcatcttttttgagctggtcagtaagtggacgagcaatcttccatacccttgaacgaactttcaataatagctagtgagacccaaaaaaacctctcaattccttgatagtagatggaactagccgctgaagcattgctgaaattttacttggatcgacggacaccccttttgccgagatcacatggcccaaatattcatcttgtggctgagcaaaaatacacatttttccggttggcatacaattggtgttgctggagttgttctaggtccgtttcgaggggagcaagatgggcttctaaagttggactgtacacaagaatattgtcaaaaaagactaatatacaagaaccacgaaaatcacggaatacctcattcataagagtttggaaggtggttggggtgttggtgagatcaaaaggcataacctagaattcatagtgcccttcgtgtgtacagaaggccgtcttttcaatgtcgttggctgccattcgattctgatgattacccgacttcaaatggactttgagaatatactggcaccatgtagctcatcgagtagctcatcaatgactggaatggggaatttatcggcaagtcgctcgattgagagcccgataatcaacacaaaacctccaacttccatcttttttttgccaatgagacaaggctggagaaagggcttttactcgactgtgctattcccactcgaagcatttcgcggaccattttttttcaatctcaactttttgaatttgagcataatgataggggcggacggagatgggttcggtgcctggttttaatgtgatggtatggtcttgaaaccgctgtggtggaaacccaagtggcttctcaaacaccttctagtactagtctaaaagttgagtgatagggtagaaattggtggttgttcgccaaccttggtggttaaagcaccaaacggaacctaataagcctcagaccccttctctaccgttagcatcacagtttctagagaaataggagacttacacaaactgaggtctccctgtaaagtgatccatgaatccgccatttcaaatttcataaccatcgttttccaattgtcgtgcatattacccaatgtctccaaccatttgatacccaatattacgtttgcaccacctaattctagttgaagaaaattagtgatgactacgcggggtaagtgattattgatatccgattgcaggaaaggctcgacgaagggagggagatgcagatctagcttcacattagcacaaattccttcagttttgaccttgccaccggttccgagaagtatcccgtagcaagtggttgccgatatcagaatgcccacggtcgtaacaacctccatggaaacaaagttatgggtggccctactatctatcaacacctttacgggcgtctttgctgttgtgatttcgatgagggagttcaatgagagagtagcaagtgctcttcggtggccactgtttcattggaatctggtgaaggaggtgaatcttctttcggagattcagactcttcttcgtcagtggtaagtagaatttggagcaatttttgctcacattctttgcttggacaaaccttttgtcacatttgaagaaaaggcctcgtgacctcttctcttggtactcgacctccattagctgcttataagatgtggcggcttaggatcgaatactgatagccttcaacgccgacgatgccatggaacccactgaaggagaggatccagttggagagattggctaaaaatttcgtgacggagatggagtgtagttggtaagagcaggtgatattggcccaaaattatgtcttaacgtgttgggcttagcattgggcccagggtcatcaagtgatggccctcttcggtacgctgggccgtttccacgatttgggccaagtcttggggttgcaaaatgtgtagcgttgccttaatttcatctttgagtccttgaacgaaacacccctccaaaagatgatcgggcacatgtgggacctaagaattaaatcctcccattgaacacatagtccttaacagtggtggtctgaaccaccga

SEQ ID NO: 14432 - DNA, 4298 bp, Cannabis sativa
  modified_base (2756)..(2761): a, c, t, g, unknown or other
aaaaaagttataattagcacttgtttttctagattacaaagttaaaatataaataagcatctcttcaacaaaatatagaataacaccttcatatttctggtattataatattccaattaaagctgactaaaaaatgctttgaagaatcgttgtttggaaatgaacatcaataactactccttcaccccaagaattcaaatcaaataactactcctttaaaccttttactttatcattttccttttgctactaaatccaggattatattcgtgtaaaattagtatttagtttatagcgaatgctaacccaaacaaccaaattaatatattggttgggtctaatattaattcaacccgcccaatttaaaccgagtcaaccaatttatatattcttttttagttataaaatacattacataatatgtttgataattaaactatttcttatttaaaatttaaattttgtagttattgattttaattatattgaatattgaaggatgcgtgtttgtttaatactttatgttgatgtcaactctaataatatttctcattttttaatttttaataatagttaagaatctaatatttaaatgatgtatttttatgaagtcaaatctaattattttggacactaaaaactaaccataataatttttttaaaagaaaattataacagtttgagcaggttaaaattataacggctctaagggtacaaaatattagattcatgtaagagaaccaaagaaaaaatatgtaaaaattcatctattattactttttggcttttcattgaaaaattcataattgaataatgtcattgcaaccaatgcaactatgaaaaaggcaataaatgaaggctaaaactcaaaaaaaaactttctgtgagacaaattgatgatctcagcactgacctgaaaaatgacattattatacaactttggaatcaatcaatagagtcccaagaatttccaccagaaagatgcaacaaccacccagatgacggcattaatcacagccatcacgaaccctattttgaatacgtcgggaagatctacataaccagctgttgaaacaaaaggaatgacattagtcactacccatcagaataaagacattttcgagattagcctaaagctggaaaataacttgatttacttatgcttaaaatggggaatgaggggcatacctccatagtagacagccgcttgcccactactataatgtgttagagcaccaaaaagatttgtactgtaagataaagtcaatgctgccatcacgctaggcaccccggctgcaatttgcatcgcgaggaaagcagcatataaagcacctacatgaccggtttgacttgcaaagatgtaatggactaagaaatatgttgcttgaagaacaccaaatgcggctggccagctcaatgaataggaggtaagtaacttggcgacggagttagacatccaagatacaataccaaggtctgtcaactggctagccatacccactacagcagcaaaccaaagcaaggtatcccatgccgatttttcatttaagcagtcaccccaatcaaggactcctgtcaaaagaagtatagataaaccaatcattgcagccacaacacttggtacgccaatagcttctctgcaagaataacagataagcttcatgaatcagaaactaaaagggaaagaatataaagcattttgtcatctaagagcatatattgagagatttaagtagtcaattcatgcctataataataaaatatgccaaccaccattaaggtgggaaatgaaaaggggaaatgaaattcactggtaagaggtaaataactataatgcacgcacagaatacacaaaacagattgatggtatatttacataatcatctaatgaacagagataagttggttaaaaatgatagaacatacccaaagacccacaaggataccgcaagaagcattgtaccaaccataatccattgatttctggtaacagcacccatgctttccagtctcttggcagccatagcaggggcatcaggagtgtccttggtttctggaggataaattaagtataaaactagtggcgtaactagaagtgaacaaatggcaggtacactggcaaccttgaaccaagtcatccaaatgttgggaattaccaccccaactttctcagccaatttaatgcctaacaaattttgagctgcagcggtgaagtaaagcgcactagagctaccggcagcctatcaaaaatcataagaacatcaatacatgtaacacaatcattagataatgccggcatattatagttccatacctatatgctaataagacagaaaacattcaacttttaacagattcgtggttccttacattgtcaaattcattcacatcataagcaaccatgcagtgaaatgtgatacatttagtgcaaatatattatcaatacggcagatcctcaactaaacactgtactatttgacagagaaaagaacagtagaacactagcagaagttcccataagtaaactaaccccaaactcatgaaaacaaaccacttggctaaaacccagttgaatctatttaatggtatttcaattcttcatttttcaactttcaattgggttttttatgatagtgatgtcttgacacaaagtgttcctaacacccatttcagcaaagcatgaacttcatgaactaaaccaatgaagaaaacaaaaaatccaatgacaatagttcaagagagagagagagagagannnnnngagagagagagagagagaacactaacctgaaactgggactgaatcagataagaaccaagcttcttcttcgaaggatcatcaggtttactcccagccgatagtgccaacgactgaattataggcaagaagaccccaccagctcttgccgtcgtgctcggcattgccggcgcaatcaaggcctctccaatcgtcaatccatacgacaatcccaacgtactcttcccaaaacatttgaccaaaaaagtcgcaactcgatcgcccaacccggtcttgacaaaccctctagcgaagaagaacgaaatcacaatcagccacattacctcactggtgaaggcgccgaaggccgccgtgaaaggcagagtctttgtcgcaatacacgtagtcattcctagaaacgcccaagccccgaccggcaaggggttcagaaccagaccggccaccgtcgagagaaaaatcgcgagcaactgccatgcctgaggagtcacttcgacgggtttgggaataaagaaccgaacaacgactccaatggcaacggaaagaatcaggggaacaatcttcgcaccttgaacaggcaccggcggcgacggctgtgcggctgaagaagaagaagaggaagcagccgcagcagcagcagcagcttggatctgaagatgagttttgcggaggggagagaagacgatgggtttggttggggagaagagagtggatgatcggagggtcaagatggaaggagaagaggaaatggagagttgggatttggagatggcgggtcgaggagaacgatgattacgaagcaaggtggagcgggaagtgagagagtaggtagaagtggaagaggagagagagtgaagagcgaaactccccatggttggacttggaagaaaaagaaatgactcagaagggactctgagtgagaatttgagaaaaaggaagggcttttctgcaaattataatggctgagtgttaagtgagtagttagtaggagcggagttccccagagaaagcaacggaaaaagcaattgttattttgtgtgtattttgaggagaggagaggagaagagggaagatgagttcaatcattttatttattttatttcttcttatttttatttttaattttcaatcaaaaaatataatattattctttatgtgaggctgtgttggattctcaatttctcaggatgtttgctcacgttatacactcttaaataaaataaaatatttatacttgtggtgtttggttacaaaataaaaataggatagtaataaaagttagaatgaaatagaatagaatataaattttatttttttagttattggagaccttctggtgcactaggatttctttaaatctttctctccatagcgtaaaatcccttgttttatcgaacttctccaatttgaatctcgccattgacgaagatcattgtttatttaggaattgcagcaaaaagaatcttgattttgcattcttaatcgattaccaagctttgatttatgggaaaattacaattaatgtgcggaatcaaaacaacta

SEQ ID NO: 14433 - DNA, 5287 bp, Cannabis sativa
ctttctctttctttcctttcttctctttctctttgtttccattcatggcacgatacaatactagatccaataagagatgtggcttggaggttgccaccagtgcgaggaggattaaagttgaacatggatgctgcaatagattctagcagggctgtagcaagctttggtggagttgtaagagatgctaaaggggaaatgattgcaggttattgtaatagaatttttgggataccaacttcagcaatggcagagtctcttgctcttctacatgttgttaattggtgcatcgatgttcacctccccatttctcatattgaattagattcaagtttgttgtgaataggcttaacaattccacttttgatctgtcaatattgtctgatgttttagtgaatatcaagaattctttgtccttgttcccaaatgttactatttcttacattcctagtgaggtaaatattttagctcacaaaattgttagaaaagctttaggagtggataaagagttggtgtggaatagtccattaccaccttttaagttataatctctgtaccttactgtttcattaattgagattatagttttttttaaaaaaaataaaaatctaaaccatacatatgttttgtttattaacattgaaataattatgccgctaagaaaaatcacgattatacactcaaaaactttaatgcttacaaatttataaatcttaaatgacatcagtataaatatattttataaattattcaaaaaatatattctctatttaggaaaatattatctttattttgttaaaatgtatggaggaatcataatctcctacctttattttataaaatagatgaacatatcatgaacttttactgatttgtttcccccaagatttgatcttcaactctaactaaagccttcaacaatttattgacgaacactatcaaaagtaatacagacagaaggccactgaataagctaaaacttcgataaattcattagaagcaaactagttcctattcttccaaaaagaccttcaaacactttaaggttgtacaaactagcaacaatacctgctccacaaagaaccaaccaggttctgtaaagcattttcgccaaaataaacacggaaatcttatagaatttcatcaactttgagaccgatccacttccaatatggtcttactaaataattgtttccaatcaactctgtgatgttcgcttctactcgtagactgcaatcaccagtttttggtgctgccagctcccagcaaacgtcgttcaactttatccaatagcatcatcccccatgtctcactttgcacttcaatagcctcaacaatcatctctgatgggtgcagtttatgaaccagtagacctctcactccggtgggatttgtgtcgtttgtgagagcgttgttcctccctattcttgtagtttctcttgtgagaaccatcttctttatctacagatttcctattataatggtcttcctccctctctacagaatgcgaggaataatcaagcttgtccatagatgtcctttcagcatattctttgcctttctcctcaggaaccctacgagagcgcttttcccggtctgtagatctcctcttatgatattgttcttcccttttcacaggactgcttctgctaagttgtccatccctatcttgggacctactcctatgagatacttcttctctgtcagctatgttcctttctcttctaggtggagatgggacctacaaccataaatagtgagaaagaaaaataccactttttacatgcgtttcaaatttaaagtcagaatacacaataacgaattgttagatagattttttacaatcacaaataaaccatttaatgctttcccaaaattataccagaaaattgtaattcaaggcaataaaagaacgagaatttagaaaagcttaaaagacaattaggaaggcaaataacaccagtatgctctaaattgaccttcacaaaagcagaatgtgaataaaagaatctgaatttagtaaagtgtaaaagacaattaagaaggcaaatgacacggttatgctataaaattgaccttcaaaaaagcagaatgtgcataataagtatgtatcatattcgagatctatatgactaatgaagtgaaatgacatatacggacatacctgataccgtgacatgtattttccttctggtggaggtggaatacccagtttttttaaatcatcatacgggattggtcgcctgatcacatgaaagggaaaatggaatcagtttattttgctgatagacatggctcaacaaactaaaatgatgcattgttgtattacaatacaatgcaagacaacatggatttaattttgatacacactagtgcaccatttagttcttgaaagaactatgaaaagctaagagtaagaacagatacaaaatctcaagttactcgagaaacttgttaaactccctgagtaatattttactctacataattcacacaaaatcccgtacatctaataagagtattataggctaggctaacatagactcctacttgccaaccaatagcaatctaagaactaggcacacttaaacaatcatttcagccactaagcacttgacaactcagcctccaaaatcctaatcaattatactagagactaatatcaaggcctaacaaaatttcagcactaaccagctaattcaaaaaggttatacagaaagcttatgtaaaccttgttcaaaatattcaaaaagttcataagcagaaaatattcaaaataaacgttgttcaaagccaacaataatctgtcagaaatatcaccaatcttttaataaatgaatcgtactgtaatgcatgcttaaggcacatatgcgaaacttcacatttttaaatatttcaatccagaaaactggggacacaagttaatctactctccttctctcagtgattgaacatacttgtggccaaatccaaataaaatattcacaagctatttgttaatgccaatgcaaataatttatatttaaaaaggtaaattgaatccacagaggaaattccatgcatgtaaacttgaatttacctcctacaaaggaacccatagcaacagtacgaagctattggtttctggtttagcatgtaagaaataattttggtacagaaaaagaggaaaatcgcaacacgtaagtaactgacacaaggtgtatcatctacatcctatcatgaatattcttagtagatttaactacagatgatctcctttgtggcatattctgtaacttgacagagttggaaaacgtatagaatgaaatgactccacttcatatgtgtgtgtgcacacgtgtttgtaaagtcatttaattcatatcgggaataaatacaaaaaaaatatataaaagtaattcaactgtaaattgagcttaaacagtggttggaggtcaaagaatcatgtatctagaatgtgcactgggcatcaaaagcccacatttaaatcacttgaagagtaaattagtgaaaaaaataaataaatcagatagaagtcatgcatacaggggagcacgaaatggtctctctcgtcctccaaaacgaagttgtcctgattccttcttaccaccaagtccccctccttgcaatagataacaaaatttaacaagaatttgatcaatgtcggattctaagtctatagataatataaagagcaccagactgacctaaccttcgcgggatccagcctggcatcaactgctgtctgttgtaatcaactataatttcagaatcatcaataatcgaatgttgagcatcctgcacattatacatgaaaactgatttaaggactgggatacatctggccactataagaattagatgacaaaagagctctaacattctgaactcctaacaaacttaccataatttaatgtactaagtcataattatgtagtacttaaggtttaactttaaaaacagttccagttaaatgaatgaactaaatttcaggttctttaaagttctatatttaccataggcagtatctcaacagcagccttttctgtcaatttgttagatgactttattcttttagatcacttatttcaaaaataatgctaacaaaagttcatagccccaactataacaacaaagcctattaaaaaagaagagcaacaaataatcatacaaccttgaatgcacgccgcatatctctttctgtttcaaactcaacaaaagcataaccacgtgaagcacctgttactgaagcaagtaacaccaagtaccaactccataaattacataaatgcagaggaaaaaaaagggggggtttctctaaatcataaataaattacataaaacatacaccgttcaaatcggatacaacaataattttaagagtaaagcatttggtctttggcttgaaattaaaaggaaaaaggttgaagacatattgcagccagatcgataatattgtccacgataagcaggatattacatcagaaactaaaatttaaacagaagacagaaaaaatatttaagcgaaaaagaaaaagtcagcaaatttgaacatatacattcaaaatgattaagcaggctgttgtattaaatcatgcgtaaaaatcttaaataattattagcattctagttcacaattcaatgaaaatgtaatcagaaataaatatttaccaatgtgcctaactaaacgtaaattcttgacccggccatacttgctcatagcctgaagtgaaccatcataacccccaaattcaaacgacagaaaaggttaattcgttagccgtaaagtaaataaatagagaacatatacagcaaaaaaaaaaaaatgacaattttcgaaaaaagaaaaaggaaccttgcgaagagtatgttcggtggtctggtgattgaggcgagcaacaaagagagtgcagtaagggtctccgatgagcttgggatcaccgaaggggtcatctgcagaagtatagttaggggagatgagagagtgatattaagaggaggaggaggagaaaaaatgaaatacggacatagagcagcagagttgcagagatgagccctatatatagcgttgtcgtgtggaaggacatcggtggcgtcgatgcttccggcttggatgggatgatatgagtcagcgtagaacactgagtttaagttactcatctcattctctctctctctaacccttttctccaatttttttgttgatggggagggagatcgaagatgatggatgttttaaattgaaaaaaaaaaataaacacattaattatttattgttataaatattaat

SEQ ID NO: 14434 - DNA, 5246 bp, Cannabis sativa
tatttcacctagattatttatatttgtcaaaggtttttctttagcttcctttgcataatgcttatgcgctttcttggagtctccaccaatatgtggacctccaatgatggtcaggatgttgcgaggagctctggaaactcttgcatcctctgagttgtctaccctatctgctctgtgattggcttctccctttttcttatactggccaaactttcttcgtctgatcaattcttcaatctcgtcttgcaataatcagcattcaagagtggtgtggccaatatcgttatgatacttgcaaaacttttttggatccatcttgttgcgatttcctcagatcggtggtggttttctaaaatatcgttatgttcctcaatcgcatagatatggtcgcgagtgatagaaagtttggtataattgacaaagcgtgggcctcccttccactttggggaggtatccttctttgttggcgacttgacgagttttgggcttcgtcaccttgttggactgcaacttttgggactgtgtttaggactacatcctttggaattcttaaattgtggacttcgggatcccagtcttggtactggggatccacgcttgtccttgtttgactaaactaataaatgttttcgtatttagcgataattttgtaatacgagactaaaaaatacaaagcacattgttaaacattgctaatcatcgtgaaaacttgagtgtgatttatggacgtttagtgatgtgctctacaaattttagtctcatatcgtaaatacatcacaaaattatcgctaaacatcgctaaatacgcaaatatttcttattttattctaactccacagaacatgctaatcatcgctaaacttcatctctaacctcaaatttcgtatatcattgcaaatacatgattaataatgcaaattattgcaaaaaactagaaagccagaaaaaacgcagttaaatacaaaaaatttaaaatttaatttttgggcaaaaaatcaacaaaacacaaacataaatgtatatatttgttgaaaacaaactatatacataatagcattattttgagttcgacgatgggtgctctggtaaaaatggactgacttgtgtgtgtgtgtatgtgtgactttctagagatagacgagaaagagagagagggaaacatagaggtttggttttattatttgagaggtataattagaactaaataaacatattagcacattttctttgatgttttgtgtagtgtattcttagggacatgtttaagcatggtaactcaaattttcctttattaatatacaatgtagtatagacacacttaatatcaaatatgtgtccacgtagaaatattgattttttattggtctaattttttaaatacatattttttaacttttaatattagtatattgaatttaataaattagagagaacaaatagttagggggtgaaatgcttatttattctaatttgacaatggcacaccaaggtctaatgtaccaaattaactttttattattcatgtagaacagaaaataagagaattgtcacaacttagtaatataaatagtttgggagagtatttattatcgattatagttcacagatattattttctcgataataatttaagaaaaaaaatacttgtttattcttttaataatttaagttgtatcataactataaagtcaactatgaatttaaacaataatatgcaattctcaattgttataaaatccgcgcgaagcgcagcatctttttctaataataaattatatcaattaagttacacattttatacaaactacaaccggactatgattggtggttgtcaccaatgtggaactagatgagaggagctaccacaacttgaaataatattatttcgacttcatcattgttatttggcacttaaaagtatctaacaccaacttgatactttatatttggttaacatgttatttattaaattaaaatgcttaaacccaatatcaaaatacaccaataacatcttgtgaagcttacactttaaagagccttttattatggtttactcctttccttaacactcaataaattggcctgcattaaataaaactatacattttagtcccattgcattacaatatatttaaactctaattttgataatttttttctataaatgaattgaaatttggtagattataataataaaaaatataataatattgcaatacattttaaattggagagcctcaattaagataaaatttagtttatatattgcaagaaaaaaaaatacttaagtgattataaattatctaaatcaatgatatattaatcatttatatttttgaatggtaacacaatagttttttttaagtgtctaaattaaattaattacatattattatatataattaatgtgtgtagaatttaagtgtatctaaatcattattcattttataattcttgaaaattgtttaagctaattattttattcattaaataagttaagaagcaagacattgaaacaatattcaattaatgtttcaactaacttagattttccatctacttttgtgcttctgaaaattactatccaaaaaaacttaatgtttcatataatatacaaccacttattacttaactttctttgatcttctttattaaactttttataaatgtaattataactatatatatacctggttgttgcatggaggatgctaactaataatgactaccaaacaaggcacccaatctattaaggttaccacaagaagtggtagtggtgccttgttgtctgagaatttgctgttgaattaccaaaacagaagctgagcctccaaaatcacttgctcccacataatctcctattactcctaactcatgcaaattctctgtccaatccgaaagacctgacacaagcacaggatttatcccttgttgtctccccacaatccacaaatcaaacgacccgtcgtttacagcttgaatcgcggccaccgtctccgccccattcctcacaaccacttctctgtacaccaccctgttgttcgcttcatttttcacccaaaaccaagtcaccactccatcatcgagcttcttctccatctcattatctccttctccattaaacgacaggaatctcaccaccgttaatgtcacctcggggtttcccagcattcgatcagcataagccaatgcctccctggcatcggctccgcccaagaacagaaccgcaaaatggtgctgtgcatggccgaacgaggctgtcgccaaagggttcctgagatctcctttgtcgaggaatatcccaaccgagcagggtgcatgggtgagcactagcgagttcactgaacgaacacctgttcgtctttctgaatcgtctgccactccttccatctggtcgctgttgaaaggtaagatgatgagagttgatttgtggaggagggcttgctcgcaaatgtcttggtacattgttcgtttcggggtgaccacagtgtaggactcgagcttcacgcattctgatcgagtttcttggtagaattcgagtgctttgtggatggttactgaggttccgtattgggttgggacgtggctttgtttttggtggtcgatgaagattgggttggctcggcccatgagctcgattaggcatagtgaggtgatggagaatggtgtggccgaagttgggttggaggcttctataagggtgattaagccagccacactttcttggtcgagaatgacaagtaggactcgaagatctgtgcctggtgctgtatgttgaattgttctcttcttgttcaccatgtatggttttgtggggtcatatagaacactaattaagggtgagcatatggcacttatcatggttgttaaaagaaccatcattgtgaattgagattgctgtagaatctgaaaaacaaaaatgtatgtacatatgaatcagaattatgaaatttcaagtgtttatatatttgagaacataatatatatctatgtatatacctgtttgtccatccagtgaatgaacaataaaagttccacctgtcctcttacgctaagaataaagctcaaagcaagactgtcttttaaagacattttgaaataaagacaagccaaacaagtggtagcaattttagcaatataaccgataacaaccatggccaacaagggtttcaaacttggccatgcaaggtagatagttgagacatcagtgtacattcctataaatgcaaatgaaaagggcatcaaaatttcagaagcaatagtttctacacgctctacaagcatggatccgagtggaggaccatcaggaatgatgagcccaagccacataggtccattggctatagccaaaccaaacatgtcagtgaggaatcccattgacatagcaaacgtcattatgagcactaaataagtttgctcgacgggttttccatttcgagccctggaagctagtaactgcataagtttcctcacaccgaccaacattaacaagataaggaccattgagagcaggtaccagcctgcgtttttgctttgggcttcggtttgcttggatgactcgaaagctatgagcgcattgattccaatggcgtcgcttataactgacgtcgaaagggccattcgaccgaggtcagagctgaggaggttaagctctttgaggagaggatataaaacagggaaagctgttatggcgacagaggatgagacagctcctattgatgataatgtggcgagatccttgtccatcgttgggcgtaagaggaatccgacgcctatgattaagcccattgggaatacaactgaagctaaggcgatccacacctgttttttacccgttttggtgattagagtcatgtccattttcactcctgatacgaacaaaaagtacatgaatcccattactccaatgttcttcaccatgaagtctgcattttctggaaacataaatgcagtgaaccttttgcttctccctaaaacacttggcccaacaattattccacccttatttgaaaaaaacaaaacaaaagaattattatcaaacattgctaataagctaaaattaatcaaattttaacttaagaaatagaattgcatattttttacaacccttataattttattattaaattagagaacataactagaaaataaatccggataactgaattccaacaattttttctttttacataagtttattctattcaatcgttatattagtatattaataaaataataacaataaa

SEQ ID NO: 14435 - DNA, 6700 bp, Cannabis sativa
ttttttttatttaataatgtaaaacaagtaaacacccacaaacgatgtagtattagtataggagtagaaaaccctatccctctttttcgtctttctgatctcacttctccggcgacctaagacctaacggggggaactctctgctctcaccctctccgctcccgtcgtcgtcctccgccgcaggccccagacgctaaaaggcctctcgtttctccatagaagctacacgtaagtattttacaatatatatacacagatttgtattactagttgtgagaccgagaaaagatctttgttgaaaattactcatgcaactcaaacatattctctctattttcttaatgaattaaaattctcacactatttttttctttttcatgtgaggtcagttttggaatggtgggatctgtgatgttacagtattcagtttcctttcctagggtttagtacatgtaaggcgaatatgaaggaaaagcgttttattttaagtaacttaatggaaattgttttatctatgtggagtggttttgattagtcaaaattgttagccatgttttttttttatatatatatatattatatttatttatttttaattgtgttgggatttttctactgtcagagtttgaaatgtttggctttggagagtcacgtatttatatatttatatgtttatttatctaattggtgtaaaggggaaatgttatttgcagggttgtgttgtaaagggtcttggtggagagtctttagtattcacataaaggcttcaagcatatgaacttgggcatgttgttgaagaagcaatttggtgtgttctgatgtaataattttgttttcacgacatccaagcaatttaattccttagattgggttcagcttttccttattatttatggagtgtaataaggaagaggccctgagggccagggagattgctgaaaagaagatggaaagtaaggagtttgcggtagctcgcaagattgctttgaaggcccaacaactttatcctgatgttgagaatatttctcagttgcttatggtctgtgatgtacattgctctgccgaacataaaataacaggggatgagatggactggtatggaatccttcaagtcgaggagaatgcagatgagtctacaattaagaagcaatataggaagtttgctctccaacttcatcctgataaaaataagtttgctggtgctgaagctgcttttaagctgattggggaagctcagagaatactattggacaaagataagcgcctcatgcataatatgagacgcaagtgttcaatgagcagaagggctgcaacttattttcctgctcgtcaggtcaatcggacctcaaatgtggttgtggttccacacagtagtagaggcaacttctctggtgtgaatgctcataatcagcagcagcaacaacctgttaatctagggaacctagatcccagaacaactttttggactgaatgcaccttttgttttgtaaggtaccagtactataaagacgttcttaataaatctcttcgatgtaataattgccagaggtcttttgtggcatgtgacctaaatacaccagcagcagctaattttagtaaaccagtattccctcaacgaaaagacagtactcagaaaggggaatcacatgttcgtcgaaactttggcactgggagtttgaatccagaatctgttcaaaaagcaggtaagaaggcatcacctacttcacgcgttgacagaagaaagatgaatgacaaaagagaaaggaaacgtgctcgagataagagcgagctctctgaatctgatgtatcagtctctgaaagtagcagcgactctgaagaagatatgtcaattgatgagaacatgtctgaattttctggagagcaaaatcgacgaagatcttcacgccataaacaacatgtctcttacaaggaaaatttaagtgatgatgaaggtggctatgtgagtccaaagagggcaaaagggaagaaatttgagggggaggatggagatcaatctaaagagaagtcagcgaaggtttcaagtttgtctgatgatactacttctaatgggaaagtagatgagaaaggggttaaacaagaagaaggtgtacctaatggagacaaggccggtaagagtgaagagcctatagaaagttctgaaaattgtgttgatattgattcaagcttggaggagacatcagaccaggaattccataaatatctagatccagattttaatgactttgaaaaggacaggaaagcagggtgttttgcagtcgggcagatatgggctgcttatgatgttttcaatgccatgccaaggttctatgctcagatcaaaaggatttactctcccgggttcaatgtgctcctaaactggttagagccagagccagctaatgagtccgaattaaaatggcaatctgcagacatgccattttcttgtggtaagttcaagtctggggcaactgagaaaacagacaatcgtcttatgttctctcatctagtttcttgggaaaaaggtagtcgtaaaaatagttttttgatatatccaagaaagggggagatctgggctctttttaaggactgggattttaactggagtagtgatcgagatgcacatcgtcagtgtgaatatgaatatgttgaaattttgtttgattatgatgctgatgttggcatacatgttgctctattgagcaaagtaaatgggtttgtgagtattttcagtcgggtggaaatgatgggaaagaagacatttcttgttcccccagctgagctattgaggttttcccacatgattccgtcctataaaatgaaaggtactgaaagaggagttccaataggatcgttcgaacttgatcctgctgctttgcctccaattaaagacagtgacacacaaatgaaccattcggtgcctcagcatgacatgccagctccaagcccacaaaaagtggaaatcccagatcctgagttctacaactttgatgttgataaatccaaagataagtttcagctgggtcagatctgggcattgtatagtgatgaggatggtttgccaaaatactatggtcagattaagaaaattgattttcacccatctctcaaactgcatatttcatggctttcatctatccctttctcaagcattactagatggtctgatgaggacatgcctgtttcttgcggtagatttaaggtttcaaaggagggtcaggcttacgacgatgtaacttctttttcgcatctagtaaaagcagagcctacaggtagacgaaatgagtatgacattctccctgggaaaggtgaaatttgggcattgtacaggaactggaatcccaacctcaactctagtgacttggaaaactgtgaatatgacatagtggaagttctttcagctactgttttactaataaatgttttagttctggaacgtgtggatggttttagctcagtatttaagactcacaaggagggaggatcagctattacatggagtgttccccaggttgattttttcaagttctctcaccaagttcctgccttccgtctcaccgaggagagaggtggcaagtatagaggcttccttgaacttgataccgccgccttgccagtccactttttttgttaaacctagatccagaagcttcttataaaaaggtgcactacttgatacaaaagatttctgcactatgcaatttcttatttggatccatggtttagctagctgcattccagagaaagtaggatctttgcacttttttttttttgttgcaactaatggtttatgtattgatccttgatatttctttgtgaaagccccaagttccatttatttaaaagttaaaactctggtttttatatattttcgttcaagaactttcttttcttggttaactcataaatgtatgaagtagattttaacatacccatttgtgaatgcttttctttttccaccaatttcttactaattaggagatcttttacttctcttcgattgaatctgcatgaaagttcatataattctaataaaacattcagacttttagacaagcgttttttgttttgttttgttatcaactgataaactttctagctaataattattactaataattggtataagctgcatacaatctcaatttaagaacagtgccattacgttcctaaaaggcctcttgattttttcttttcttctttattgtcttctcttttatgcactcattcatttccattcatggctcgcatctactgccatagacaccagttccaactaccgctgctccgccacaagttattgctactaacagcttcttcactcccaaccacagtgagtatcctactcacatttatttgcaagctgtggttttatatactctggtaacttccttattggtgctgcaaaattcaaattatgtcatctacatgctttttcatataaactctgaaccataaatctgtgtttagagaccttggctctcttcatttcgtggccggcatttcggttattacttactctactatgtcaatacaagtacgttagaaatgtttttggcacaatctcacatgcttcagtcaaagcccacacctacacctgtttttgtaaccaaagctttgtttcaacaaaatggaacatcattacatgattcgtacatatatacaacgccttgttggttttctttgctgtgaacaaagaatgccaaagataagggataattggtataactttcactgctcctaattcttctaatttctaacaccttacagctttcatgtagtttttgtgtttttcttggtgaatacctcatatcctagtcctctgccaagcaatgagttgtctcgtgtagtaatactgaattaaagttaatgctgaacttgcatggttcaaacaattgctctttaatctacatttctcaataccacacacaccacctatggtgtgccagcactagtgcagctcaaattgccgttagggatgtcaatttaagatgtctcgccctttaaatttgtggtacttgctcttagagtactcccatcaacttctcttctctatcatttaaaatacacactaaaatctcatattcttaatgttactttaattttatatattacactatacatcaaatttttttctataagatgtagagaaacatttgaaaaaaaataaagatacaaactgaaaattttaaagaagcttttaaaagtgcttgtaggtatgagcggccaggccggggcaaaaggcataatcttattcctaatttgttctgcttatactttatttttaacttgtatttgttttctaatgtaattaaaaatatatatatttattaacaacatggttttacttttattattttacataatttgaaagtaaaaaaaatattgtatagttcctctaaatgaaaaggttttcaaaagacttttcaggaaagttgttcacacacagaaacaggtcttggaaggttttcttgtcctttcgggaagggtcttcaagaagctagtccttctttggaaggggagtttcagatggctagctttttctcttggaaggtagttttggatagtcgactacagctggctttatcctattcggaagctccttcagtgagtgcctttggtccgtgatcccgaaaacttatatatgtttctggatacactcatacttatgctgacatggagatctcgctcaaaggaaagttggttaagttagttaagactaacttaacaatctcacttcttgcaaccaccgactttaggatcttgatcctaagcctataaatacaaccatcacttaagcattaaaggacacgacgaactttagatcaaccagattgatttgagagagagagagagaaaagattgagaggtagagagagaaaggtactaaggaaagagagagattaagtttgggttttgtatgaaaatcttccgtatatgatgaagattcttaggtaagagtgtgagagttgaaacactttgagagaactcatcaaagaatcgatctcgactgtaatgtgcctgttcttgctcaattaataaagaagatttaggtagtgttccaaaactggattagagccatagataacattgatctattgatcatgaataatatatatctctgtgtcgatttatatttcttgctttaatttttatttctaattttgatattctatttatccctatttttttcttattttgttagtcgtgaattgttaaccttgtcattactaattgtgattgtttaaaagttagttgatttaattctacatctttagttgtaattttcgtacaaattagagcttggtaatcgatcaagaacacagaatcaagattatttctactacaattcttgaagaaactttaactgtcatcaatgatgagattcgaattgaaaaaatttgatggaacatgagactttgcgctatagagagaaagtttaaaaggaatactagtgcaccaaaaggtatccaaggttcttggaaatgagaagttattggcaaaaaagaaaccagaagaaaaagcataaatggaggagatggcgtactacacgatcatcatgtatctatcaaacattgttaaaagaaaactcatcccaaagaagacagcgaaaggagtttggaacagattggaagaactatacttaaaaccatcaatagctagcaagatcaatttgctaaaaggttatacgattttagaatga

SEQ ID NO: 14436 - DNA, 4710 bp, Cannabis sativa
ttttttttaatattttaattgttagcattacctttttaagaaagaaagggtatatattaatattactttttccagagagttatggaatgtcatcagctgatgacacttattctcaattgatatcttctttcctaaattaatcgtaaaagacaaccctaattatatttaattaacccttttgttgactactcatttattaaaaaaaaaaaaacatgaaaacactttccttatttacttgactttctttcatttcatttaattttgatttcatttgttttggatttgagagagacaaggatattcataattatatataatattaattaaatattatttcgacagtgtctgtctacatacatacgtggttaacgtccatggatttctcgctcaagaaatcgttcaagtcccacggctcctataataaacatacgaagaagatctccgcaggtggaggtgcccaaaccagccacgaagagctacctattctatcggatcaagacattgttgaagatcgacacccccacattccgaacccgatgaaggaagactccaatgaccggaatgaggtcattgtaaaaatcgatgaaggaggtgattctaccgccgccgccgccacgtccggcgactcttctaaacatgccggcaagatttggcaggaaacgagctatgatgtgtggaaggaccctgccagagataatgtgaacgaccacgacgacggaggagatggtgatgatgcgactagaatgagttttaattttgtgcaaggtaataataagctgcagaagcaaggtatggaggatcctccgtcgaagttgattggccagtttttgcataagcagagggcttcaggggacacggcattggatatggatttggagatggaggagctcaaaagccaccatgatagagatttgcagcctttggccgagtctccgatgaatgtttggcaatcgatggagttgaaggtggcgtataaccatccgtcgacttcgacggacggcgtcgatggattacaggcgacggagtcgatgcggcggcgttacagggattcgatggacgacaaggagagtcaaggacaaccttataatgaagaggaagaggttgtgaggtgtacctcaaacgcgtcgtttcagcccgagctttcgtttcagaggaggtctagtttgttacgggtaaagaccaggtccaggcttatggacccgccagaagatccagatagacgagctgatcgagtttataggtctgggcagatacccaggtcgggtcaggtgctgaaatctggtatgttgccgaagtcggggcaattgaaatctgggtttttggggaaggccggggatgacgaagaggatgacccgttttttgatgaggacttacccgatgacttcaataggtcgaatcttagtgtcttgactctgattcagtgggctagtttggttttgaacgttggggcattagcttgtacgctttctgtaccacttttgagggagaaaaacttgtggaaattgaagctatggaaatgggaggtcttgattgcggttctgatttgtgggaggttggtctcgggttgggggattcggattgtggtgttcttcattgagaggaattttctacttcgtaaaagggttctttatttcgtttatggtattagaaaagctgttcagaattgtttatggctgggccttgttttgattgcttggcacttcttgtttgataaaaaagttgagagagagactaggagtgagggcctcagatacgtgactaaagtattggtttgtttcttggtgggtactttgctttggttggtgaagaccctcatagtgaaagtacttgcttcttcattccatgttagtacctacttcgacagaattcaggactcgcttttcaaccagtttgtgattgaaacgctctcgggtccaccattgattgagattcacaaaacagaggaagaggatgagagacttgccgatgaggttcagaagctccaaaatgctggggctacaataccacctgaccttaaggccactgctttctcttcaggattcccacccccgagaactagccgagtcatcgggagtggtcggttgtccaagacaaataatagtgccaaactctctcgggtgcttagcaagaagtcagacgagggaataacaattgatcatttacataagttgaatcccaagaacgtatcagcctggaatatgaaaaggcttatgaaaatagtgcgaaatggttctcttactacgcttgatgagcagattttggattcgactaatgatgatgagtccgctactcagatcaggagtgaagttgaggccaaggctgcagccaagaagatatttctgaatgtggctaggcggggctgcaagtaagtttctgatttcttcttaaaccttactatatttgattgtcttctttttaatatgtttcctagtttggcattagcagtcatgttgatgaaaggttatatctggtgatatcacttcaactaacttgctttaaaaggcttagtttggcataaatgaaaagttttattttctcacattattttgtgctatgatagatttatgcaattcaagttctgttaaattgcatttgtttactattatgaaaaaggaaatggtgcatgcaaaatcgataaggaataacagtaagcattctgtttgtttcatacaaatagaaattattcctttttttttttcctttaattgtataaatgctgttttctcctgccaactctatctggtcgtgtccttctttctaacttactagtcagctttacgtagttgacatcattcttcttcatctccttactgtccttggctatacataccccatagattatttattcttatctaaacaaatttatgtcataccatatttttgccaggtttatttacgttgaggatttgatgcgtttcatgcgagaagatgaggctctaaaggccatgagtctctttgaaggggcagtggagactaaaagaatcagcaaatcttcccttaaaaactgggtggtaagaatgaaacactaattaattattttattataaccttgaagatatttttgccattttagtatgtttgactagaataaagcatacacgcatacaagaacttgcagataaacatggtcattattcagtggtttcttttcttgccaacttctctgctatagtgtacatgtctttgtgtttagaagcacctaacaaaactcgtcttccactatttagtagtggtcatttatttgataaaggggtaacacttttccaggttaatgcattcagagagcggagagcactcgctttgacactaaatgacaccaaaactgctgtcaacaaacttcatcatatggtaaacataatagttgctattgttataggcgtcatatggcttcttgtactaggaatcgccaccagcaaatttctactcttcgtcagttcgcagctagtacttgtggcgtttgtttttggaaacacttgcaagacggtttttgaagccattgttttcttgtttgtgatgcacccttttgacgtcggagaccggtgtgaaatcgatggaattcaggttacttgctatctaattaacaatttgtattctgtggtaccaccattgtgtttttcgggaccctaattttgtttatcaacaattttcagatggttgttgaagaaatgaacatcttgactaccattttcctaaggtatgacaatactaaaataatatttcctaatagtactcttgccacaaaggccgtcaacaatttctatcgaagtccagacacaggagatggtgttgagttctgtatccacgtagctactccggcagagaagattgcagcaatgaaacaaagaataacaaagtatgacatgaaaatatacactacttgcttcttcactcttgattggtgatgttataatggtatgcattaatctggtatatgaattgtcttgtcatttttactgcagttatgttgagagcaaggtggagcattggtatcctgcaccaatgattataatgaaggacctggaagaactaaacagggtaagaatggctgtgtggttgtgccacaaaatgaaccaccaagacatgggtgaacggtattctagaagatctcttctgatagaagagatggtcaagacattccgggaacttgacatccaatatcgtcttcttccaatagacattaatgtctgtgccatgccgactgtgacctctacgcggcttcccaatagctggactgcacctacaagctgagaaaatgaacaagacaaccaaacaataacttgataaccacattgagctaaggaaagatagtgagtgagcctgggaggcgttttgggtgggggaatggggggtggtgttcataagaacgagtagtaggatttttttttttattcttgtaagcaattatatcatttagttggttgagctccctaggaattattaattagtgtcttataatgcaattgatagaatttcagcttatttgttcttgtgtacgtttcgtattgtcttgttagtttataaaataattgtctattcacgattttgttcaagtgagggcaatattatgcataataaattctagaccccaactaatatcatttaggagtatcatttaggagtattcataaaatagtcgatctaattcaatccgtatgatccaatccaatccgcaaagtgcagatatctacatttgtgcggattggattggat

SEQ ID NO: 14437 - DNA, 11747 bp, Cannabis sativa
tttttttttttttatgtgaaagagagcatttagtataatcaatgatagtggccttagataagttcagcttttttccaccgttttgctactgtttttttctcacagcacagctacaattgtttttttcccacattatagctgtgccaaactggtcctcaatcgatttccactttccacgaatgtttttacacccatcaacagggtatggtgggacaatatttgttgttcacaacttttggttgtgtttggacaatcactctcatcttgatgatttcttaaatatcccaaattatccttggttctgttcttcatttccttcagggacagttgcatcccatgccaacacatgatgtacactatggaaacccacagagtttgcaaggactgttactgcatttggatgctagcacattctatcagcttggttgcagggtgccaatataattgtgcatggttgttttgacattcaggaaagtgtacaagatgtggccagcattgacacggttcttcctctctctcaatcatacgtaatttatttctggcctctcgtgtagctgggatcacgtggagtagagatgctttgcttctgagaaccaaatatttctattcttttgtagaggattactaagtggataccctttcgcagcaggagcaatctatgggctcctcacagtatcagaacattgtgtcaaagcatcaacgtgataggcattcggcctcacagtttgagctcttatcatttcagagtaatgacacacatgaggagatttcagaacatcctcaatggaagaggtcatcttgtatatgttcttttgtttcttctccatagatccctttttagtgattttattgtacgtttcacaatttttcagtaacacaatcacacagtaatctctaaagagattcctaacaaaaaaaaaaaaaaaaaatcatgtactcttatctttatttttcttataggaagtggatgcagaatacaaaaagaaaaggaaaaatataacatttttcttcctacaaattgatctgcacttttggatgagtccaaatattctttgaaaaagcactagacataacttgtatacatttttggtagccgtcatgtgtctccaagtattaggtgcacaactgaacatattacattatccttaatgaaagctaaaccatcatcttcacaattctactttcttttaaggattttaaaacactccttttcaggcaacaatggcagggtaaagcaatttctgacctcacattataaatggtcaatttctgaacacaagtatggtgcttaaattaattacttcattacagtctagtgtgacagtgatttgcttagcactttagctttgtgagggatgatggtgaattgagtggttttattttattttggtttagacttttttcctctcatgttccaaaacagagttatataattggcatttcataactgccaagttacaatgaaaatagactttgtggtacaatacaacttaagttttatgatgtctcatgagacctctttctcaatttgcaccacaaaccattctttgtatggatggttgcaccggtaaccagttctacagattcgggagaccccttcagctccacatcaaacttctgtaacaacatagccaatgctactgttgactccattagtgcaaattggtctccaacgcattttcttggtcctccaccaaagggtaaaaaggcgaaatcggatataatctggtaattttgaagcaatagattcgttacttgacaagtcagaatatgaattaaaagtcgtctaaaaagatgcagggaggagtgaataacctcatttgggtacagtgctccagggcttcgagatgggtcgaaaccatcccatccttcaacatcttcattcttcttttgcactaagaatctctctggttcaaattcattaggacgatcccaaaaatacggagatctatggagattatatacctgagtagacaattttaaatttctttattaaaaaaaatgagtaagaaacatgattagtttcaacacaagggaacaattgtcttctactcatctactcacagatataaaaatatcagttcctggaggaattgcataaccgtctttgttgccattgtaccctcctgcagagacgatttaaaaaaaaataataataatgaaacctctaatatgacatgaatacgttatacagttcttctgggattatttaatcgtatcatatatcagaacattaagtataaatacctggtaatttatctgacttgagagagcgtctaataagcaaaggtggttgaggatacaatctaagggattctacaacaataagtcttatgtagctgaaatagaaaatcaaatcattaaatagtcaatcatctatcaagtgcatgctgtctcaaaataaagcaaaggtgatgccattattctgaggttccaattgtgatgaaagacaaccagcttgaaatgaaaagcataacttataaattcaacattcctaatattcaaagccaagtccttagacaacagccatagaagttttgatcattatgcaaaaaccaatatttagtagaagaacagtggaaaaaacaagtctagatctcttgagtagtaacactgtcaaattgtgaaagaagtacttaacactgtcaaattgatgtattactgcattgattttaattacttaagtttcaatatgaatctttgttgatttagctaaattttttggggagtttctgaacacgtattttccttgtttgaaatatcatatttttgacagaattctttgtgaaaatcaataaataaattcagatataatgttaataagcttagaggcatactccaattttttaactgattcaaacgttggttcatcctgcccaagtactgaatcgatctccttttgcgcctttttcattttcgatggattctgtggtgcataaagtaatttggattaatatgtttatgcagttcaaaagtatgacagctattaccgagaaatcaaggaagaacagtaattttcacttaacttcatgagatggttaacacagatttttaatattaatagctagaattggataatcatacctgagcgagcaggaaaacagcccaagtaagaacagcagctgttgtttcatggccagcaataagcatagtcatcaggtcatcccgtaactgtcagaaaattcaagggtattggtaaaagttaactggtttattgctcctaaacatccccaaaataagctattaatgaccatacctagctaaataaaggcacacaaacctacaagtaaacacatccacagtgattccaacacaggaggattgtgaaatttaaatgaagtacatgaaaaagaatggagaaaaaaatgatgtgaaaggaactaaaaaaaacatttatattactgcagtagcttaattgaaaaaccaatgggaattatattaactaaatatatatattttggctagacgtactcaacagattcatatcatactattctaaatataattcatctaatctacacgaaaatcagctaatataactagtgtctagtgtaaattaagagatttcaaatagtgataagtaaacgtgagaagtttataaattcaatctaatctattaatttatcaatgatttttttccatatctcaaaatattaattctatttgatttgatcaaatgattgtatatgatataattggttatgtacaatatatgtcgctgtctttcattggcaagcatgggtcagttatccatgctttaagaatgtattggatcaatttgtgccaattttgactagaaattttggagatgcataaactaataattataactgatttacctgacggtcatcaacatcagctccccgcatatcaactaagaaacgcaggagactagcatcctgcaaactttaagttataaggctgtaattataagacataatgcttgaattacatatcttaattttacacgaacaagtaaattttaaattatgattatgtattaattaaatctattcaccaaccttcagatttgagtagtccctttgttgtaatttttcaacatctgtttcctgtaattggatgcataatgaagttttagatattggtagaatatgctacaggtaacaacttcaatgcttgacattgacataaaaaccaaagtagatacaacaaataagaaactcatacagaagcaaactgggaaacgatatatgttgcagaacatgtaacaactaaagaaccagaaattgtagcaaccttgagacctttgcaggtactcaaacctgccaagctttattagagcttgatgctatattgaaatggttctaattgtaggaggcacatgcatgcttttattgccagcattgatcaggctctaataatttccagatagataagttggtatcctaaagatatcaattgcttaagtttccaaatcatgtaacatgtgcaccaatttaagtaaaatcctttgagattggcatatcataccaactttctgtacattttgcttaggttgtagaagcactgtctctgacattttttgtactaaaaaacgaatatcatatccaactaaaagcttagaatatcatttaaatgtgattgcatcgacacacgattatgatcagcacctagatccatcatacaacttatgtattatctaacctgcctcgtgtcttttgcatttctgatgagtccatcaagacaatcattgatgacctttaggtccttctggaacttccgctgcctggggactatccacttcatgaagggaactttccaatatggaatataaaaggttgatctgtgttctgcttcaaaaagggtcccatacactgcctgcgataaaactgtaaaaatttaacatgcaatatggcttagacatattggaaattctaattttatattttaaaattaatatatatatatatgtcagtacaaccatgcccatgattgggtcaaaagcttgtaataatgaagtagttaatcttcacatcttaatatattaggaaataaaatggtcaggcaaatggtttgctcccatgcctatagtttcctgatccccaaatatggtagggttaggcaggagtcttacacaaaaaaagaatagaaaaaataatctttgcacttcccttacataatcacaactcacaaagtaaaaaaagtgtgctaatatggcatgcgaaaatatgcttaagagttaaaaccaaaacagactattgcaaagtgaaaaatctttttatctaaccttaatcacgggcgattcttttgtgacagagccaaagtcatagttaaagacaccaagcccaataatatctagagctaaacttgagaactctgcttcaagatccagctcaatagtttgtccaccttgcaagctctctctttctaggagcttatcgattttcaatattgttctttctgaacaagaagtaaatattttgaccatagtttccaggtacaaggaatggaatccgggagcaatgactgcaaataaataaatacatatatgtcaagttacaaaattagcctaaacaaattaaaacgacaaattacttgtttgttttccgtattcatatttgatgaatgtaataactaataacttaagcattcggtactaacttaagagaaacctctataatcagattatactgatggccaaacacaatcatactgttagattataatctacaatcattcaagataaagaacaaataagaattatttatttattttgaacagcccaagaccatttggaaaggaatcaatattatttcaaaagctagcatagagttacacttcttaaacttaagagcaaaaaactttgaattttactccctcacctcttctcctcagtttccacgtgtcaaggtcagcagggataagtccttttcccattataggttctagtatatcagcaagaactccctacttaaaacataaaaagaagaagagggaaaattttgttagaagagagaaaaacaaattgcaatacatatacagtaaaatttgaaaagcaaattgaccttgtcaaatgaaaatgcattttctcggagaatatgtcttgcaacaacaggatctgagactacaacaaaggcttttggtccaaaagcaagcttatacacagcaccatgctgccagagtaggcaaatttcaaagagcatgaggaagccacatatatacaagttaattgcttgaaaaagaatgattttcttttttgttgctgccaaaatgaatgaatgtaagaaaaaaaaatagcatttcaattgagggtgaatacctctatgaaccaatcatacagagaaaagaagaggggtctatcaaacaaatcggtgacagcaccttcagctataggcatgtcccctaagcttcccccacttaagaaattggtaagaaggttgcttgcattatctaaaaaatttctttttgttttcacttcatctgtactagttgattggcatctgcatttcacaagcattagattctgtttagattgacattctttgttatcaaatgctcatgatttctgggttttaattcctatgaaagcaacaataaataatgtttcatgattcaaatcattgtgtttcatttcatgttattttataaattcatattttgtcatgatccaaaagctgcttctttctttcttatgttgcttgttgtgtttcaaatatgaataaagataatgagaaaggaacaaaaagataaatcaagagctaagtcttaaaagcaattagctttcttcctttttcttttctcaaaatatatgtttttgggctgccaagagaacaataaacgagaaaaaattttaaacaccctttacaagtttagcttacattatagtttcagcttcctaagatacagaagtatcggataattcagtggaaacacccattaaaaaggccacaatcatcatctggatatcacctaaaagcttatcttaaatgtccaccaagtacttagtagtacctaccgagtgaagaaatagttgagagagaaaagaaaaaaaaaaaatacctgatacgatagctctggggtctgatttggtgaagattagtgggaactgaagagtgaagtgaacccaactcacttctgtgaatatgattgaaattcatgacagttgggggagagagataggagagagaagcagcagcagccatggccactgagttttctgagtagtgggttcagttcagaccacttacaaattctaagtaatgatgctttattaaaatggaaaatgacagacatgaattgaaaaaaactcaagttgtatattcatttggattggatgacagagtattgacatctttattgttcatgtcaaacattgtacgaccagaaatggttttttttctttttatggtctgcccactgaataccgaccatccagtaagtgaaaccacgattaaagaagcccaatctaacctaccctaaagcacaaagtatgcgtatttggagtggagataaggcaataatacccatcacaaaagtagcattttattcggctaccatgattttgagggagtggaagacaagattttattgtattctaattttaatgttgctttctcttttgatataaatgtatttaaggtaactagtgagtcagagttgtctttttagtttttagtttttagttttgagaattatatttttaaaagtaagaataaaaaagaatatcattttaaaaatttaatagtatttggttaaggttttttaaaattatttttaatttttttttactaaaaaaatacttcaatattctacaccataccatgacatgaactcatttaccctcgactcagacccggactcaaacccaaatttggatttcgaatcgaaccccaaacccagacccggaccccagcctaaacccaaacctaaacctggaccccgactccaaacctggactcggacttaaactcagaccctgaccctgaccttggatccagacctcgaccctagactgcgaacctcagacctgcaagttcgagtccaggtccggggttggggttcgagtctgggtttggggtcttactgcaggttcgggtccggatgcaggtcagagttagggttggggtttgaataaggttaaggtccagggtttgagctcgggtcttggttcaggttcgggtcctggtctagggttaggatttgggtcggggtccagttctagagtctaggttcgagtgtaggtctaggtccagagtatgggcatgtgagctaaaatgtaaaatataatatgttagacaaaaaattattttttaaaatagaaaataacattttaatgttttctgttttttaaaaatatttttaaaaattttggccaaacgatcctcattagtttttaaaagttattttctgtttttaaaaattgaaaacagtttttaagttatgaagtcaaacactctgtgagagtgcatctgctgcaattttttgtttttgtttcttttaatttatatttctattttttttgaaaatatattaaaaaaatacaattgaaagtaaattaaacagttagagaaattgatagttgataatatgatacaataaataataggaaattatttcatatactattttttaacttttttttaaaaaatttacgatttgagttgttccggtggtttctctggtagtttctaggtaggttactgtacggattttggttgcgatttaggttgctatagggattcggtgtggaattctgtaaaaatataaaaaaaaagtaaaaatgaaaaaactccttaataatagcacataatgtataaataatacaactaaattaaaaaataataatatttatcttttaaattataccatagccttttttttattataatttatgaaaagaataatgtcagaaaataataagaataaaaataataatatatttgtatactttgtgaaataacttaacataatacaaccaaaatatatcaatatataaaaaataaaaacaataaaaagatataggtaaaaataaataaagttcaatctatgcaataattttcaaaattaatgtactattttatttttagtattatttgacattgagtaatatttttctttaactcatatatatgaacaaattgctacttagtgcaattacagaacaaggaaacaaaagtaccactaaaaaacaataaaagggaaataattagaaatatctggaatagttaagagaattatagtactattattctcttaatactatgttaagcggaaaaaaaaaaaatctgtgatgaatattattttaaaacttatcttttgcaaaagttatagatatgtttgttaaaaaataattatattgtgtatttttttaaaataatacaaaataatataatatactcaattttaatattttcaatctgaagcaagtttttaataaaagtgggcaacatctagtctaatctaattgaactgaattgatctaatccaatttaattataaaaaattaaatatctaattataattggattggatgttaaaaattagattttaattgaattggatcggttactggatgtcattctcaaaatccaataaaaaacgattaaccgatccaatctaattacatttatatattaaaaaaaattatttcaacgagttttgaagctatttcaatgatctatcaagtcatgtctcaaacttcaacacaattcttaagctatcgacatcaacttttaccccaagggagttatgaaaataagctccgaattactagcagcaggtctcgatgggctccgaaaaatgctcatcaccaccataagctaattttcaccattagatcattatctacggtcaaaaatatctaatttgtatttttctcatatttttgtgagcctccttcacctataaaaagaacattcccttagctcatttttcactttcataaaactacctacaaggtaagcgcttctctctctagtttttctctctaaaaattggagcttctgacacttagccttttttctataataccatctcgtgagaaataaaaattcaaagtagacgttgctccattactatcgtgatatagggagtaaactactattaatttatcgtgtctctcttataattacttaactactttttattctagcaaactggtgtggcttagaagtctagtctaaatttctgagtcaacatgtatatatatgatgtacacataatacgaatatataattttttaggagatcagaaaatatacgatatatttctcaaccctaaaagcctaagttgtggccgacacacacacacacacactatctcatgcctctctctctctctctctctctctctctctctagatatttggtgtgttttttctcatctcaaattacagtgtctcatgagttgagtacacactgtaatataaaatttattcatctaattagtcatataagcacactcttatcatgagtgttgaggctgatctggaagaccctggtgtgaagtcttcatcaagttcatattgctattggattggatgatcaaaaatatacatgaaaagaatcgagaataccctgataggtatcaggagataaaaaattcttttagtttaaatttaatttatgtaatcatgttaagattttgagattatggttcatattagattcaactaaatattttttacaaaatcaccgcttccacttttttgactttgatatggactataaatgctaacatatgacgcacacataatttaatgaaatctctatgattgagaaattataacatatttgtctattttctaataatagggcttatttctattactacacatataattcacaatctactatttaatatactaattaattattaattttccatatctaattatgcggtcattacacattatgtcaggaacctttgtaaagaattattgaggatgttctccttccttatgttttgtatagtagaggccttcctttcttttcagcttgtggaatttctaccgtactgtgtagtgaaatgctgtgtgagctcatcaaacgagttaaaagatcattcgtttaattgtttgaaccataatctgttcctgtcagggtagtagagaaggccttgcatctgatcacaagattatttgtttccaacaccattctctgctcaaattagagcacatgctctaagggatctccttcgccatcaaacaatagaaatgttggcatcatgaagtctttaggctttagtttttctgcaatccattttgtcaaagtatattttactacagtttttatggttactttgtttggattgtctaactctacaattttttcttgcctatttttcgctataattttttttcatcatttgttctttccattgcaaaaactcatctctagattttctaaaccagaaggtttatattggattgtaactgccaaccaattctgagcaggatcacattctatctctttttgcttatgtcctcccatttgaaggaagtgtttctagaacgtatgctctgtgccagcaacatttctttgtattggctcggaagcaggctctttaattttggcaattgtcatccttatttcttcatgtacctctttcccattcattgttgtttctagttgatttcatacttcctttgttgtattttaggaaattttcacttgttgcagtacctactgaagtctatcttcgaccaacaatggctatgaattacttgttttccgatatcatgttgcctttatgttctatttgttggaaatattttacgaggatctaga

SEQ ID NO: 14438 - DNA, 7779 bp, Cannabis sativa
  modified_base (3853)..(3864): a, c, t, g, unknown or other
  modified_base (6236)..(6264): a, c, t, g, unknown or other
  modified_base (7731)..(7749): a, c, t, g, unknown or other
ccgccggcggaatcggccaactgagtccgtttcagcaacctagggctgccgccggggatgaccgccgcaccattgatccatcttagtaatattaaatcatcatattattaggtacgtacgtactacctccctcctcttgctacatcatcttcaatattcacaatgatataataatttttatatatatattaactaattactcattatttattcattgctttaattaattaatttattactattcatcaatttatttgttatatatatatatatataattaattaccaaaagtatgtaatactgaccaaattacggaaagcataattaatacgctttcaattttttctttagaaagtaattaataaataaatataagaaattcttaattaccaaaaaaattatttataagaaaaaaggtgtatcgattatatgtataagtcggtgctctggtgtgcgtgtgttcccaccttgtgagcttaagtgtttagggcttaattatatatacacacaatcacaaattaatcatttaatttcaaggtaattaaaatttagagtgttgaccgggtatataattaatttattaaattaatgcatgtgcatggctaccttgccttgtattatatataaatatatagggtcatatattatacatggatgtacatatatatatatatagtagatgatattattgacctttgtttcaacttgtctactgcagagtttcaggcacattcactatttgatcagggaaaaagagactctgaatcagcacgagagagagatatcatagtgagaagagagagaggtagtacgtattggtatttaatcttaattaaacatatatattctacttaatcatctaatacccgttatcaattaatttattatagacatatatatattgcaattttgttataaatccaaatattatcgatatatatctatatacgatacctgcagacagcatattaattatatatatatttccgtgcctccaattctctcaattaaatataccatatataatggcatacgtatacattataattatactacatgatctcaccatggtttccgtattaattaaaaagtatttaagaaacactagcatgcactgatgtttattttagtgatgactttaaatatggttattgatagtgatttttagttacgaaacatcagtgaagacaagattatatagtgacgagatgtcgccattgatatgctcatcagtgacaaaaaaaagtacacttcagttacgatcttttgtcctcactaatgctcttttttttttcttgtgtagtagtgttctttgaaaatatatagaataatttagggtgttaaaaaataaaaaaattaacacacttgcaaatgattatttgaactttactattttgaaaataacaaaaattaataaaatgcatggaaccggaaacaaaagtataaaatagtaaaggaaaaggaaaagtaataaattaaatatataaaagagaataagcatgataagaagaatataactatataatgtattgccaaaagtgtacttgcattgatattaattacagtagagattggaatatgatggtatatattatatgtacaagtaatatttatataactttaatattatattgaatataactatcatgtacatgttggtgaatataattatttaaaaacataataaattaattaagtataggcaattatacgatcatatttagatggagatgagtaggtagtatttgagtaatgtgtatgagtgttgtggcagaagttagcatgcatgcatgcatgaaaggccgttgcagaggaaatgtcaagcccatgcatagcctttatttattgtatatatattattcttctatcattttaattagtacttattattagtcatgaaattaattaattaagaaaacgtagtcaaatcatgaggagaggagacatagaaaaagagttttggggatttgtatttgaattttgatttgataaataggtttggttttggggcaatcatgacgtactttgcgcaatcatcactttccctgctccttcttctgctcccctccccctactcctactccttatttattactcttacccacatattattattattattaatatataaaagtattattcattcaaatacacacattattttaatatatctttgtttgttttctctctctctctctctctcagttaagatttgtcacattttttttttaagaaaaatactagatggttgacaatattaaaatttgtccaccataatttcatatcacagtaaattaatgactttttaagtaaaaaatgtcatgtaaacattgtttttattgagcaatattttatataaaattagtcttaaaaaattagatcatgttacatatatggtaagacaattccaatggacaactctgagatgctctaatacactccttgatcaattttatagtaatattaatgtaactaaatattatcatttttaaagaatatcactaatcaatcgtaaattactacctatatataaaaatataaaaagtactgcgtaataactatactatatatgcttctctctctattcacatagtacttcagctgaattgttgtatacgtactaattattgttaataataacaatccacgattacaattaatccatatatatttgtactttcacttgcatccataacattattaattaatttccaccgctataagtatacatactgagaattataatgaccttaattttaacacaacccctttatcaaattaaaaccatatcatctttatatatttatgattagtagtacggctatcttaattaatacaaaatgatcatgaattcaaataaaagattatatatatatttgtataaattaataccaataacatgattttctttaagtgatgatatcatgtatatcttttgtattttttttatttgtgtgtgtgcggggtgtgggtgtgggtgtggggttagtagaaaacttaaattgttttgaattttgcatttatttgatagtgccaacacacaccatatcgatcagttattattatgacaaatactactatttcctctttttattattttgaaaatattaaaggaagaggaataatatgtagaagtagctaggacaaagagaatattatatattaaataatatatttgtaaaaagtagttgatttgatgacttgactaatcctgaatctgaatctgaatctgaattgtattatgatgatgatgatcaggaaagggagggaggccattttgaccaaaaatcatatctttctttattttttatcttcttcttcttctttttctagcttcttggagtttggagtagtactgacacagttttcgatgatcaaactcatctctcgttaatttggcaattgggattgggaatgaataataatttaagcacatactaatactatattatactatatataatgctttttgtctccctcctcaatagtcaatcctcctcccccaaatcccatctttgtttttcttttctttaaaatttaaatatagtgcctagttactaagagtgttcattaaactgctcaaattgcataaatcgcccgcaccacaaaaaatatacggtttgaattttttttcgttgcagtcgcagtttgaatttaacctaaaaaccgcgcggtacagtgcggtttgcagtttgcagttttgaattgttaatatgcggtttaaaccgcactacaccgcatattataaaaataccaagttttatatttatttaggtccaatatgtgaaggtccaatccaagcccactaattattgtattgttgaaacttgaaacttttttttttcatatttannnnnnnnnnnnatggtatttttgacaagtgttactcaagttttaatgtatttgtgatagtttaattatttaatgatagtccaaaccgcagaaattgcaccgcaccgcactatattttgtggtgccatttttgcggtttttactttcgcggtgtgggtgcggtttgggaaattaaaaaaatcgcatgtacagattggtttgaaaaaataattaaaaactgcatcacccgcaccgcaaacaccaagctacctctcatcactcatcactcatcactcatgtttttagggagtttttattgttaccagtaatattttcacaaataattattgttagaatatgcagctcctacacactcaggatacaaaattaacacacaaaatggttctatggtatttttcaatttagttatgtatccacaactaaaatagtaaaattaaaaactcaatggcccaaaaaggcccaagccagaacaagccaagccttacacaggcaaaccctaacaaaaacaaattgatcactcagtctaaagattcgagaaacacctcaagactatgtctcttccaaaagagagaaaaactagggtttcaagatttcagaaatcgtctgcaatctcttagatcaaacacacacaacacagaaatcacaacacacagtatgaagagcacaaacatacacataacacaatagaagataatgtttgagtctgagagaaaacaaataacgcacagaagaagaataatacaacaatttgatctcatagttcaccctagaaagatggcctacgtctctgtcaagctacctcagagtgcttgatcttcatgaacacaatagaagatatggtttgagtttgagagaaaacaaatagcgcacagaagaagaagaataccacatttgatcttagagttcaccctagaaagatgggttacgtctctcagagtgcttgaacttcattaatccaaaccctagaattaaagttgaggggatatattttcttttgtatggtaaatattaaaattaataaagatacttttaccaggatttgaactcttaacctctataacatatataagatagcttaagaaacatgtcaaaactattattgtgtttatatttattacctttgataataaatatatgttgtaaataatcaaaatacatatatattttttaattttttttagggggcagttgcctctatgtggattgatccgtccatgaccagatttcaaatcacaacacgattgataatctatcttgatttctctcttagttttctttctatattttctctctttacttactaactctctctttcttttggtgtatgaatacaattcgagagcttctctctacaacgatggctctcacatgaataaggcttcaagtactcttcttctcttagcagtaggtctttctatagtactaggtgctatgctacaatttggattgaaaacttggtccaaattctggttgagcaaaattttctggttagttcttgggtttgttgtaactgtttttcttgttttaaattgtagctggtttttgttaagagtcttggtagagagtttgtactgaactttttttttttttttggtaagtagtttgtactgaacatttagcccaaaagatatatgtaattcccattgtgttaataattttatcttataaagatatttatttaacaattatgaattaatatcttcaataatgtaggaatatacttgtatttaaaatatttacctaaaaaattacaataaattaatatattaataaattaacaaattaataatttattataacatgacatgaatacatgataaagtatcatgatatatatgatttaaaaaatttacatttatttttttagtaaatttttggagtaagtggagtaattcccatttagtaaattttttacatttttacatttatttatttatttatttattttggagtaagtggagttgcacagtgctgcataatatcgttggcttgtattgtgagatatttgttttgtgttgctatgatatgcgcttaaggagaaagtctttgcaaccaaagtgaaattattgatttgctgggaaagaaatacaaaaataaaaaataaattatttctgacgacacaaaaaatatgggtcagacttaggttagcccatattattatgagttatttacggcataacctccttaagtagtcaggtttttgcaactaatccccaattctaaaattttggtggtaaaaccccctaaactcacgttctgttaacacttagccctttccatctatttttaggtgttaagtgccacattatattgtctacgtggacaatatgtacacatgacattatattattggtccacgtaaataaatatttaaaaaaaataannnnnnnnnnnnnnnnnnnnnnnnnnnnnaaaaaaaataatttaaaataaaaatttatctaaaataaaaaaatataaatcataaaattaaagaataataaaaagaaaaaaaaccctaattcccctaaatttctcttcttcctgtgctatcttctctcattaccctaaatctatccgtccaccaccattctgacccacaagaaactccagcgtctcccccatgtccgagatgacgggtttcactgtcgatgtgagggctcacacagttgaaatgtggaggaagtggttagaggaagtgggtcaacagagttgcccttggacgagctcaaagtcgacatgtggaggtttcggttgccggagacgacgaccaaagctcctaaagcaaccgttggagccatctcttagatttcaggcctgtggattcctgggaccaaaacccttcaggcactgacaaaataggggaggcgttcaagtcacagattccgtaaacaccacactctttgtaactgtcgcaatgatcttttggggcgtaccagaaccgactccaactttgactactttcgatccacgtgtatcgctcgagatacccagttgagttcaccgataaacgagagattattcagcttccttctgtggtaaaaaacgagtagtacacctgtttttgagtcgtgacaaagtcgaattcaagaccgtttgccggatttcggtaccccactgaatctttctccattccaaggcccgctgcaatacactatcttctgttggtttcgcaagaaaatttctgggaatccttggtaatccaaattgaaagagtaatcttcgatggaagggtctgtcgagctcctccacgaggttatgtatctattcacatcggttcttaagtcccatcctagcatcatacctggtaacaaagtatccgtgggaaaatcaaagctctgccacaagaaatgttttgggttatttcgtcaacaaagaccgtcccagcgaactaaatttagggcaatgagagaagagagcacgagaagaagagagaaattaaataactctattattatacgagttgtgttagattttattcataaaaataatttttttataatagttagggagcctcacattgataatatgtgaaaactaaatactatatataagttgcatcaactatttctctcattaccaaataattttcagatgatatctctgacatgcatcttaccaaacactcacccaattcaatgaattcttttccttcatttcttccaactttctttctctaattggttattatatataaaacaaagaggttactaagaatacttaagttaaaatcagatattaactagtctactactgcaatttatgtattttagaaacacattattagcattaagtaatcacattcacatgtatgtgaaaggtgtttggtgcagacatagtggggttcgccaagtgggcctttggcctaataaaggaggggaaacttacaaaaatactggnnnnnnnnnnnnnnnnnnnaaaaatactgtcacacagaaattttttcaa

SEQ ID NO: 14439 - DNA, 7117 bp, Cannabis sativa
gaaaacattgtccttaaaacaattatgtcacttacactaaacggtagaagagatctcccatcctatgtttgataagggtgtaagtaatctttgtaccatccataccagctcccttttctactgcctgttcatcacacaaaacagatgaaggttagatgacaaggcaatttctcagatcatgtaagacattttcttgaagtaagaaaccaaataacggcagtagaacttgcacaaaaaccaaatagatcacacaaataatatcaaagaactaacctggttggccaaattgtagaaatgaataatgttgcgcatcatccaaacagacttgtagaatgggcaaaatttgtcatacctgtatcaacaatgtacatttagaaacattaggaatggacccaataaaaaaacagaactagaaaatatggtaaggatgactcacggggtaaatgcattctgtgcaaggtagtcttccctcagaagtttagctgtctctagggtgatcttatctccttcagctaaagcatcctttcctacaagctgcaggtaacccaaaaatccatgttatgctcaaccattggtaaatgaaaataaacaaacccaagtctgctctctaaatcaggacaatagaataacggatatttttagacttgatttttgctgaactctgtttatttattatatcagattgagatgcctgtactctgaaaggcttcataccaaattaaccttcagcaataactctttctttcaaagtaagaacttattcagactagttaacatctcaccattaagttgtagttcacttttattaagactagtcataaggattttgttatggagataaggatcagctaacttagagtcatataattttcattgttttcatagtgtaatgataatatttcctgaaaaagctttaatgaagaatccaatgtaatcaacccaggaaaacaaaatcagcatagcaataaatcttacttgaacaatttcattcaaatcatcttctctctgaagcacttctcgtgccttggtcctaatattaataaagtctggatcaaactgctcatagaaagactccaatgcctgaatgccaacacacacagagatgccaaaaaaaaacatcagtagagctcgagcaaaagatagcaaacaagaaaacagcagtgaactagtatctttatacatcaccagactgaaaagatcatgaacataccgtggagtattttgagtaggaaataagccagttcacagaagggaaatgcttcctctgtgcaagcttcttatccagaccccaaaagacctgatagaacagaaaggggcaatgaaataattccttaaaaaaaataaaaacacaaaccacctgaggtaaattaccaaatagtccaaaatatttggcaatggggtactacaaaatataaaagtagatgttgcacataaaaggctattttgctatgtagcaaaaggaaaacttactgtgatagtgctatatctttgtaagaaggaaagagatagagggcatgtatgatatatcaaaatgaacaaacctggacaatactgagggttgcagatgtgacaggatcagagaaatctcctcctgggggggaaacagcaccaacaattgtcacactaccagtacgttctggcccaccaaggcatttaactttaccagcacgttcataaaatgaggccaaacgtgcagccagataagctggataaccactatctgcaggcatttcggcctgcacaagaagtaaaataatatccgatcagaaatagaaaacaacagacattaaaagttatgccaactgaattcaaaaactagcattttcataaccaaatcatgttatacagcaaattgaaaaaacacatctatgtgcaatattggcttcgtggttaaaggttaaatcttaaaactcataaaatgtaaggaaagaatattaccaaacgtcctgaaatttcacgcaatgcctctgcccatctagacgttgaatcagccatcatactaacattgtatcccatatctctaaagtattcagcaatagtgattcctgaaaattcaaatccacacaagacagaacatcaacttctaaacaagcatgacatgatcggtcctttctaagaaacagcagaaaccttactacacaaaagcatataatataaagctaagtggtaatatgaccgtatgaatatatctaccattttgtaaaaaaaaaatggtcatcaatcatgcattcagaccaaatcttgtttttagacttaaaagtacttacaaattatgttatactagtatacttcaaccctttaatacattgcttatgctacagtaccttttagtttttcccaatatttttattttatgttttaaagcacacgcacaatgtccaaaaacagtcttatgttactaatagttttatagtgtacctttattaagaagccacaaatattatagcgtccaaaacagattagtaacacagttttttggtatacattgatttaattacaagtgctttcctataaatttcagcctattaatatttaattctaagcattttaaggttcacccggaaaaaaagaaccacttagagatgtcatctcatagaacaaaagattttcttttatcattaatcttgttaaacaacttaagtattactgaaattcacatgttcagaagtgcgtaaattgcaaacatcgtgaatggaaatacttttattcgagcataaaatatacgtacatatatctagatcacaaaatcttaagtgttgggtatacaccctgctgctatgttcttatttcttacctgtataaatagaagcctcacgagcagccacaggcatattagaagtgttggctacaagtgttgtacgcttcatgacagattcctcacgaccatcaggcaatgtcattgtcaattgtgggaaatccataaggacctaataattggttagcttgaacaactcagcaccttccacaacaaaatacaaagaaaattaaaaacacgaaagatgtgagcacgtacctctgccatttcatttcctcgctctccacaaccaacataaacaactgtatccgagttagagtactgcaacaaaaaatgattcaataaaaaccaagagtttctgaaaatacattagacatccaaatataaaaataatgttcacctttgaaagtgcttgactaatgacagtctttccacaaccaaatgccccaggaatggcacatgtcccaccaagaactgaggggaaaagtgcatcaagcacacgctgccaacaaaaatagaacaattatacaatcataattctctgagtaagaaagtcacaataatttaaaaaaaaataatacattcattacctgccctgtaagtagaggggtatcagcagcaagcttcgatgcaacaggtctcggtgtacgtacaggccaagtctgcaggataaagtgcataaacccaaagttaaaaaagaaatgttatgagttaactaggaaagaagaaaattaccaaatggaatatcatagcagcaaagttaagaaacctgaagcatggtaattttctttgtaactccttggaactccagctctaacactgtatcctgcagatatgaatgaaacagattaacacaaccaatctttattgattgctcactactttagtatatcagcagaaatgtttgttttgtttcatgcacgtgtaaaacaattcaataattttaaaaatgaaagttctattacatttattacttgatgtttgaaacaaattatcaccctgtgactaatacaataagaagaatactaaggaactaaatttaatatgatatggaattttaaaaataataagaaacaaacctgcagagaatattgacccgctggtgcaatgtaagtaatctttcccatagcatctggaggcaaagcaacacgatgctccatgagactgttctcaaatacagtctgcacaaggatataaccaaaggatttacaaacaatttaaagacaagaaaatagaagaaatcaagtcctagaataaaatattaaaacttctgtacaaagtataattccacgttagaaacttacagcatacaagtctcctccagtaagaaggtctccttcacctgaaaatataaacacataatgattacaggaaaatcaacaaaagaacgagtgcaatgtacatatcaattgattcaaaacagctatcatcaaacaaactcataaattaccaatttttttaggctgaaattcccagagtatgtctttgtcaagagctggaacagccacaccacgaggaatgtagacatcaccagatattcttgcaatagttttcaaaggtctctgtaattttaaggtgaataaaaagtacagcatgtatcagatattgctcaataattgcagctttgaattctcaaagggtgtaactctaacagaagtgtgtaattaataaaactagggcatgattaaaaacatagacaagatagctaataagatgtagataattgagattatctgcaaataattaaaaatgcagccaaacctgaattccatcgaaaatgtttccaagaattccaggtcctaactccactgataagggctgagagcaaaaagaaaaaaacgtaagttactagttatctaaccagaaacaaagaccatagaggaaaacaaaataattggaaaactcactttgtgtgtacggagaacaggatcattcaccatcaacccagctgtttcctcataaactgaaaaaaaaaaaaaaaaaaaattaattcaactccattgcctcactaagaaactaaaacctaatcgaagaaagtttatattcttacaaaaaataaatgaaatcgaacagaaataattgaaacaatggacaattaaatacagaaaccaaacaaacaaaacaaagtaagaaaccttggattgtggcagaatctccttccaatcgaatgatctcaccaatcaggttgtcatgtccaacacgaacaagctcgtacatagcagccccggccatgccatcagcaacgacgaccggtcctgagacctgccaaatcacacgaatcagtccaaattcgaagttaaaaattttcaacccgctgtccgatgcagatttcacaaaagcaataaaaaccagtccaagctcatacgcagatcaccaattggatcaagaaaaaaagccaacagaattcaatccccctttactttaacactcaaatttacttgacgaaaacacaaaaaaaaatgggatcaaaatcaaagtagcgatcgttccactttcagaaaaacacaatgagtggaatgatcacagatccaatagcttcggaacaagcatcgaagaaatgaaatacaatcaaatcaaaataagtcatataagaacgaatataatggaaatttcaaagacgaaccttgcgaacgtaaccatactcgctctccttctccgagtcctcgaacgtggttaaacgggctccatacactgacggcattgttatttgcggatcgaagtgaatcggagttcaaattcctagatctgaggagttcagatcgaccaaaaccctagggttccgatcgaataactgagattcagagggataaattaagagagaaagaacgagagagtgagaagaggagagagattgcgtttcggtgattatggaggacgggctacagtttatgcaaactgtgaaggagagataatgattgggtactcccgagtctatattactcgttaacgtgggtccttcttattgaatggtatgggctacggtgggaccccagaaagaggggctcgatgctgacgtggcaggaggtaatggtgtgtataattcgctgcttcgcaactttgttcagattggtaaagaagccacttgtcgacgaccacgttgttgatttgtgatatttcctggaaagagcacctttcaggtaactgtccaaaaacagtaggtctccactctccacgtctctcttccttgtctttttcttgttttttaacaaatcccgaaaaaaaaaaaaaaaaacgtttagcgagagcaattaagtacttctacggagaaagtttagtttgagaatgaaattagagtagtttgagaattaaattagagtagccctctatttatacacatagtctaaaaaaaaaaattgattgaaattagaaaaggtttagaaaaaataatgattgaaaagattacttgtctatttctatttgtaatatagaaacttaaatatttaaacttcaaactgaaacacaaaattaaataataataaaaacaataattgaaatcataaaagatattggatattttccatgaccacaaaatttcaatctgtacattttgaatacgaaaaatccgtattgcactaacaaaattaaagttttaatggataacaatgaccacaatttattttattggacttgttttaaaatttaaaatacaaagataataagaaaattatttaatttaaaatattattaagaaatttagaccgacatgtcccattttatattttataccgacagtaaacaatattggcaaattaaaattaacatatgaatctaattaaattatattaattatttaggagttttttatttatttataaaaaattttttttaaaaaaaaaattgtattcatacggaatatacaatgcaatcacgaagcaatttaaatcgtaatttacattgtaattcacgcagtaattcagatcgcaactaacaaagtaattcaaattgtaaaaattaaaaacaaaacaaaacaaaactaaaatccaaaaatagaaagaaaaaaattaaaaaaataatatatggagtgatttctctattacttattttaattttatactatatttattaacttttttttatttttgaaatattaaagaaaatgagttttatatttttacacttcaaagaagtttttttttttgtatttttacgaaattccatacaaaaacctttatagtatctaacagagcaacctaaatcgtaatcaaaatctgtatagtaaaatcactagaaaaatcattggagcaacccaaaccgtaaattttaaaaataaaaagttaaaaaaaaaatacatgagataaatctcctaaagaatattataaaatttgattaaattgcttgcaaaataattttaatttaaatata

SEQ ID NO: 14440 - DNA, 2433 bp, Cannabis sativa
aaaaacattcacccgaaaagatgataataataataaataaaaatatatttttttggttttaatttcagttcgagccttcgtcttcgtctggtcttcctctttttactatttcatattcttctccgattcccattcagtaagtttctctttctgattcatttctttcaataaagcataataatctctgtaatttaatgcactgttagtggactttcgaactcgaactccccctaagtagtgtgaactgtactttttttaagctctttaattttctgggtaaaagttcaaacttttttccaagattctcttcttcaatgtcaaactgtaggatgttttttcttcttattttgatgttggatcttttatcagtaccacagctattgagaatttggaatttgttttctatctcatggtcaaatctctctatgcatattataaaatttataatgtaatagttttgtttgtttgctaattatggtgtttgttagatacaaattgtgacagtatgctatgttattgatgaaattaacgttttgggtgtgaacatcctttttggaattattcattactgtttctgtttggattctaagctttgatgtaagtgaatagaaatatagaaacttgacattattttatgtcttagaaaggcatgtcagttgaaaactttacatagaaatattttcacaggaactacagttgaaaattagattgtagatctttgaaattttataagtaacataattggggaaacactcttattgttttcatagtggatttggagaaagaaagtggagctgtagatagctctgttgaagtgggtgtgggttcttcaggaggagggccaattatgcaaccatatgttggtatggaatttgattcagaagatgatgcaaggagattctatattgagtatgctagacgagtaggatttgttgtgcgtgttatgcagcgtcgtcgttcgggtattgatggcagaactcttgctcgtcgtcttggatgtaataaacaaggtttctctcctaatcaaagggctgcaattgggccagagaaaaagccacgacccagtgcgcgtgagggttgtaatgcaacaatattggtgaagatggaaaaatcgggtaaatgggtggtaacaagatttgtaaaggaccataatcatcctctggtcatcactgctaatggcttcagcacagaggtgagtctttgaaagttttaagtaccttttgtgcctgttcatttgatattaccacatgtatttattacaataagttatatgagtaagcaaccataaaagttgtgttgatgatcttcggtccttcattgaacccttagtttgatacagcctactaacttgattccttgataatttcgattgcaccccttcagcattctacaatcttaactgtatgtactgcatttttagtactttttgttgttcttgctttatcactttttctcgtgtgtacataccattctttgtttatttacaaactgagtaacaaggctggttcaaataaaagataaccgaaggttctgtggttgtgctttcatgttcaagagattaagatccttctaatattgccaaatacttttagtagtcattttttcctttgctgaagcatgaaaaggcccctggaccttgtagctagttatctttatttcccgttcatcgattagcaaggagaacttttgtgaagtcactatcattaccttatttccatagattcaaatactctctcccatgttactttgatctgtttgctgggtacaaagacaatacaactatctactttgtagaaaccctactaaacctaattcaaaatagcttatttgatagttttctattatttgtgcagatgcttttgttcttttcttttccattcacctaagtttgtgtctctacattatgatattgatttacagggggataaagataagaaaattgaggagcttacaatggagttgaaacatcaggaacatctatgcgtgacgtatcgagaaaaccttctgagtttcatgaaaaatgttgaagagcaaactgaagaactctctgggaagatccaagttatagttgaaaatgtgagaagagtagaatccaaattgcaaaaacattcccgtcgtagataatcttgaaattaaattcaacctctctagtgatgtaccatattttagctagattacaatattaatcaaattcagctccactaaacattttagttatgtacagttcaattgggaaaatgagaattacttagatcaccttggtctagttttgcactcttttggggggttaatcatataaatggtttgttaagatatgttgccaaaagagatgaggtgatattgtgtcatgaccagtgaagaagagcattacttaaattataataaaaccatagtctaaaggaaaaggtgtttgaaagtaaagtgtaattatta

SEQ ID NO: 14441 - DNA, 10827 bp, Cannabis sativa
  modified_base (10495)..(10505): a, c, t, g, unknown or other
  modified_base (10572)..(10593): a, c, t, g, unknown or other
tcacagatcccgccattaagctcttcggaaccaatattcccttaccgccttccaactcttcttctgagacctcccactccgacgactctccgctttctcaatctcaattcatggtaccaatcacctcttcagtattttttttccatttccttctcaataccaatttgacttattatctaagattttatatgttctgattatttgattgctcaacacctaaaaccatttttttttctgttatttttatacttttgttctttttttttttttggaatctggggtttcaaagtgtttatttgctcaagagcttctgcttattagcaattcaaattaatttgctgtaactattttttgtgatgagagcccattcaagttcaagtcatgttcacattacactggatgcattttttttttagtgagattaaatagggtttgtaagtgttgctaattataattttatccttagtgggtgttaagattttagtttgtacttttatattagcgcctgaaacttgtagaacagtggctgattaggtgcacaagaatgagaacaaatttacagctcaaaagccaaggaattaattcctaagccactggttcagacctgcaatggcaatgtgtgatgatgtttgctgaacttggtcgaagtttgcttggacaatttaagcattagaacctttttccactaagtagtgccacttttttctgttaagaaatgtctggttaaattagggacatgggtagcttctatgctgtaaatgctttattttgtcatttttggacattcccaatttgtagttgatgctgttattgaagttgaaataccaagtatgcttagtctaacatatcaagcagacagaatcttttggggcagaatgatatttagaaaacaatgagttcttaaattttcaggacgaatgtagagaagaagcaacaaaagcagaagtggaggataccggagaaaggtgttgtgagcatgatagtttttcagactcagagggtaaaggaaatagttaccaaaatcatgtccaggagaatgaagtaaactgtaaccctgtagaataccaaaggagtgaaagtgaccgaagtagcaaagagaagattttgaaaaggccagacaagattcttccgtgtcctcgctgtaacagcttgggaacaaagttttgctactttaataattacaatgttaatcaacctaggcatttttgcaagaactgccaaagatattggacagccgggggaacaattagaaatgtacctgtgggtgctggacgccgtaggaataagcattcatcttcacagttacatcaagaaacaacaaatgattcagcagcagtagttacacaagaagacatcaataatgctaccagcgatcagtctccaccatccaatagatttcctgcctcagccagacttgacaatgggatggcagaagggttaaaatttagttcagagactcctttgtgtgaatctatggaaaccaagcttaatatcgaagaccataagaaaagtgaaatagaatctgctgcatttggagatagttcggaggacctatccttgtccagcaattccttgaatgcccattcttcacaaaatagcagttgttttagaagagaagacgacagtgctgaccatagacatccaatgcagtgttatcctgttccacaatgggcttatccttggaaccctggttggagtgttatgatggtcggacaaaatgacagcaatcccaatccttctaatgtaggtaccttgcccatggtgtcgattcccggtttttcagcaccaaataccccatttccatttctccctgcctcatattggggttacatgccaaactgggacacccaaaactggactcagccaattaatagatacagtggtaatatgccaccttcatcttccacagtcaacactaactcttcaagtaatagctcagcaatcttggggaaacattcaagagatacaaatatgcaggcagaagaaaaaacagggcagcgcctttgggtaccaaagacattgaggattgacgacccagatgaggctgcaaaaagttctatatggtctacgttgggtattaaacctgataagaatacacctatcataagaggtggtatctttaaagcctttcaacccaaatcagatgccaattcacgttcattggatgctgatcaggttttacagtcaaatccggcagctctttctcgctctcattctttcgaggagagcacgtaaaactcctttgtgacatgggagttattcctgtgttgtttggctacctgtcctggccttgttgattgtatggatacatagtgacattgttctttttgtcacagctacaatcaacttcagtcaagttttgaaggcaaatgtgacagaagctaaataaaagaactatcagatgtttttggatcttcataaataaattgtaatcaacatcttctgtaataatggcttcggagaaaactgttagtgattaaacagaagatgcagtacattacaatcacagttcacctttgaccaagaagatggcttaaatctaaatgccaatcaagcacagaaggaggaagaaagaatggcaagtcagctcatttggtcaacgaactcagagactacataatttgtgtttcaagttgactccatgagcttagggaaaagaaagaaaaaaaaaagatcttccaaacaaactaaggatattttgtgaatgggttttccactctatgcatcctgacttctatcagcttagatcaaaatagtagttatagttttttctttacttttttgtatccaaaattataaatcatgtttaattcttcacatggtatctctcttcctctcgctgcttttccaaaggttgtattttcattggattgtcatcatttgtttctggcaaaagataactactgattttagagataaaagaaggaatatggtgtagtattagtacctattagttattacaacataaaagttttgcctttggcaagaatgagaaggtgtacgtagattttaagataggctgcagaaagtttgtttaaaaaactgctgcacaactaagactgtacttcaagttcaggtgttcaagtattttactgtttttctttctttctttttgcttgatttctctcacaaatttgagatttacatatttggcggacctgactataaagggaactcgattagtgtagcacagttctatgtacatatatttatattactgaaaatgtgagacagttctgagtaaagaaagataaacataaggccagtttttgtctcatcctattactttttccatttcccacaagttaactttcatagtttttgcttcttacgttttcacatggctgaatgaaaataggtcccacatttttgttctttgcactgttttttcaggggattcctttgtactatgtgttaacctcagtagtcatttaattctcacaattccagcaaaggaagaaggtttcaaattctgtgtcttaaaacaatatttgcaggttgcagcaggcatgaattagtagtaattttacattgttaaactatgtgctcaaggtaagggcattctgcttcttttggtggaattcaatctgagtggtatatgaaggaaaccattagaactttgcgtgacttatgtttggaagttagatttttatgcagacatgaaaaattaagtaaaaatgttccaaaaaaagtatgaaaaattaaaaaataatatcaaatttttatgaaaaaatttattgaataactttatttcccatacaattatttcaccttgagaacttgatttttttttttcaacactttcttttttgtacattattattcttacctctttctttcctcaccgaaatctaacttccaaacataattttaactcttacatatttctctaagaaggaatgactacatctacactaatgacaatgtctacaacattttgttcattaattatgtcagaaatttgttgtcaatagtaaatttgttctaagctttcaaaaaaaaggaaaaaaactgttctatattatggaagccctacacttatcccatgtatatataaataaagatagagctagatcatcaattcacagagggaaataaaaaaaagatatcacaccatttaaagagctttacttatacactcagtataatctactgctattggagtcggcacataatttactgttctttagttgatggtaaggttgcaaagtttgcagttgccaatttctcaagacaatgagccatgtgactcttggctgttcatagattcccctctccctgaattctgaacctgagctgcgaattgcagagtccaaagaatatcttcgacggaaggcctatcagcgggctcactcgacaggcacctcatacatatctccatcattgtcatcagtgattcgtcggagcattgtttgtgcactgctggatcaacgatgcttcttctaccagtatcgtcggttgctatgcttactctcaactgcaatagagtagaatagttatcaaacttgtgcaaatttatggggtttgttttagtcagatgaattttatggctatataaagaaaacactcacaagatcttttagagaatcaacttccttgtagaacatgataggccttcctagaatgatctctagtaagataattcctatgtcatagacatcattcttatcctcatgtttcacccttcaaaaggacagaaaagatgttaaacaaagatggaacattaacatataattaactgaacaaactaagacatgacctttgaatgctcttacctatcttgaccacttccttttgttgtggaagaaactacattactcgcctgaaaggcacataaaagcaattaggaaaacaaccccaactcagaaaaacaaagttatgtgttcatatcaaaacttttaagtttcttgccataccattcctctgttttcagctaaaagtggaaggttatagctactgatcttcacatgaagattatgatctaacatgacatttgttattttcagattattcgagtacactccaggaacaatcccggtgtgtagaaactgaatgccttttgtaactccaatagcagctgcaattctctgtgtccaattgagtttcagtccttgagtacctgccaagcaaattatgtagcacaatctcaattattgcttttctgttaattatttaatatatagaaatctccaactgaactatggagctagtattataaatttcatgctgagaaagacaatcataatatgttgagatttatagcacaaactaaaatttctgaagaacaagtatcattaaccaagttttcagctcacaatgtccaaatctgcctttatagacttggccaaaggagactgagtcctttcgggtaacagtaacactcatcaaaaggctaaatattgaatattctagcaggattagtattgtatattttgtggcgctctaaaactaggagtttcagaagttgatttggaatgggaaatgactttacctgagatgcagtctcttagagttccattgggagagaactcgaagacgagaaatattctgctaacacctgaatcatcaagttggcactccaagcagtgtcctagagcactaattaaatggcaatgtcttagtttcgaaatcatctcaagatcacgagtataggcctgtggacttcgccttcttttcatttccaagcttcttatcgttatgagcgttccatcacagagcttgcccctgtacaactagagcaaaactttcttgtaaggcagtagaatctttcacaatactcagataattgagctgtttatggtgttttgatacttaatagggttattgagaatttcttactccctttaggattaagaaatgagtaccaaaacatttgttcatcaacaaaaaatggcaaattcataaccaaatagtatcaaaacactggccagctcacaaattctgggcctataaatcaatagataatctttagaatataaataaatgacaaagaagtatgtttgtatgcctattattagttgtttatgaactgttctaaatgttgcagaaatgtattaataattacttactgtcatttatgaatatctagtgtaaaacaaaaacaagactattcactatgaaaattgtcatacttgaccatttggactgtcccccatgaaagctgaatcatcgaagttattagtagcttccatgagctcttccaaagagaaagttctataagcaggaagcgaagctcctaacttcatagtctccgatatatgttctgcacaaatcaaaataaaaagaagaatcaacataaaaaggagaaagaaaaacagttgaaacttgaaagtaaagccttttccaattaataccaaaagaaaagtacaacttactagcatttgaaagtagtttggctgtgttaactgttgaaactctctctgtaatcaacgttgttgtaggttttttaagagtgtacttaccatacttcttcttaacaagcattgaaaccacaccaacaaccgctattgccccaactatcccaccagccaaagtgggtgccagaactggtttattatttggaatcttaggcttctctcttcttggtatgacttccacagccagagcttccttatggcagaactcaacagggtgttgctgtcgttgttcctgcttatcatgatcactcaacaaacagttcccagaatacaaaacgacaccgtccttaggaggcaaaaccagacaagaaggtaacttgcccaccaagtaatttgaggacatattcacaaaattaagaccagaactacaagtcatattctcagaaagcactccagtgaacttgttccctgaaatatcaaggtacgaaattgaaggcatagacagcaaagatggcatgaatggccctacgaactcattcatcgaaatgtccagcttctgtaacaagtaaaaggaggttatattagcagagatgcctaagcgaaacctgttctttctgagcttaagtatgactaattttctgggcaaagatgggaaatttggtccaaactggttgtcttcaagatcaagaacctgcaagtttgttaattttctaaagttggggattgacccagataatttattctctgatagagtgagaacccggagattcctcaagctccccaatgaatttgggagagacccacttagcaaattgtgctttaaactaagaacagtcaacattgggagtgagttgagccaaaatgggactggcccagaaaagttattgtggtcgagtacaatagtctgaagatctctcaaatggagaagctgtgtgggaatagcgccatggatgtagttagagctaatattgagaatctccaacgacgataaatggcctatagcaccaggcaatggtccccaaagcccgagagaaaccaaagagagaaccttcaaagtgttgagcttggccagagcagtaaagaaagaatgtatggagaagtcttgagacagaggagggaactcattgttgccgataatgtggagctgagttatgtcgttctcataacaaacgacagtgaaaaatgaggttggttcaatgttgcagaagtctgtgtcgtcgtttttcaagctgtttaaagctgggggaaagttgagatactgttggattctgagaagggattgagtctgaggaaggtcaagctggtttgaaggtttgactagtagaaaagccattaacagagtaagaagaaaaagaagaggaaaaaagactggtttttccattgccattaccattggaagaaagttgagaagacccaagttaaaaaaaaaaaacctttcagctgtatttcatttaagaatcaccgctgtcatgcttcccttttctgagaaagactttggttcttgagacggcattggcattggcattgttaaattatgtggtcacagaaagagttcacgggtttgcttagaaaaagaatgaaaaaacagagtctatcaggaaggacacttattataataataataataataataataataattcaaggtaataccatattttataaattctattttgcaaaagttacaatttatatattgttaaatgataaattaaactttgtattagtattctgaattattttttaaaaaaataaaattttaagtaataacctaatatagagataataagataaaattaattatatttttacatttatttgtgctaaaatttatttttaagttaattgtattaaaataaaattatctaaaattaaatttaaaattctatctatactattttaaaaaatatataatttattttattatttaacaaaataaaaaaaataattaataactttataattttataaagtataaaaggtattttttttaaaataaataagatcaaaaatagtattaagtttttaatcctaataataatatgaaaataaagttggaaaagcctcttacacagaattcaccacgtgtctctgctctcttctctctgtctgactagctcagttcatactattaaagaatctctcaaatcgttacctctatattaatgctataaattaataaatagcattgatttagaaatttaaaacaatttaaattcaagaggacgatctagtgattatgtgttaatttctcagattgttaagttctttaaacaaataccatctgttagtaatagattatagaatagtttactatttattctaaaacttacttcccttttgtattcgaaaagattaaataaatgttcataaatataagctctgcaatgtcagtacacatacataggactaagagtttcttattaaagcgattagacctatatttatgataaccgtacttgaatatatttgcttgggttcatttcaggtctcaataatataaataatagtaaatgcatttcatttctacaagtgtaaatgttttgggtaaaaaaaaaaacagtattgctattgtgaatagtgatatcctaccaacaatactttttaacaattttaaaaaataaaataaaaaaaaaaacaatacaaaagaaaaatgtaacacagttgtaaactaatataaaagattggttggtctcgtgatgaatcaatgtctatcgttattacggggtctactaaataagtttccttttctagaaatatggtattcccaatctaatttctttccattcattagtcattaccaaaatagacaacaatttttgttattatcactttttcttaaaaaaaataataatactaataataaaagaaaaaaaaaatagtaatttatttattgtatgctcgaaaaaacatcgaaatagttagcaaataaattagaggatgtagaatttaagtttaatagagataattaatcatatacattacacacagtagaaacaaactacaattattataatattggagcatagtatagaatagatgcttgctcgaattttatcaaaaacaaagttgtaaggaatgtctggaaagaacagtgcacaagtccaatgaaaatattagctaattttttagtaaatgatctcttacagaattattatatatattaataaatatgctattaaattaattttctgaaaagtataaaatccaaagcagtcaattttgtatagagaaaaatccaaattaatcagcaatgacttttcctttgtgaggacagagagaaagaaaagcaaattgtccaatatgagttataaaaatagactgattggggtatttcaagtcacgggtacctcataaaaaaagtaggttcattttacatggaatctttatgtttccaattcaaatcattttcatatatattatttttccaaaagaattagattgtacactttttgttttgggtgaatgtaattatgctgtagaagggtctattcataattaaataaaattatttataaaattttacaagaattggtgttattctttctttgattaagatatttcaatagaataattgaataaatgcaatcacttgaataatcattatctctagatcttattgtgtaagtacgaggataacaacagaagaaattatttgatgaagggtttaagagtagtacttattgattcaagatcatctataataaaaatgttgtgatttgatgaaatttatttatttttattgatatttttgatttttctgatattttttaaattttctgatattttagtatttaatatattttctgatatctacaaatgttcacataataagtcggcacaattattatggaaaatatcaacttttttctcactacattctattgtattcttcttgaacatagaatccacatcaaacttctgatctggacacgatattattataatgaaatcccttgattatttatgagtatacattttattgttttttttttcaaatggaaatcctttattctgcaaacacaattacgtagaattagacaagtcttactgcacaaggaaaaattatccaaatctacctagtactaatttttgtattgcatggtaacacttgtattttttaattttttaatcacaannnnnnnnnnnaatttttgtttttaaaaattttgtttttgaaaaacgttaatgcgttttgtaaccacttttatttttnnnnnnnnnnnnnnnnnnnnnnaagtgtgttctgtaaaatttattttcattttcattttttgattttatttacctcgggtctagatccggtgtcgaattcgagttaagaataaaggacgggttcaatgccagggccgtgggaggatttgagtctgggtctggtcgaagttcaaaatattgattaacaaaaaaaaactatttaaaaaaatattgaaagtgattttttaaaaagaaaaattgattctcaattaaaaaa

SEQ ID NO: 14442 - DNA, 10279 bp, Cannabis sativa
  modified_base (56)..(73): a, c, t, g, unknown or other
tacaactagcgctgcaaccactttagaaacccaagccgtaaatttgaaaaaaaaannnnnnnnnnnnnnnnnntagtatataaggtaattcccctacaaaaaatgtaccaaattttattattataatactggatcaaattattattaacttttattttgacgaaaaatcaatttataatattattttatatcattttgaaaattacaaaatttaacttaacatttaataaaacagatccaatcaataaaacacaaaattcaaaataatattcacccaaatttttcttacttagaagagaataatataatgaattagtcatggaacttgcttttgaaattgatactattactagtactaatgttgtttccatgttgtaggtgagggtaatcaaatgggtacctgcccatgtaaaggatatttatgtcatttaccaactccaaattttgatagttgaaacttgaaactaccataattggcccccttttccacacttggcaattcatgtggtgttgtcgcacatgagccagctaacttttactttcttttttcccacaaagtgcagctaacttttatttatttccattaaaaaaattatatgtatttatttgtaaagggtcatatccaaaaattacaaaacataggattatacatgatgatttcttagttaaattttgtacaacgacttattactgtttctctttagaataatgaacttatcatttaaataataattgaataataattagagagtataaagatgatataaaaaaaatttatcaaattaaattttttatcttgtatacacaactaattcatgagatatcatagaataaagatactttaaaaaaattagtaactaaacttgtgaaatcacataatgatcatacattagtgtaaagcatagagaaaagaaagctcaataccaaattacaattaattttaaagtgtaaatgtaaaccgaataagaaacaggtactctaaactcgcatttataaaatttgtttgaataattgtaagaactcctacaaaaatattataacaaaaataagtgtccaacaaaataaaatatacactataaattaataaatctaaattgatttgatagagaggaatagaaaatttttctcatcaacaaaatttctagatcttcattaaaattttttagatagacaacaaatcaataacattatcttaacatcaaaaccaaaatcaatttccatttaacactgagaaatttaatatcgaactcgagcatacataaaatacaaattattactatttttagaattgcatatatattttttctttcaattatctcggatttattttgttttgttttatatatatttttaaacaaattacaagcagcgggcattcccggttcccggtaataaaagaatgagaatgagaaagacagcattttgaacaagtgagaagccaatgactgggactgggttggcgttgagaagctttgtcatggtgggcttcttcttcttctccactacttctatgaaaaggtcagcttctgttgatgctcacaactctaaaaatgtgactttttttctgtgttatttttttctttctcactgggaaaaacataccctttaaatatttcttctctggttatgggttttgctagacttttatgctgaattttggttctttcagtttctagatttgtgttcatatctgggtatctgtttatttctttcatttttggggtgctcatacggtaactggtttacaggaaattgaacgcagttttggaattgttaagcttttgactttcagtttgaaaataatgttgtctttattctacatctaagttttaaagctacttttctttttcttttttggattttggtcaacagctagaaaagaagagctcaaaacccagaaccctgagttatattcaagttatctgaaatttggaaaagttgtgttgtgtgcacctggagatttatgatgaggctaaagtttttataatttgtctacatgttggacttgaaaagagtatatgtatttgatgatgtcagaaatgagtgaagttcatgaagaatacagttttcttagaggggaaactttttgttatgaatgataatgacttatccaatttaaagaagacactaggagagtctgatgatgatgcaatgagaggagtttggaattaaaaggttagatatctgttgggtaatcctaagagttcaattgggttattttgatatggaaatagccaagagtgacagcgttaggcagctttcaactaactgttacaaagtggcgaacctcggcgagacaattatggacacaacccgtgtatcaaatttgaaagataagtacattttaggtgaacaattgggatgggggcagtttggtgtcatcagggcatgttcagataggtttactggtgaggttttggcatgcaagtctattgccaaggatagactggtcactgccgatgatatgcgcagtgttaagcttgagattgaaataatgactaggttatcaacacatcctaatgttgtaaatctcaaggcagtttatgaagaagagaattatgtgcatttgttaatggaattatgcgccggaggggagctttttcaccggcttgagaagcagggaaggttctcagagtacaatgcaagggttatttttaaacatttgatggaagtggttaagttttgtcacgagaatggtgttgttcaccgagatttgaaaccagaaaacattcttttggccacaacatccttgtcctcgccaattaagttggcagactttggccttgctacttactgcaaacccggtatagactttggcctttctctctttgtcccctgttatgttacataattaactaatatccctccacaatttcacgttttataatcacctatgtttatatgtctacagggcagaaattgcagggaactgtgggaagtcccttttacatagccccagaggtacttttgggaggttataaccaggctgctgatgtgtggagtgctggagttattttgtatatacttcttagtgggatgcccccgttttgggggaagactaagtcacgaatttttgatgcagtgagagctgcagatcttcgattccctcctgattcttgggatcgcatatcctcatctgcaaaagacctcatcactggaatgctttgtgtggatccttccaaaaggctcactgctgaccaagttttaggtaattggttttatttatttatttattttgggtggagtattgcattatgcgaatgcgtgattctgctataagatttcacaaacaataaaagcttaataggtgaactgtagaaggttagcagttataagatctcataacttttccactgatactatcctacatgtaagaatctgtaaactaaacacctcctaatattaagtcacaaaaatcattcccgaaatgcttttttggatgtgtaatatgttcgtgtcatattcaagattttcattgagggaagtttctaggcatatacaactctcatgctagtcatcagtttgctaggctgggaaaattctattatagtataattcctgcgctgcttggaggttcgatcgaacagtttagtaactgtctcattaatcaaatatgtacttaagtctctatgcactttggcttttctggttaaaattgtaaaaccaagcttttattagtgtgttctttaacagaccaacacgtgttctatcctattccaagctttgcacttaataagtttgcaatcatttgcagctcattcatggatggagcactgcactgaagctgcccaagaaatatacgatcaggagtacgaagtttgcaatgaattggaagtgaatggtggttctttttcgactccatttatttccaggacagaggaatgtgcagtcaacggtagaccatgcacagttggtgatggaaacctgaaacaatcacctgcattcatttgcagatcatcttttgtttctttcatagaggatagtgacactctttgctctgcatctggaggtttttctttcaacagctgccaggaatccagtgtagctgagttttcttccccaatttcatcaatgccaagctttacctttttcagtccaatgtctactctagttcaaggaagtatttcattaagatttgaagccgacatgccatcattggatttaccatttacaggtacatgcttcttatttattctgactattgatttcttgtcaaaaactctataaagttattaccttgatgaataaagctggtattgttatataaatgcagaatcaaacttggagaagtgccagctaatagcgcagcctgatttttcgcctgtcaagcggggaattggcgatgaagaaatggagcgtaaagaaattcgacgaggaggaggaggacctggtgggacaaaggttggaggtattcacagcaaaaggaataacacgattgggctcggcgagtttactcagattaatctcatcgtgacagaatcagtcatccgttgggcatcatgcacggatattccaacagcaccatcccttcgattatctcttgtttgctagaagattaattttaagtacgttaccaggtcagccaaccagccagaacaaaaacaaaagaaaatatttacactcttttggaatctatctaatggacttgatgagaagaattagttcaacctcaggagctggacttaggtgtttaagcgtgtttgtttactttgattagtactagagtaatgaatgcttttctgttatggaaaataatttatacttactggtgtggtgttctaatatgtaaggcaatttctgacaaaaaacaaattgtaaggcaattaattgtacactatctaatttatgatggcttcaaactaatatctgaaagaaaacatttcaaaaaaaaaatatctgaaagaaaaaataaacactaatatgtctcattttcttttcaatacaaacaaaaataaaaagtaaaaatgatttctaaaagataaaacatcaaaaatgcgtctgccgggagtcgaacccgggtctattgcttggaaggcaattatcctaaccgttggactacagacgcttgttggtagtaaatttataaatatttatttaattgttgatttatctttccttgttaaaacatctaaaagttttgcctttcacacggagttcatatagtttggtgaaattattacgaacgacaatttggagtaatagttcatacaaaagggtagatgttataatcgacgagatgaaagatggtttaactatagtgactgaataagaataagtagaaaaaagaggtatacatgcctcaaaacgacacaagttaattgaaaggtaaacactaaaccggccttgagtacaaaattataagcttgcaaagtatcactaacatggttctcttatggtacaaaattagcagagcttctctcttgagcaatacaatattttttttatcaagaagacaccctttgctttctgagggtcactagaaagagcagccaacaagaagcctctctgaaaaaatttaataaacatactaacagtgcaaaatccatgctacctattggtacattgttgaagctgaaggtggtgcaacaaacaaaatatgatgttgcttattagctactcttacgatgagggggcataatcttggattgctgtcgcgagtttattacgatcatcctcagttttcaatctaatcaaaaaggtacgcgccacaacctcactgctatcatttgcattatcgtctccctgcaaaacccgacaaggttgtttttcgaagttagcacgactcgttttacagaacatgatattaacagttagtatttagttatccaaacccagtcaaataaaatggctttcttgtcggggcttcatacttaagcaacagaaatagataaaaaagagttttgtagcatcatcaactagtcacttagcgacctcaagattgaaaatgaaacaattgggaaccagggcataagttcatgtctgttcagtgttcttgcataagttcagcaagttttttatgttttaaagtcttaaggtgtataagttagacagtggccatatggtatgtaggtcagcagaaaggaaaaacattaaagttaaaaagcatgtgcaaagatcacttactgcagtatgaaatattgcgacaatggaattcttttgtgaatttgtcttgatgcccgggtatatcaaggcattcagcagcaatcttcctatctgagtaaatacacaaataagtaaaaggaaaaaatgtgtcagtactgctctctataattaaaattaaagattttagtaactcttcccaagggaaaaaaaaacccaaacaaagtggggagaacaaagaaaaagaccatgaacccagaagagatcttatctagccagatcagacacattttcctttgatcaaatgataattcaaaagatgctagtacaagttgtttttaccactttaatcccccacaaatttcaatgtcggaacttagaaaggaagattttgaaatgacaaatgaaacttattaatgaagccacatggtgtaaaatagatggaagtagcgtttgcaagaaaacatacatcgttgcgaactataatggttggtttggattcttttgtgcccttgctaacaccctctttgcacttgatagacagctgccctgggcctttttctttccaatgatctttgtcagcaggatcatttgactggatacatgaaaaggaaatccagaaacaaaacatatttaagggaaaattagaatgcttatggatagaagttaaactttcccaattatagaaaaatgcagctcattgttgatcttttagtacagaaaataattgtagggtgatacatatttgtgcagaaggaatacacaaataatgttgcataatcatttcatagtacatactgaacaaaaatataaatatgcagctaagactaaaatcaacagatgcctttttactttccagatcatatatttgtctttctgtcactaccttcacataaagtttgcacttgacttcatggactacaacaacaccctgttcttcagatttcttaacagatggactgctaggtgcctcttcattttctgtcataaaaataaaataaaaaaaaaaagcatgtaaatttattctgaaagaaaaagtggacagaattttcaagaggacacatattgtcaaatggtatgcctgagaaaactataaatattatatatacaaatatttaatgtcccagaaaccccaaaaccacttatcaagcttgatttgaaactggaggcccttttggaaacacgaaactcatggttattcaatgtgcaagttccctaaatatattaaatcccaaagtataagagagcaaactttaggcttgaatcctaacacacaatgcataagcatgctcattttagtaatttcatacatagggcagtccggtgcgtgctttaaaattgtcaaagtgaggattcaaaactaatgcatgcattgacaagacaagctaacaacatctacttagtaaccaaaacaatttaactgaaaacatatccaatgtttaacctgcaaacaaaacttaaattaaatgtaaaaagactaaaagtctactacttcacgaacttactaacccatctaatttatcagcaattggataattaatgaaaaacaagaaacagatcactgaaagaaaaggaaaacaagagtgtcctaccaccgtcatcatcatttgaagcaccatgagttgtgggaactgaactttgatttcctgcaaatgaattataaaatcctaggatgtcaaattcacgttatacgaactactataggataattgcattgcagtatcttggctataatttgttttttattagttacttcatatctcatgcagatgagctcttagttcatgcatgcaagagctattaatccacgcaatcaaccataatgttactaatacttaccaaacgagagcgggctttgactacttgagaacaacccaggactcgtactgctagagaataatccaggggtttgactgttcgagaataacccagggctttgactgttggaaaatagaccagaactttgattgttggaaaataggccagaactttgattgttagaatatagcgcagggctttggctgttggaaaataatacagagctttggcccttggatgatactcctgagctttggctattggatgatactcccaagctttggctattgaagggcaatcccgagctttggctattaaaggacaatccagagctttggctattgaaggatagtcccgagctttggttgttgaaggatattcctgagcttactcctaagctttggctggtggagaaatttccaaagctttgactgctagagaaaacccccgatccttgactgttggagaaccctccagagctttgactacttgacaacaaaccagaactttgactatttggcaacaaaccagagctttgactgttggacactgctcccatcgaattctgattattgaaaaatgtcccagaactccatgaagtcccaaagcttgttgtagttccaattggaggaatccctgtttgtgcctgaatgaacttatttgcagcatccttggtttctgacatattaaactttatagcggtttgcgattctgcaggtgaacattctccttttgcagcattcgctttaagccagctaacaacatcagtgaatttctcctgaaataaaagggtgaaatgagcacatctttttcttcttagcaaatcgatcgcttcgcatgtatcataatgacccacaagacttcaaacctagtttgttacgaacatcaacttttttcttaattatgcatacatatgatcatcgacacacgttgattaagggatttattggaagatttgcagagttcaaaatcaatcagcaaaccaacaaaaaaaaaaacgaagccagcattgtcatccttaacaacacaaactagaaaagaatagcatgctatttgtctttatcaagaagcttgctaataatatcatatgtaaatcaaactaaccaaattggtttctcaatctaattttaccgaaccaccaatagacaatgtaaagcatgaaaccaataacatagcaaattaccatgatgcttgaagcatgagctaagtagtcgcgggcaccatcttcccatagttcatcaggatggttcttcaattgtgcttgcacccaactggaaaagatacaaaaatggaaagaaaaaaaaacaatatgaaaagacaaaaagtcactaaaatgtaaagcatgtcaacccaattgcaaaaaaaaaaaaacacgcaaaagctagtcatgaatttagagtgttacataagtacaatactaaatgatgacggaaatatcacaatatcaacagaagaaatgattgagaaccttgcgaattgggtgttgagagctctcacatgctgccgagatgactcagctcgttctaaattcaaaggaggtgtggccattgattgctgtttagatatctccgtcttatgagcatcaaatggagatcctactattattcttttattccggaactgcatcatttgtcaaaaaaataaaaatctttataagcatcaactactgcaaagaaacgaagaatccaatagatattcacaaaagtgagtgtcaaatacgcacagaaagatgaaacaactctatcccgtatccattctattcctgtcttacagaaaacaatgattatcagctataatcttatctcttaatgattaacactatgcacatacgccttatgaactggtaaatctcactcacacattccaaaatcatgtaatttaatactccagaaccagaaataatcaaaataggtcaagccaatgtcgaaatttaagtaaaaaaaaaagctaacgagaccagcttatatacaactcaacagtgctcccgctatatgagtgtgtctgttttctcagtgccggtcagtactcctaactttatattagttaggcacacattataattaaacaaattagaagattgaggtcaagatttctacttaaataatacagtacttgaccaaaaaaagaaaactttgaagattgacctaacacaataacaaaatttcaaagtcctctacttcaaattaacaagctcagttgtatgtctactacattcgtgtagattcactaagcccccaacttatttgaagagcaagaaaacccagacaaaagcaaacatttacattgaatcccgatagcatgttgagctcagctgtatcgtttgttcttccaatcaaaaatttctactttttctttttctttt

SEQ ID NO: 14443 - DNA, 6971 bp, Cannabis sativa
  modified_base (66)..(83): a, c, t, g, unknown or other
ttttaattaatctcgttttccataaacctcgttgattagcaatgagctgcacaacatgtttaaaannnnnnnnnnnnnnnnnngttagttagggtgttacaactgctctttccacatatccttattgtttatttctttaaaacctgcaaaaatcttctccttcaacacatttttttcttgtttatacctcaacttgtcacattgaccagaacaatcaagtcctgaagccaaagcaaattcctcaatgctaaaccttagcattagacaagaaatattaaaccacatctcattatcattcggctcgaccacctctctcaacaactgtacaccaattggtgttgcaaaacataagaagaaagtctttaaaagaatctaaatacagtttctccacatatttccttatgttcagtggataaaatagaattaagagtctcaataattgtataacaacatgtacaagtaactcagaaagtttgaaaatcttccttacataaattgttatcccataacttaaaaaataaaatagtaataagaactaaaaaataaaataaaaataatacataactagaaaaaaaaataacataaaaacatatcgaaaggaaacacacaacatataaaactaaaaatgataacaataacaaaatttattttatcacaaaaaatataattataacaataataaaaccaaaattaaaaaagcttaaaaattttgaaagataaatcttgccacctatcaattaaggcaacacattgttgctcaaactgataaaaaccctacaaatcaaataaaaatttaagaaaaacatgaaaataacagaatatataacaattgtttgtaaaaaaatcaaagaaagaaaacccctaacatcagataaactaaacattcaacaaaaaaaaacaaaatataaaaccagaacctctgattgtattgttataaactaaaatataaataaataaataatatcaagaacaaaagataaacaaaataaaaacttaaaaaaatcctaaatagaaaaaaaatatgtaaataagtaaaaaaaaaaacagagtatatacgaatatatttataaaataaacaatgaaacccataatatcaaatcaagaaagaataaacaaaaaataaattaaaaatcctaaaaaataaataaataaaaaataagagagaataacacagttacatgtaaattaaataatgaaatacataacactagatcaaaaaaaaaaatcaaatatacaacagagttgggtttcaattgtttaatagactttttttttggatttcttaggagaaggtgacaacgaagtcgaactcaaacggtaatagccattactcaaaaacaaagaaaaaagaagaaaaaaacgtaaaaaaaaagagagagaaaaaaaagaagaagacgataatgagacgaatgcaacaaataaaaagcgaaaaaaaaggaaagaatgagagagtgatacagagagtgggccagagagtgaataactgggagagaaacgtttatagtgtatagtgattgattggagacatgggagagaaacgtgtaatcagtttgtttgattgcatcaccaaaccatataaagtgtaaaatttttaaataataaccgtatattggtttaaaaaattgctaaaaataaaaactgaaacttaaccatcgtaaaaaagtttaaaatgaaaaaaaaaatagtaatttgtgtaaaaatcctaagagagtacataccttatgaaaattgaaaagtcaaaacaaaaaataaaagaaagaaaggctcctctactgtgcaactacactattagagaaccttacttgaatcttatggccattcataattttttgagaaattaccccatatactattttttaactttttctttaatttacggtttgggttgccctggtggtttctccggtagtttcaatgtgagttgttatgcagattttacttgcaatttaggctactccgttagtttctatggctgaaattgctttctctcaaccacaagatcaatgtgttcgtagatggtctcggtttagatttgaacgattttcattgaatgataaggagtgttctagtattatatcgagttgctggtgttttaatgaagatgatgaactttttgttggtcttgtttcgtgtttggagagatgtgcagaacaattactaggatggcaagttaaaatagatgaaaaaggatatatcccaagctcagcagaaagttcagcagctaaattctacaacaagttcatgccttgatcattctcaagctgtttaatcggttgaagctattttagatgagttattggccaattaagaataatattggccgcaacgctcaagagtagaatggctacagtcggaatatcgtaacacaaaaattttccactcaaaagcttcagcttcgaattcaaacaataagatcaaagctcttcatgatgatgatggaaatatcacaacttttaaggaaagagtttctaagatggttgttgattatgttactactcttttcactgcactgaagaggaccactgggctttatctcatatcttatccacaattccaacaacaattttatcaaaacaaaatgagtttttattaaaatattttacagcttctgatgtctttgcacccttgaaaacgatggggtctaacaaaaccataggtattgatggaatttaggtatgttttattagcataattgggatattgtgggaaatttggtaacaaaaattgttctaaatgttcagaatcatggtggtagccctgaagtttttaataaaacactaatcactttaattccaaaagtcaaaaaaccaaaaacaatgaaggattttttccccatcagtttatgtaatgttacttacaagataatttacaaaattttggccatacgcttcaaggaagttctccactcagttattttcaaaacttaaagtgtatttttttccaaatagattaattacaaacaatattcttgttgcttttgagatggtgcacaatttgaaacataggaaaagaggttcgaaaggatatgctgctcttaagcttgatatgagaaaagcctttgatcgggtcaaatggtctttcgttgcagcagttatgggaaagatgggattcaatatttgatggatatctctcattatgacatgtctacacactaattatttctcgttcctcattaaaggtgtagtgttaggatcagttattcgtcaccgaggcttacgtcaaggtgatccgctctctccatatatcttgctaatttattttaagggtctttcacgattactccagtatgaggaacaaattggtcgactcaaggggatggctgtgtctcatcgttctccaactatttctcaccttctatttgcaaataatagtcttcttttctttcaggaaaatgaacgatcttgtggatcgattaagagagcacttgatatctatcatcgtgtctttggtcaacaattgaatacagataagtctgtaatatctttctcacctaatacaccaacgactttcaagaattctttttaacaaattttacgtatgctgatttgtgaatgtcacgaatcatacttgggtcttcctgcttataatgaccgagacaaaacacagttgttcagtaacatttaagagaggatttggaaagtaatgtatgcttggaacgataaaattttttcaataggggaaaagaggttcttttgaaagttgttgtgcaattaattcccacatatgcaatgagctgctcccggttatcttctatgctttgtaagcagattgggactatgatgaccaaattttggtgaggatcgacattggacaataagaagatttattggaaaaaagggaaatttattttctcagctaaaatggaaggtggtatgtgtttcagatcttttgtttattttaatcaagctttattggcgaaacaagcttgacgcattttccaaaacccaaatactttgctaggccgtgttttgaagggtcgctactgtccaaacaataaatttttgacagctactagtggtggtttgtcttcatttacttggcaggacattatttggggtaaggaattcttagttaaaggcttgagactaaaagtttgagatagtacaattataagatgtggtttagatgcttggatttttgggtattctatcttcacaccactatgttatactggtagtgacttgaataaagttttagactacatatcaaccaatcgtgagtggaatttggagcttttaagaatggatttttctcctacagatgttgatcgcattctcacaataccattatctcttcatgctaagaatgataggtggatttggcaccacaatggtactggtgattactatgtcagatcaggttatcattttgcttgtactttagaggatcgtgatttgtcttcaagctccaattcacaagcttcatcgtggaaaatgttttggggtttaaatcttccttcctaagtgaaattttttcgatggagggttatacaatcttcccatccattggtgaaatcattatttcaaaagaaaattttgatttgagccacttgatccttatgttcaactgcttgggaatcaataggacatgctctattttcttataaccatgccaaggcagtttggcaaactactagtttattcataaatttccgaagagcagaatatatgaaggatggtgactaccttattcatttgtcaacagtcttttcaaggtaggaattggagaaaattatatgcataatgttattttttggtcagatcaaaacaactttgtacatggtaaacaggctaaaaaaaccagtccaaattttgccccaagctgatgcatatcttcagaactttcaacacgtcaataatttagccaaaccagtagcctcttctcaaaatagttcaacagcttctacccagtggcaacctcctctagagaataaattaaaaatgaatgtcgatacggctattaattctttgacgaacaaaatcggtattggtgtgattatttgtgatttgtttggacgtgttctggcttcactatttaaaccagctcttggaaattttaggccacaggagatggaggcaaaaacaatgttctttggtcttcgttgggctgaccaattgcatctacaacttgacttcgtggaaactgattgtttgatacttgttaaagctttgagtgatagctcatcaaataattctcgttttcatgatttggtacaagatgttttatatcatttatcctcactttcttctgtttgtgtatctcatattaggagcgatgctaattaagcttcacatgtttggctaaaccagctttacagttagatagtgattgtatttggttagaaaaaataccttctatcatttattttctcgattgttgtaaatgattgtatttaatttataataatacacttttcctagaaaaaaagtttctaccacataaattttcactaatttattattattattattttataaagacattatttttattattatctttttaataataaatatttatcattactcaaattactatatattattattattgaaaataacttatttattatctttttatgataagacttcttttctggcttaactgtttatgataagacgttgtgagagtttcaacatttttgaaaattagccatataacttattttttctattcatattgaatgtattatgtattgcttacattaataaaaatgtatataaaataaacttttcgtgatattcatacatcaatctctttcatttcgagattttttccttttgttagcttctcatgttttgattatttatgttgtgtagtgattgtggtatttttttaacatcatatcttgggtaatactatgatgaagtatgtggaaaaatatgaacagaaatggtaaaattgtagttagggatgtgcatatatcgagtcaatcaaattaacactcaccgattcaattacaatatataaatattgaatattcaatggtgataagatcagatagaatgttatttttaatatccaattagattgaattaaatgttgaatggggtgcccaaagttcaagacatcaattatccaattgaatgaattagtatttttatttagtttggataaataattaaattttatgttattaattatacttaaaatttttatatatatatgaacatattataattttactatattttgttaattggatggatcgaagacaatctaatcaatactggatttaaatatttcatggatccgatccaatttcaaaaatattaaatttaaattattgaataaatctaaatcaatgcaatagaaatatatgaaaaacatctcattgatagaacatccaatccaatatccattacatgttgaatcaacaatgattgatattaattagatgggactaaataataaaatgtaatatctaatatataaatagattgaatctagatatatctaaaaatattgaatctgttttaataaataccccaaattgcagtcatgaagaagccgaatgatagggcaaaaaaatcatcgatatcaatttttatttagtatttataatattaataactctaattttaaagtttttttttatttatcgattttagttttgtcaacgttttgtcaacaccaaagcaacacatcataaactaaaccaacttaaattattcatgttttttattttttaaaaaaaaaattaaattattcatatcaactttacaacaatacaatatcaacacaactatgtggcactgttatcatgagttagttgctaattttgttgttattcatttacattatatgtactccactaattctcataccatactcttatttgttgcatttctagagctttttatttatttatttatttattatgaagattacttttagttatgttcctctttattattattcttatactgtaatgaccgctctagtaatatggattagaaaaggcaattagc

SEQ ID NO: 14444 - DNA, 1967 bp, Cannabis sativa
gcagaatcgaaaagttaggccatctaagtttgtaaagaaaaatgttcctttgttcctttatataaatatctatatatatatacatatatatccagctgttgaaaaatgcctttctatactatagcttctttttttttcccttttcttaaagcatcaataattatatatcttcttaacttggtattctttctttcttgacatggaaaaccagaatctcttctctccacagccaaataaataactctcataataaataaataaaaatatatgtatggaataaaagcacaaggcacatgagatgttcttgaaaagccaagcaaagaaatttagactgttctcttctctttttttttttattattttttattttgaaaaccaaataaacccttttcgccagttgtcctatcattattaattaataattaacaatttttttaacttcatcaaataattattagttgatcaatcaatgcaatattttttttttttttgaagggatcaatcaatacaattaagagattatatataaatattaggaaaactgttcaattaaaataaaaactttcatttatttatttaattacttccctacatagcattgaaacttgttattttgtcatgcatgcatgtaatccaaatcatttgaaaataaataaataaataaatatggtatgatatttgttcattagtgggccggcgtggctttccaattatcttattatttcaaaattattcttttattattgattttgactgtttcattatcaaatagagcttatatatgtatttcttatattaattatacatatcaatatcagtaggaattaatgtccaagaagaatataaattaacatttttctgaattttaaaacttaaagcatttttacataaatatgtaaaaaaaaaaagtgcaagagaatgttgtaccacttaaaacattgttcgatcagagaagagacataaagattttttcttctactaagggaagacacataaagtttataatctgcattaagctgggtagagctgggcctcggctatcccttaattatttatcatttttgtgggtatatagagctactattgaggaagcaaaagggttttggaagtgccttaattaattttgtacttagtcaggttaacggataaacaagattaacacttctaatttctttaataagaatattagtgagggtatgaggagaggtattaaagaggtttcgggtattgatggacctaacggtaacaaaaattatctagggctccccctttttaggtcttgtcacaaagatataggcttaaacttctggataatttggttgcaaaactctaaggttggaaaactctgttaaaagtgggtcgaacagctctgattaaatatgtgggtcttgctcttctggtgtactatatccaaactactaaactccaaaaaacttatttccaaagttaatggtatagttagggactttccgtggggttgtgaaaaagattatcgtgacctttatttgaagtcgtgggataaaatttgtctacccaagtctcgtggtggtttgggttttagaaaatgaaacaagcttttctttccaaatagggttggcaaatgatcaatgaaaaccaatctttatgttgcagagtgttgattgccaaataccttaaatgcaaaacagtttatgaagtgttcttccaagagttcgaattcctggttctggaaaaatgtcatcaaaaagctagagagatttgaaaaaagagtgcctttaaggtcactggtgagaaagatgtgaatatctagaaggactcgtatgtgggtgatccatggtgaggatgtccccgtccttcggggaactcgcctgcggacattgtaaaggtggtagacctgttacaaggaaacatggactaggatctatgttagagtttatgccctaaaagcaagtatttaatggataatatattataaaatatatgaaata

SEQ ID NO: 14445 - DNA, 9632 bp, Cannabis sativa
gattcatcggttcttgatacccttatgaggagttatttgaatgtgggcatggcaaatgaggcattagaggttttgaataagatgtgggaggtgaaagtgaggcctagcgcttcggcgattaatgttctgttcaagttgttgctaagaattggtgattatggtagtgtttggaagctttttcgggacatggtttgtaaggagccatttccaagtaattatacttttaacatgttgattctcgggttttgtcgaaaagggttactcaacattggagagagtttattacatgtgatgcgaaaatttcgatgtgaaccagatgtttttacttacaacattgtgatcaatgctaattgtgttaggggacagactaaagttgctcttaaatggatgcgtttcatgattgaaactggctgtaaaccgagtattgtgacgttcaatacagttgtaaatgctttgtgtaaggaaggaaattttgtggaagcaaggaggctttttgatgcaattcatgaggctggtgtttctccaaataccataatatacaataccattatcgatggatatgttaagtcgggggaaattggtgaggcgaacatgttgtatgaggaaatgaagaacaaaggtatatctcctgatggcataacctttaatatattgatttcagggcattacaagtatggaaagaaagaggaaggaaataggttgttaagggaattagctttatcaggagtgttttccgatagttcatcgtacgatatttcgattggtgctttgtgctgggcaggtcaaatggatgaggccatggcattgttagagagtatgcttgagaaaggaatacctcttagtgtggttgcttttaactcaatcattgcagcttatagctgggaaggattggaagaaaaagcttacaatgcttataagattatgattagatatagtttaagtccatcatcttccacatgtagttctttgattatgggcttgtccaagaaggggaagctaaatgaagcaagggaacttttgtgtaaaatgttagaaagacaacttcctattaataaagtggccttcacagtgctgttagatggttacttgagggtggcagacttggatggcgcccaaagcttgtggaacgagatgcaagagagagggatatttcctgatgctgttgccttttcagcctttattaatggactttctaaagcaggattgatggaggaggcttatgagttattgttagagatgtcaaggataggattggtgcctaataattttgtatacagttctttagttcatgggtttttgaactgtggcatgctgaatgaagcattgaagctagagaaagagatgaggcaaaagggtttcgttccagatatcgttatggtcaatataattattaatgggttttgtaagcagcgaagaatggatttagctatggaaaaatttatggagatgcatctgagtggactgagaccgaatatcgttacttttaacacattaattgggggttattgtaaagcatttgacatagtttctgctgaagagtttgtgcatagaatgtatgctagtggggttgacccggatattgtaacacataatatctacgcccatggtttctgtcgcagtaggaaaataaatcgagcagtgaagatgctcgatgaattggttttggcaggtatagttccagatacagtaacatataacaccttgttgaatggtgcatgcggtgacatattggacaaagctctgattttgactggaaaactgctcaagatggctttcgttccgaatgttgtcacgaccaatgtattgctgactcacttttgcaagcaggggatgcccgagagggccctaatgtggggtcagaagttgagtgagatttcctttgattttgatgaaattacctataaaataatgggaagagcctatcatagcatagaaaaagatgctaatgttgatgtaagagaaacatctgcaaaagggtttttcttggattcccttatgtacattacatatgactatttttgtagaaatagaccctctcaggaggaagtaagcccaaatcctcttacactaactgaatgtaggtttaaggggtcttgaaagttggcatctcgacttgtctttccattctcaaattttgagcatcctcagtccatgacattcagtcagtagctatggagcaccagagaaattaaaaagtaccaaatgaagataggagtgggaaaattaaagcaatgagaaaaatatgtgatggttcagcaagttgttttgcatatgtttctttgatgggatatctttgtagcctcaagcacattgagatgatcgatctggtctgagttgatccacacagtgtacttttgtgtgactcagaaatgcaaagaagttagaaaacagagtcttaacagtatatgatttccctcaagacattaaacttgacttcgaaatcttgatccttcaaggtagtgctgtatctcttttttcctcacttaatagaaatatttgtggtttaggtggccttactatgtccacttatttgatttttacaggatgacaaagttaaagttttagcagccaagcatgctggtacaaaaatttgtatcagtaacatatgatgtctcttctatagccattgttgctgaacatcattcaaccaaattctggattatacagaagcatctcgtacacaagaaaaagcttgagatgatcaattttcgccccctagccaggccaatgcacacagaaggtcgatctgcatcaaatgcagtacactggttagtttgttgttatgttattaggttattcagtttattagaaaacatggattatcagcataaatgtagtaatgtacctgatcatctgttctttcgtaagaataatagacaatatatggccatagatttgatcagtatgtatacttgctaacatttttaatatattacttttgagtgaactttgtgaggatgatcatcttttaatttaggatgtacattcatatttataaaacacaattttaaacttctaattagtttgtgtaacacattacatgccttctataaccaatttcatctttttgtatatttacttctggtgtggcagattatgtggtttcttctgcatcaccgtaccttactcaatatagagatgcacagaagagttctgtttttgatgtcaacgagattaagatcaatgtagatgcatctatttttgcagggattgatttcacctgctagctagacgaactctgaattatgctgcttcgaagactcatactagagtccagccacctgttgatgaagctacgggagtaagggaagcactcggttggctcaaacaacagcaggtacacgggtttgctgttcgtagtgctactgatatgagctcaccttttggtttgcttgttgttactgtaaacgggtattgcacaatttagataatgtttttattcttagtgtaaagtgatttgtgaataaggcgaccagttttttggttcctactgtttgttctagtgctgatcgtatctttaggggaagggatgtttctcctgattttcttgccgttttgatggcagaactttcattgataatgtctccatttttattcaaaattaagatatcatgaacttaataattagatgaattaggcaaattaccaaactatgaaattttgatagcattgtatgaggcacttgtaacttgaacttttattttcccttttaattttctttttaggcctttggctcaaggtcagaaatgggcatttggttattttgatggtagtgtaagctatactatactatataacacttgacttcttaagttgcatatacaaattactgttctttctatccagaaaaaaaaaaaaaaaagaaaaaaaagggaaaaacaacatttaattaaggctttgtcagataaaacttgtcaaaaaagcaacttttagtttattatgtgcttaaataaaatactcagcttattgaaaaaaagcaagaattacatcagggatctccaatctctaattaagtctaagaaagataaatgttcaaataatttttcaaaaacaactaataaatcacctattttagctagatgatcttggctacttctctccaaacataaaatctgacgtatttggtttcggcacattggtgctagaaatagtaagtgaaaagaaaagtagagacctttatgacgaagatagcattcttaatctcactggattggtaagtgcacgtaccaaaaactttacgaaatattaccgtggctctgtcttttttatttatatttttataatgtttattaggcgtggactttgatgaatgaaggcaatggatttaagcttattgaaaagtgcttgttaagtgatccatacatcaacatggaagaagcattgcgttgcatccacattggtcttttgtgtgtgcaacaaaatcctaatgataggcctaatatgtcttccgtcgttctaatgttgagtggtgagaaaatgttgcctcagcccataccaccagcctattttactaacacagattcgtgggaaggagctcattcctccgttcttaagcccccatcatgcaatacaagcataacagctgttgaggggcgatgagaattcatacaacaaactgatggagtttcccatataaattttgagaacttagatcatgataaaagtgaatattgaactatcttgattataattagcaattattgtcttttttttatgttgtgaattattggaattttagtttttgtcaatattaaactgaggattgtgcatttcaatttagatgcataaccaatcaagtgtagatgatcatgatatgtgttaattaattaactattcatgcattcagttctgcatcttctttagagatgaaataatttctgcagatttggcttatgaatttccctgcaaacagaaaagaaattaatgaagcctatgtttttgaccaatatgtgttaaatgtctacaacatgctccgaaaataaaaataaatatggcaaagcaagcactgccaaggtgatattttatgatgatgacattaaatttggtttaggagatgagagctttctcttctggtttgatgtacattaaaatattttgataatataatctaatatattttcgatgtttatcaatatggaagagtttcgatgacccttgtaatgagaatttttctttaaggattgatcttgatgaacaacaacaccatacttaccttgaactattcatccatgagtacaagtttgtgtacaatttcaaagatcactatgtaatctaaagagttttcatgagtcaactatggcttttcatttctcagttgcagtggagctaattcaaaatgtgacataacaactaatccaatccgccattgtttattaggctttgagccaaagattaaagaaaattggaatacaatctgttggtcagaagggtgtgtgtgagagagtcctctgagctgttaaaagaaagattggttcattaaaattgcagggctaaaagcttgagcaattggttcttggctcaaagcttgagtaactttaagaaagtgtttgataattggttaaagaaattggttgcttctttgccattaatgctcttcatgaaagggtaacacaccagatactcccaaatatggtttcagttcaaaagttgcttcttttcgatattataagcgatgaggaagtgaggcatgtggccaacctttagcttgagcttaataacaactgcagagagcagctgaaatctacagctgacaacaactcatgtagttttacattatgtcataaaaatgataattgtacaactcactttggtttgcacagttcactttggtatatactcaatgcacttcattaataaggtaatgcaagtcaattttttcagggtgagctacatccaaacactttcctaatattaacctcactgaattatcttctgcttattgcaaggctgacccaatgcagaaaaaatcagtcatctttgaattgatttaatgttgaagttgaagttgaagattagtattgagtcaaatgtggggataataagataagagcattcactaccacatgcatgatgcatcccttccctactaaggtttttccacaaatatataattaagttgtctcttttctgaaacctaccatccatatgccattaactccattttcatgtctcttaagttatggtgtacatcatcacaagtaggtgtcatatagctaaattgttataattaagatgtatatcattgtattgttggggattaaaagtgtattcaataccacattgactgaccaagattttcaaagtatgtcttaaaactacttacaccaataccattaattcacgttgctgtgcctcttgaatcttattggcaacatcatgaactctgaaaattgataatagacttcttttcactactaaaatataaatgggggttatgtttttctaattttgggtatttttgaaaaaattatattatcacagatattactaaaaatttgttaagatattagagtagttaaaacacaaaaataagaatgagtacaggacagaaatttaatttaaaatgcatgaaaagaaagtaatttcttgtactagaatgattcttttctttttattttaaaatggaatagtactccgctaaaataatgaaaatgtagttccattgtaatgacattccgattctttccatttcatttcattacttccaaccaaacgcaaccttaattttcctcattatttgaattttctatgttttttcactttaaactctatgtgattttgtatagctctacttgtggtttttaggtgggaatggagaaaacacttgaatgcaaacatggtttcctttgagatatcattcgaccttgtcggggttgctggttattgttcttggtcctcgagaccctcctgcgcgctgagggggtgcatcttccctccttccttaggaccactttttttttttagaagcgtctttacattaaatttttgagttatgaggtggaataggaccaccaaattgattcaaagatagatttagaaatttcaaaggacagctcaaaagccaattagtaagaatttcagaatgtgaaatatcaagactagagatatttatttgagttttgaaccaagtaggaaattgtggacctaacttgcaagacctcagccatatatcaactaggaatggcaaacaggttgatccgtcccgacccgtcaacgcattggcctgccccgacctgttaacattaacataccacccaacccggaataagcgactcgggtctgacccgattcaacttttttttagccaagcaagaaattgtggactaacttgcaagacttcaagcatatatcaactaggaatagcaaacgggtcggactagtcctgacctgacccgttaacactaatataccgaggagggtataacccaacctggaattagcgggtcgggtataaccaactcggaataagcgggtcgggtatgacccgatcaaactttttttttttttttttaaaaaaaagaaacaaaaattaattagtgtacaattgaaactacttatttactcaatttgaatctgaacaattttacaataaagtatatcctactacatgagcaagtgtatatgctgtttttccacaacacaatgaccaagacttttccacaaacaagccaaatattaatatgcagtgcactatggtgcaatacagagcaaactactaaaccaaatactaatagcaaatggagtttttttcttctcttgttaccttattattacttgttttgagactcttttctgtgtctacaacaacttttgctgaggttcagaatgatatcattacaccttcagatgttctgagagataatatcagtactgactacactgttttattggtatccaaacaaaaagtatttggactgggattcttcactagaagaattaattcatcatcaaacaatcgttacctgggaatttttacagcttatggacctatagcttgggtggctaaccgatgtaatccgatacaagattcatcatctgggtccttgagtatagacaagagaggaaatcttgtgctttattctggacacaatgatgataagagagtagttgtttggtctacaaactcgtctaaacaagccgcgaaaccattgtttcagcttttggataatggtaacttggttttgagagatgaggaagatgcaaacacaacaaactacttgtgggaaagctttgattatcctactgattcattgttgccaggaatgaaattgggatgggacttgaagagaggtctcaataggcgtttatcatcatggaataactcttttgactcatgtgatggtgatctaatcacttatgggattgagtttgatgaacaacaccatacatatcctcaactaattgtgcgtgttgggtctgcaatattgtatcgtcaaggaatgtgggatgccataagttccaaccaaaattctagttatgaatttgtacaaaacgatgatgaagtttactacagcctaaaaaacaagtccatggtctcaatacttgtcttacaagatgatggaagtgtttctcgttgggaagggagtactgaagaccgcgaacaatggtctatttctgctacaacaccagtagaccagtgtgactcttatggcttctgtggagctaattcacaatgtgttttaagtataaagcatggcccaatgtgtcaatgtttggaaggttttaagccaaagaatcaagaagaatggaaccccgataatccacaagaatggaaccccgagtcttggtcagaagggtgtgaaagtttatacagtcttgcaagttgccatgaggaagagaaagaagaatttcatgagtatgtaggcttgagagtgccagatactaaaaatagttggttgagtaaggctaataatggaagtgaatgcaagagtaaatgctcaagcaattgctcttgtatggcttatagctttatatactctgagtctaatgttagtgttgtattagaaaacactaattgtgtcctctggtttggagatctgtttgatattagacaacttccttctggtgatggtggaggacaaaatacacacattcgaataccaagttcgaaaataggttggtttcacatgtgttcttgttttggttggttaaatctgactattaatattgtttgcttttgtttatatttgaagaatcaagaactgatcctaatcgagaggagaaggcaaaggagaaggcgaaggtgaaagtgaagagggtagttatgattataagtatcatcatgggattaggtggtgggattcttttgattgccttttacatttgcaggaagacacacatttttggtaacatgactctcttctctacattttgatgtgaaactatcccatgcttcgtttggtgtctttgattcttcaacttgtaatttttcagagagaaacaaaagccaagaagacgacttggagcttccatttttcgaactacatacaattagtactgccactgataatttttcagaggctaataagcttggagagggtggttttggacctgtatacaaagtaagcttttctcactcaatatatcattctcttcttaatatggtaaaaaattattgtcattgtgacataata

SEQ ID NO: 14446 - DNA, 8100 bp, Cannabis sativa
  modified_base (7086)..(7086): a, c, t, g, unknown or other
  modified_base (8045)..(8055): a, c, t, g, unknown or other
gtccatcgatctccacccaccccttctcccgtcggtctccctctcctctctatcgcatacgtcggaccaccactacctcacgtcggtgtgtccctctcatctctgtctcatacgtcggactaccaccacctcccgtccgtctccctctctctctttttctctctttgagctcgctataaatacatttatttatattcttttttatttattatattttttttgttattatataaatttaatgtattttaaagttagttgttattgtaataaaattaattagttattttattttaatttaagtaaaattataaaaccaatgcaggaaaaaaataggagaaaatacaaatttttttgcctttgttttttttttacattcccaacggttttaaaccgtcacctataacaggatataggcgacgattttaaaccgtcaggaagtccacattagtgacggtttttaaccgttgcctattttgctcattttacgacagtcctatagacaacgattaattatagaaaagaaactgataggaaaacttaaaacggctgtttaaaaatatcgacaaaaactatttttgtaatagtgcgtagtagtagtgtggtagattatcaaaattatttgttcacacacttgattgtttgaataggcttgttactaatgataataattcatataatataatattaacaaattaattaaagtcaattatatatacaaaaacgaaaaggaaagggcaaatgtgagtattgaggagaaacataatataataataataataatattaataaagatgaatgagaggtgttaaggataagaagagcgtgggggtcgtctatttcaaaatgtttttataaggtgatgatgtaatgatatttaatatataaaagatttgagttagtgaagcttagatggaggaaatttgtgggtggggttagatgatatattgagatgttggtcactttggtcttgttgtttggactttaattaacaaatcttaaccatggttagagcgagcaaaagttgaccaggtttaattagcacttgataaagttaagctaaccatgattaattattaggagaagttgagattagagggcataaataattctttgaaatatgccaaaaccaaaattattatataaataaataataaaaagacaattataaggagagggagtattggcaagtgggaaatgatgctgcggcggatgggccccaattttctcttctcatctctctctcttttattttgttgtcatttagtccaattacatttatattttgtgctttaggaaaatatataggttaattaagaaaaattattggaacacttgaatagttaatttctactttacttttcacctaagaattattgaataatgcaaaattgatttatatgtgtgggtgtgtacgtagttgtgtgttcttattagactcaaccaattagtcaattactacatgttttgaatgtgattatattaaaattaaagatgatgaaaatgaaataattattggtagtgtaataattgaattattatttgtatataggccaaaaatttgacagtgattacttgccaattatagcaagtatctcgtgaatcttctttgttgatctcctaaatcttctctagactgtgagaaacacgagagattttcttgaaaaatattttttgatgctttacaataaggagaattatctcatttactgttttttttcatgtagtttttatgtgagttgctatataattttttgttgtgatttttgtaatttaaattgttccgctagttgcaataaagatttttatgtaaaattatataaaaatacaaaaaaaaaaaaaaaaaacttttttaaaatgtaaaaatagaaaagacccataaaataaattccagtaagagaatttgaattagagagtgaattgattcttcttacttaattctaccaatatatagctcacagtgaataagatcaaaaaataatatgtgtcagctaatgcaattgaattaatgaatatatgaaattaggacctgtacttatttctactttgttctaaggtatcgatcacagagattgatgttagccaagatcaatttttatttttgtggatcgatgagtcagcaaagccatggtctttgcttccgatcgattaaggaaatatattttttttttttgattgaagcgtttatatattacaacatgttttacctgggattcgaatccaggacctccaacactcacccacccacctatgaccacttgagctagcctgaccttccttataattaattaagaaaaagatggacccaaatatttgagctcaacaatttattgtatatatttttgtatttatttacaagatgagatatggtgatttaagatttttgcactttatttatattttgcatacaaattaaaattctttctttatccacgagacagttctattttatggatcgatggatgtggttgcactgtatggtgagaatgagattctaaaattgggaaactcatcatataatttataggtaggtgctactatcatatgattaattttccatagcaaatataatatcataaatcatgagctgcaaaatgttattataaagttgacaaattgaagtcaactaaaggatctatatatatgtaaatcctacgaaaaaagatccctcaaaaggtaaaaagaataataataataataataacaatacacatgtagtagtatgaaattgggcaattccacgaactatatagtttgggttgagaattgtaattgcaataatatatatatgtgttagaaaatgatagatattaagttgtatagataggaaggtgtaaatatatatgaaggtgggatcacgtgcggtgtgggaagtgaaaagaactgagggagttaagggacaccctatagctgtcggccacgatgagatctaattaatcttattataaattgtcattttctctatttcttattgggacttgctcactcacattttctccccttgaatcccgggggtatacttcttctacagttctactactttctactgatactactactactctctctctttcagatccatctcagattcattcagtaatcactcacctcacctctctgtcaccttacccagtaaataccatgtcacccaaccccacccccacccctctctctcgtgtcaatacattagagaaatgctaaaaacactactgatatcgctattagtctaattaagtattgggtcatgtataatttaatataataacttttatggagtcactataaaaaatatcttacttttagttacaataaaatttgtgattaaaagtaaaaaaatgttgtgactaataatattattattcctatgttgtgactaaaaagtctgtgactaaaagtattagtcataaaaataataatttgttgtgattaaatgtatttttagtcacaatatacttattgtgactaaaattaaattagtggtaaatcaacgttggtattagaacttttaccagcacaaaataaaaagtgctggcaaacttaaattttcccagcgcataaatgcactagtaaaagttatatttttcgccactgcaaatatgcgatggtaaaactttaacctttttgccgtgcgctggtaaaagttatcagcgcagtaacgaactgtgctggtaaaagtgacatttcttgtagtgactagtacctaatagcaatcctataatgagcattgctaataggcaccaataatgtcaaatactttttataggtgacaccttataattagttaataatgatattttaaaaaaaaatattttcttaagttatatgagactaaatacttaactacactaatagtgatatgatatcgacaaaaatattaaacactaataatatactttaatacttttttagtatttctcataattattacaagtttacaatgaccaaacacatgcattagaagtttgttccaattgtatgccaaaattgatattgtaaaagttgatgtaaatttaaatcataataaatgcattgtttatatatttattatttttaatattttattattaaatttaattattatcttgaattataaatcacttacaattttttattattttatacaataatttctatttgtgttaaaaatattacttaaatattaaattttgtattaaattttataagaatataatttgtaattagataaatgctatattaaatacactacaagaaatgttacttttataattagttcgttactgcgctggtaaaagtaactttcaacagcacattttgtaaactgcgttggcaaagaggtcaaagttttaccagcgtaaatttacagtgggtaaaatctaacttttaccagcgcatttacgcactcggaaaagtcatttttgcccgcgcttttcattttatgctggcaaaagttctaatactaacattgatttgccaaccccttttgccaacagatcataaggaaattctattttaccagcgcaataccaacttttgccagcacataaattatcaaaaaaaaaaaaatgttgtgtgtatttatattgctcgtgtaatttactaattagtagtttctaagttttattaatcctatgagttttaataatcagataaatacaatatatttgatgtgcaatatatttgatgtgatttatatatatatatatatataaaaaaaagaatgtgctgattaagtgataattagtgtgtagttgggatgttttgttttcctatatatagtattcccttttattgtttttatgaaagatgttttcctcgtattcaattcttggattttggtattattattaatgatatatttggcttaataattaggagttgatgatgtaaattgtgtggacagactagctagggtacttattactggccgagagtggggctcagatttcagagatggatgtatgaattaatttcatttgtgtttttggagttattgaaaaaagtctgagaaaggaaggattattaatggtacattatatatatatatatgtttatacgtacgtacttatacattattatttgatcataatattcataggtacatacacattccccctctcaatactcaacctgttaaatcactttgatatgtatgtcacataaagacaaaccccacgagggagccttattaataatctcttcaaaacaaaacaaacattaaatttaaagggaaaggaaattaatacatcaaatatatcaaatttatatatataaaataactatagaagccaactttgtacgtactcaacctctctctctcttcacttgttgattagacatccttacatgcatgtgtgatatatgtgtgtataaatataatgtatatatacactttggaagatccacctatagctctctttccttcctctccaccccatataaatatataaatataatgttgaattttatttaacgaaataataatttcattagtttggatttacgtacgtgacatgcatgaagtgatagtataatttacagtaattatttataactacatacatcccctgtggccaaaccatgtaaattaataaatatttatagaaaaaggtatatgtaagtatatatatagggtaggtatagtagctaggttgatcagatatatgtatatatacaattaaagcaaaagcaataacattattggcattaagccaagccatactcacggagtcaagtcatgatcagggttagctagggtttcatattttctttctttgtttctagagcccccaaaccaaaaaaggagctttggcgtgatgaataagtgtagtcttcaactcacctcacctcaccctatatatcacctacctacattattatatataatatatataactctatgtatatataggcctgcactgcatatatctgcaccctctcatcaactttgacaatttcactgcatgtattttcattcatctcaagagtgaaaaccctagctaaatatatatattttttgtgttttgacatatgcagtgatctataccttaaactcgtcattagttagtacttaattattactttgatcatcaaccaatatatatttgtactactatttctttataattaatattctttataattataagtacttccaatagctaattaattaggtgatcttcaaaaaattgatgagccaatgagtaatctcctagaatctctcttaacatatttttcataatatatacttttcttctcatttttcttattgataacatgtaaaatagaatttacttctaatatgttggcagctcaatgttagtattataacttttgccagcataaaaaataaaaagtgctgacaaaaatgacttttcccagcgcgtaaatacgctgatagaagttagattttagccactacaaatgtgcgctggtaaaattttgacttttttgccagcgcagtttacaaattgcgctggtaaaaattacttttaccagcgtagtagcaaactgtgcttataaaagtgatatttcttgtaatgccaattggttttgagatagaaccccatgattatcatcatagtatcagagccatactctagcaggctttcgatctgcacctgtccagatggttagccagccacacgaaatccagaaggtgcaaagacgcttgagatccgaataaaaagaagtgagcaaatgacatggcctgcgataaggtgattcaagattggcgagcaaaaatagccaccatcttgagggagtatattggagaacattgttccacatggattaaatgtaaatgtattgagccatttataagaatataagctactccactcatcaccaattagttttgagatggaaccttatgattatcatcacagtcttacagagataattatttaagtaagaaagtaaaccacatgtatttatgatgacaaaaattaataaataacacaaaattattagagacaactaagaaaaataatattaagaaaatatcataaataaaaatagttttttttagttttaacgaaaaaaaataataatattattagctggccaaataaacaaatatacagcccaaataaaaaaattacacaaatnccacttacacacaccttcaacccaagattcatgtttcctcggcaactatcgcgtaaccatcgcgcaaccacacagcaacccaacgacaccgaaatgaaaattcaaccagaaagataatcaccattaattccagcgacttcacctgagaagacgactagaatcaattaaaatagggagtgttttgaattcataaaaaaagtgtagaaaaactacttcgaaactaaaattcaaccagaaatctagttcaatttgcataaaactaatgttctgacttcaatttttagatccatgaaagacagatctaaaaaagttgatctggagttcgcaaacaatccaactcaagtataatacaaaaaaaaaaatacattaatactatagtaaatatgagtgtaaatgggtcgggtcagatctaatcctgctatgatctgacctgatccagatcatgtaaccctagatcaaatactcaaatcagatccgactcgacctgacttattcagatcggatcagatccgacttgacttattcaaatcggatcagatctgacccgacttatttggatcggatttgatccgacctgactctttttttaagaattttaagattaacttataattttatatccattttaattttgtattagtattattaaatacaatactatgtttggtattgacatgtattaatagattgtgtaaggataatatatttttaataaactctaccccaacaccaacaatgggtcaggtccgggtccgagtttgggtccgagtcagggtccgggtctcggtccgggtcagggttcgggtccaggtcagggtcttgggtccaggtcttggtctcggttcgggtccaggttcgggttccgatccgggtttgggtctgggtcccgggtttgggtcaggatctgggtcgagggtccgggtccgagtcctatgttagtgtaaagcccgcttagttannnnnnnnnnnagcagttgtttatgtttaatcatggaattatttatagctatttaa

SEQ ID NO: 14447 - DNA, 9958 bp, Cannabis sativa
  modified_base (6407)..(6431): a, c, t, g, unknown or other
agagagagagagagagagtacctccaattatggcacaaatgtgggtaatgaagtgtaaaaatggaacacgttcctctttgaagtttacctgcaaaatagatacaaatacagttaacatatagcattgaaattaatgctacatttagacattttctttatggaagccacatttagacagttaacatatagcatacagttaatcacaactctaaacagagagaaatttaacaagtgatttctccctgtctaaatgtgggtatatttctgacttaattggtcacataaggaataaattattctaatcatctcttccacatttagacttcaggttgtgccattatcttattgatttcctatttgatcttatctggttatcacttgttaatttaatatttcatccacggatgtgctcgtggctgtggccatgatagccgtaagctaaacatcaaggcaactttaggcaatcgttttccacaaaattaaaagacaaaaaagaaagaggagataagtaagttttcactattgacagcccaagtaatggaaggttcgaaataggattaaccagtagcttcactaactgggtacaatgaacaaaccttaattggagaaaaatcataatagaagaacactcctggaagcgatcggaagtgtccagcttctgtatttttgaaatgctctgtcacagagaactacagtgtgcaaatttagtataatatctaaagaaaaaatgattaactacagattagttcaaataaatttcttacacaatacctgatttgattggacatcatggcctctaatattggtgtactttgtaggtaccacctatgacacagtaaagaccaaattatcttcacgaataattgttaggacagtgaaagcaataaaagaaatatcatagaaaaaaacaatatcaaatggggaactatattatacattgccactaaagttccctgttgcatggaaattttctccttttcagagaattacaaaactggaaaatatagcagcccaatcaaacgaaatacaataaattaataaaccactaaccttgatgaaatactggtacgaaccgcttggtgtttcctgagtccatttaaccctgaagatgcatataaaaaggtggtagatcttagaatcagaaacctggctaactttattgagcaaatggttgatacaggaacagagagagaccgggaagcataataagggccaataaagggcagagatgtaatcatgtaaaaaagaagaagaaatatgtaaccaatttttgttaaatgcaattcgaaaaacaccagtatgagaatgatgcaagatagatattctaatcatttgtagaaatttaaatacagatgattgaatagaaagatattattacccatccagtggatttaccgcgccaggaaaatagtcaccaaaagctaatttgtttatcttgtgacttatctgcatcatgtaagatataaagaaacacaagaacgccttagagtgagtataagaaagagcagattcacttgataatgataattagtaatagtaaatcaaataacaatttatcagacacaggactaaatgcgacatacattgtatgtatctgtttggagagctagcaaatcctgcagaaacatatttgcctgatgaaagctttttccaggggaaaaatggaaatttccagccactttgttaacttcaagagacccttcaatattacatccttcaccatcttcatcttttatcttttggatgaaaccttcacgtttgcactggaaaccaaagacataagaagcttaaatcaaattagagttattttccactcagtatatacagaattcttgttttaagttaatcatttttcctggtagtttcatttgttttcttggtttcaggggtgagacttactttagatcccttttgtgtgcattgctttttactcctattaaatatattagtctcattctttaatttatttgtacatgcatatatatgtatatacacccacatgaaagtatgaagtagggctatccctacctacaaatttttgcctggttcaatggactgcaaaaagtaaatttcattctcttgtagttgctttgttatatataactttgtctagtcatattacacagcagaaaggaggtagaccaattgcttgctaatattgttaaacgttcctattctgatttatgatatgtataatataatcaataatatatatatataaatctgaattgtgacacacacacatagcagtccaaagaacaaggttcatgttgtaggatccctcatcaacaaagtatgggattagttgctgtatttttagaatctcatatcggctaagtatgggattgcggattggttggtggtttatagtctacttgggcaccctccttttggggtgagttctacctaagtggttataataatgcaacatttgtgtgatgatctgcatcaaaaaaagaaaaaaaaccacatatgcagagtattccagacatacctggtctatcaaatccgtattcgtcattgcccagccctttttcctgtatgcttcacgaacttcttcacatgagttacagcactcatcatcagactgcatgagagagaaaattatggagtaaggagcaggccatatatatatatatagattcaagttttatatgctttacaactatagctatgatgctatagcagcacaaataactgcaacataccgcttctgccccaaagcatgaaccacaatatgtttcattatgctcaagcctgccaccatgcctctgtaagggtttctcaatctgcaggatccaagaacagggcaagaaagaggtaagagcatgtcataaagattgccagatagataatatattagatactgtagtaaaataaatcagctatttcaatgtttttgacataaaatgaaaacttaatagtaactagtagtatcaacaaaatatattgttcttcacaattataatgcaaaaataaacccaagaaaggagaagaacatttaaactgcctatgcatttccttgtgctagtgttacatttgtagtttgtactgcactcaaccaaccatacccagggagcaggaatcatctgatttctttttttatttatttttgaaacagaacttgtgttacaagcaaatttagagaataaaaaacattactagagtttttaaactctatcaaaacaatcattgaagggatgctcataaaacatttaaatcctaagcatatcagagaaaatctgcttatattatggtatccttaatatgtgagggttctaaaacaattttgggtggggtaagccatatacattcgacctctgtccctctttctcaaaaaaaaaactctctgcttatatacgaaaacatattgctaataggtatttaatcttatcccacaatacttcttctgcagtttccttttcttcaaaaatcctgtaattcgtctcaaatcagatcattggtcaagttcatggccacagttatcttcaagtatgtacccctttacctttgaaactttatcaggccagggtatttgggaatgaaattctcttattttcgatattataatcataacaagttttttaattaagaggaaaacaaaaaattcaacagaaggggggagtactcctgctttaagttgtatgtatgggcatgattttatgcaactctttttctaatcaaatgcttatctaataccaagatgtatgaaaacagctgctaaaattgaataatttataaagtattaatcccagcaaacctttggtgcaccaattccctcctgtcttgcttcaattagattaccatgagcatcaattcttttcttgactatattatgcctctgcaagtaaaaaaaaacgtaaagcaaaacacctaaccattagcatcacaaccaccaaaataaatagagaagatatgataaccagaacatactatatcaagatgttgctctccgctgatatcaagtgcatcgagactgagtaatgaacatgcgatgactggaaaagtaacatcaaactgcattgaaagatatgtggtatcaatacacctgagataccactgtctgaataaatcttatagccagagaatttcacattgctattccataaataaacagcatattaaaggtaagacattttttacaaatctttgagcgcacaagggttcttcaaaaagttatgaccagtataagttgcaacaattacaagttcaatgggaatgtaattggataaattaagaattacattgatccgtagggtttcgcctcttgaagtatcaacaaccagctttgtctctttgacagtgtgaaggaacaatgctgtaaagatagttaattaaaaattaggaaatgcaactgtcagaaacaaacagcaataaaggtgtcttaacaggcaataaaacaggaagaatcataaatgcaggttatgtgattaaatcagcagcaaaagagaacttgcaaaaatgtttttcttatattctttttctgacacacaagaattagttgtcatattcggcatacagatattacattaccaacccactccaaaagaaaacatcaaactaaaattgttggaagttgccaagcatggtttataatactataaggtcatttctggaaagtgacataagattagataatttttagcatgtgttttggttttgcaagcagataaatattggaaattagtccacctagtttcggataatttggtctgttgagaaacataagataattttatcaaacctaatctccccatgagacaaaaatttgcaactatgcatccatcttcattttccataattcattgtttgcaaatgatgaactcaactcactaattctatttatgttttatcttaatccaacccatttctattatatcctaattctacgtaccacaagatatctagatcaaacaagggggccaacatgtgccaatacgaacaataggccaacagatgacaaggctttctactccagacatacaagctgaaactgatagttaaaaaataacaggaaactagagtaaaacattcaactatgcgttaagaaaacaaattgctagccatgcttctcaaagaatcattcacattgccagctcctgcctgattatactaacattacggcagaatctaaaagctaaatttctcaaataggtatgataggtagttagaatctatgccaatcacaattgaaaccatttcccaaattctctgcttctaaaattcacattttagggtaggggtgtaaaatagccgaatcaaagaccatattaaacacacatcattgggctgtagatcatttatagtagctgaaatgatcccaatcacagcatcagtttctaacgctgtaaatgcaacccaaacagagacttaaaaaagcttaaccaatgaacccttcgacagcttcaatcaacaatgtcaagatcccaaatttctgctttgggttaggaaaggaaccacaattcggaaagggaaaaataattctctcaagagaaatgcctttggccataaggcttgagaaccaattgttcacacgcatataaatataaatatagcataaaaagaaccctaaaatcagcaggagaggaagagagagatagagagacgtacaaaattcggagaaaaagaggatgagcataacgagggaggagacgatagtgattatgccaccggagaatgtacgattgtagaaatcctcattaactttagggtaagcatccaaattccggagcttaagcactaatttctccatggcagacgatcttcaaattgaaatacctcaaccccaatcctccaatttcagttattcgtacatttactcatcagaaattcaaatagttagagattgaggtttgggttgactggaggcgaccgatgacaagcctatgttccgaccgaacgatgaaccaaatatgaaagcaattaccccaattattgacccaaacaacgcaactttgacataattaaaatatggaaatgagattatacttttcaaaaaatacctcctttttttttctatgttttcctattaaatttgtttcttttttcaaatgattttctttccttgttttctttttcaattttatttatattgttgagactgagttggtaaatttacagttttaaaaaaatattctctaaaaatatgacatgttgcttctaaaaaagtattttctaaaaatatagtctttaggtgtaatgataataataaattaataatgataatcttgccaaaattgttaattatctaattttttgattatttatgaacgagtctcggtagcacgagcatgacacgatataaaaaaataaaaattacataaaatattagaatttaggataagatgaatgaggttctatctcaaaatcaattggtaatgataggagtagctcattcatcttatatnnnnnnnnnnnnnnnnnnnnnnnnncaatgtgggactaactcttaatgcaccctcctcacgtttgggcgacatttaagagaccacaagaccgaacgtgatacttgaaagaatcccacaaggccaaatatcgggaaatttgtgggtgtacgcatcgggaaatttgtgatttttgaaacaggtcaaagaccctaacactagaaattggtacacattggtcgaaaggtcccaaatggaggttaaaggggagacagcggaagtatttgtttggaccggcagcactttggctcacaatggatcacaagtggctctgataccatgtagtatctgggataacatgaatgaggttccatctcaaaattaattggcaatgggaggagtagtccgttcagcttatatatcacaatttatttccacacattagcaatgtgggactaacttttaatacaaaatatgaaaaaaaaaaataataaaagatttaagaaaagaaactttttattactcacaagcaaaatactaaatcaagcaacacaaacaaccacaaaaaggcttacaaaaaaaccagcaccaaccatcaattccttgttatcttatacagattgtgtaaaaaatgttatttcttagagttaaacttcctcttagagacactatacaatctataaaaaagcattattttaatttgagtaacaatatacatagcaaaccctttccaactcccctgaccaacgaaatcatttgccccataccacatcgaccaccaccacgaaccaacattcctctcacttctcttgctctcttacaactttgcctgagacccgaacccttaaattgcaagccagttcacatctctctttgttatcgttcccagtcgcctaaatcacatcagtcaccttcgccgctagccccacccttgttccgtcgaagcgagttcatcatcctctcctttgggctagctctgttggattaatggctccatcaggatgttggtgaagtcagcccactaacatgggagattcgaatgaatatcttactatgaacaacaaaagggtactaccatcatttattttctgtataatttttacctttgtttatgtctatgtaaaagtttgtctgaaattgcatatgtgcaaaaaggaaactagttgttggacgaccaatacctagcaaaaaactagcttctcatgagcccactcacactaatctaaatgtgatttcgcaatttagcatttatttggtgatttcatattaagataattaatataaaatttttattattaagaaaatgtgtcgatttaaatttattttttcataatttttttatgatatataacctacagattgggagatatgataatttacattctatagggttggttgtagttttggatgtaagatgcgatgttgctagcttttcaacttgaattatataagtttttaaattgttgttttgtgttgaaagtaatgtaattattctttgttgtgatgatataagtttgttgctatgtgtttaatttgttcgataaaattactgaattagattctccttaagcagtagttaagccaaattatacttaagcattataataattgtaagaaagtcatatattaggtctcacaagaatataacgatcaatttataaacctaaagtgctagtgcaagtgttcctccttggatcacaaaaattaaaaagaaaagcatcatcaattacaaaaagcttctggaagcagaatgctgcatccaaaaaagattttttaattgatcgaagaaaaccctctgggagtgggacgctgccccagttgtggtattcattcaatgactaaactcctcctaagtatggggcattgtacttagcacgtgtttaatccaatctttctttttttccttttcctcccttggagttttttctttaacatgggtttatgagttgaaatcatcaaactaggttctccaacaacctgtgattttgcccctatgcagaagatctgcgcgggttttcccgcactactcatcgacgatgattcgtctcttttatgatcataaagtgagctcatgcttgagcaccaaccacacaagaaataacccactacacctcaacaatggtttatctcactcacagaagatagcttcaacagagaaacttcaaagtttttcaccccagtcacaaagagatcaacgctggagggcaagagcagtcaagctcagacagtgtcaatgaaattccaaacatcgtggcacgaaggtgatggttaataatcaagcatcaccaactgttctaatcaaaatagatcctaaaacagagtgggtcactccctaagagatatgaagccatgcaagcatcttatgtatggttttaggtgagccgacattgctccctgtggtagaattagatcaccactcacagttgaaagtgcctcgtggcaaacatcactatgactaccttcatagtgatcgacatcaagtctccttggtaggtcaacacctagcgaccttcgagccatctcactcgtctaccacttgtctgttaagttctcgacagcaattggtatcgaccgtctccttggcaaccaaagagtagaatgcaaattttacaacacatcgttgacattcacctaaaagacttcctcgactatgccgaggggatgaggaagacctctttccctatgataacaatcaaggggaagtggaagacctccttcgatgtcaagatagccaaggagatgaagaagccatcttccattgtgaatacaacagaacgggcaacaaagacctctaagcttaaataccaaggatgaaatggagatcacacctacaatcactctaaggtgcacccgagacggggaagacatcacccccatcttgagcatattaattaaggagttagtcacatccttagttgaccaaggaatagtcagtgactgttacgacacatcattgacagtcgtcaagaagacctcctctgctataaagccaaagagatgatgaagacctcttccgctgtaaagttgaggagatgatgaagacctctcccattgtgaagtcgaggaaatgatgaaggcctcctccgctacaaagttcaggggatgttgaaggcctcctatactgtaaagctaaggaattgatgaaggcctcctctgctatcatacaaagaagatgaacaagaccacaacttaacagaagacaaagactacatcgatatatacataaatagatagtgtgacaagagattcaatgctaagacaacaatagaagattagagtaaatgctaacattccaatgtcgacatgatttcacggcatctcaaatcaaaggaaataactgaaggagtcatcaacttaaaattttgaaatccactatttaatagggaatggggattcgaaatcctactctcattgagaatgcttgaagaacagagaaaattgtccaagattgtcaaaattgatgcccacatggtagtttcgagagaaacgggcttaattcatgtcattaagtcaacctcgcataagtgtaaagttaacttggggacaaatgtttacaccaagagtagccctgatga

SEQ ID NO: 14448 - DNA, 27497 bp, Cannabis sativa
  modified_base (9021)..(9033): a, c, t, g, unknown or other
  modified_base (18303)..(18304): a, c, t, g, unknown or other
aaaacttcaaaaattattttttgttctcatttctaaaaataattttttaaaacaaaaaacagaaaacaataccaaacatgctcttaccttttcaaaatcttttgtgtagctagcaaaaattctatgaagaatttgtccattttaaatgagtctatgagggagagaataaccagtgatcactgaggaccttcattttaggttttcgtctccctataacatgttcgtaaaatttttatgatatttattaaaataaaataagtgtgaaattcaattttaagttacattgatattacacaaggatattaggtactaggaatgttgtttagtatttctcaaggttctttttgaccatcaacatcaacatatggcttggtgtacgtggtgttagtgtggaatgggctcatcttagatctaattattttcataaaaacttaagaaaaattaacactagaaaaatgtaatgacataaaatatggttattttattaaagaaaataaaatgttcaaaaaataaaaattcaataaaatatcatgaataaactttttaaaaataattatgcagagtagtcattaccatcgaaaagttgttagagttggcttcgctgccaaagaaatcaccaatgatatacctttgtcattgaaaaagttgttagagttcttattgtcaccaaaaaaaagtaatcagagttgatactgcaattggaaaagtcgttagagttttcatcgtcatcgaaaaatcattggaattagacgttagaggcatcactaaagttggatattaaaatatgacatagagaaactaattatgtttattatataattgaaaaatctaacacaaataaaccattaatataaaacaactaaattacaaactaacacatagaaaccagttacttatgaaatacccaaatcaaaaattgaaacttaaataccaattacgtaaaataacaaaactaacaattaaacacgaaactactttctaaatacaagtagctaaaaaattgaaataaaagcctaataatacaactaaaacaatcataagaaaattaaagcacaaaaaccaattacttaacaaaaatactgtatataaattcttaagaaatgacttaccttcataagaactagatatgattttagctaattaaaatctaaacacaaggaaactagttacatataaaaataaataaataataattacttaaaataattaaatgaaaagctaaatgagaaacagtacaaaaaaatatgcctatattaaaaaaaaaatagttactatcatccagtcatcaatattatctctttgtccattgaacttgttttttttattcttatttaagatataaccgtttttctcgaaatgtctaggcttctcacagttaaagcatccttctgcgtcttgtagtcctttggaattagatttccctttgttgttattgtagcctttgtttggacctctgttttgtgactatggttttgactcctccttttaccatgctaaggctttctttatataggtcctccacttagattcaattccctattagagccacaatttttttttattttcatctccaagtctttggatttcatggcggatgtaccctcatcaagagtgatagaattcttccatactttattattgttttcactttcttataagtttctagaagtgaattcagtatgataatggtttgactttgaaattgatttccaacgataatactaattacgatgactttttcggcgccggtagcaatttcgacaactttttcgacaccgataactactctagagactttttcggcaccaacagcaaacttcggtgacttttcagaccgagtgataactccggcaatcactgtaatttcatttgttttattttttaaaaaaaatgaggggaattttaatatttttgatggtaattcaaagttgcatatctcatatatgctaaatttttattttaaataccatattttttcctattatttttcttatcatatttatgtaaactatctttatttttctcatatttatgtaaataccccttagttatttggtgatagctcaaaccctagaaactgcaccgcatcattttttgcagtttaatttctgcggttttttagttttatagtgcgggtttggtttaagaaattaaaataactacatgtgcgagttggtttaaaaaaaaaaaaaaaatcaaactgctctacccgcaatgcgaacaaccctagtaatttgtatgtacttttgaaataatctaaaaaaaaaaaaattaaaaaaaaaaaaagagagagagacaaaaataatggacttatttaaaaaaaaaaaaaaaaatcttgcacgtgacaggaactaagctcacgtgattgagattcattaggagcgagcgagagaaagggagaagagagatttagctgagaaactgtcaatggcggttgtgttttccttgccgctaaaattggagtttgataattgattcaaccaaaaacatacaagaaaatgggatcttccaaacgcggcgcagacactacacgcaccctcagcgaccacactcgcaccctttatcatcgtctccaccaagctctcaaccttggaaccaggtcactctttttattacaaagtttcaatttttattttatttaatccccaatttcttattattattgctgaattcttcatttgcaagaaccccaatacggcaataccctaatacccttatcttattcatgccccaataacccatatgtttaatttggaaatggtgtagttttgtacttacttaacaagcttatcttgatttaggtatggaactaaatggcagtgtgctgatattgagatacaacgacatgtcattcgctctattgtggcttttcttgattctatttctaaagattcttttcaccagccacttattaaggtatgacttagtactaaaattgttgtattaactattaaggattaaagattgttctgaaacaatttctttcttttttttttttaggattctattggtgatgtggttgaagcattggtatggattcttgaatgtaaaaacatggctatattgagcatgacaacaaatgtgaccttgaaattggttagcattttaccttactcaattctacagtcttatgtgttagatcttgttagtcctttgtcatccttgttatcttaccatcaaacagacgttgctacgtcatgtgccaatgcgctaaatcatgttctctcgaatctgagtattaagaatgaaaaggcggtttgggatgttctcaagagaagagaaagtgtacaacatgtaatttgtaatattcgatctttctctagaggtacattgccttttgaaaagttccagcagatggctttgctgttaagtacaatactacagagatggcctccatctagatttcttgtatggagtgatgctaatctcatgagaaccttacttgacattcttgtaaagccagatttttgtgataaagtggaagttttgaagttactttcttccataggtatcgatatgttctttttccttttttcttaattatcaaagttgttgccaaaagaaatttatcaggtttgaatgaatggagttttatgttttctttcttatctttaccagctttatgtggtagtggggcattgaagcttctggaaaatggagaaaccctcttgaaaatgatggtgcaatgcatgaacatgtcacaaccccaatctgttcgtatggaagcattcaagcttgcccaatgcttagctgtaattacagtacattgctctcttcaaagtgattccagtacgatcaattcaaagttgtctcaatgtattaagtgaacttacaatgtttttgctcagataaatgaacagagatttttcaaaatgatgagcctgtgttgtgaacctattattcaagccatactttctgaaatgagcaagtggagcaagaaatcaggaaaggttgctgttgaacggatatctttggtacaagaggcatgtctcttggctctaataacacgttggggagggaagcatcatatctatttttgggaacatgggatcgacaaagtcctcattggtcttctcctagaaaattctcacaacaagctgcatcaaagttgtttgacaatggaagaggagatatctattgcacaggagggtcttagctcttcttataatcttgttttgaggaattatatatggaatattctaggatggcttgccatatactgtgaggaaggctttaatcccgagataaatggaaataatctttacattgatgtactcattacatgttcatggtattgtcttattcttaaattttgttggtattgctttctttttactgtcataattgcttatttatctttatattatggcagcttggcttttgtggatgcaattgagaaacgacacagattatgtcaaagtgttacagctgatatcttacgaagtgaatcagcaacgcaggctgttttgatgatgattaactctccctgcaaatatattgcaataaaggcaacattcagactatcagaaatactaaggccaaatggcaaagacattttgaaacatttgctatctaccctagagtatgtatcatccaggaacaatttcgatagactacagatcaccatttacttaatggctttggtatgttatattggtttgccagagtctcgacaatgggttcttgaattttcagggatgaatatactgctaggtttcacaaggtggtgcttaagcaaaagtattgatttagaaagggttaacttcggtccttatttgcataatgcatttcttgagaaggcttgttgctatgtttcttcagaagactggggaggcaaagaccatattatgctttatagtttgtgggggttagctgagttgataaagcattctggatatgcagtaaataaccaagaaatatcttgcggtagtatgaagtatagtgttactgaactgctaaacaatcttcacgaggtctttattgacacatatagttctggtgttcggtggtttgcttcttatgttcttagttcttttggattgtacggttttccaaataaattgggaaaaagaattggcaaagcacttggtgagaactatcatgcagatataaaactcgtgcttgcaagtggagaatgtttgagtgttcatggtgttattcttgctgtcagatgcccatctctattaccttttcaagagctccatcaaagagacaaaatagctaactcttcagtaccatgtcctttgggagatgatctcaagaaagaagtaagattatctgcgcacgttgatctccaagcattgttgaagttgttggactttgtatatttgggatatttagaaacagatgaagaactattgacgaagttgaaaagaatttctaaaggctgtaagctccagcatctgctacaaatgctttgtaggaaaattccaagatggggtacttcattcccggcttctaatctttctcttgctcttggctcacttggacatcatttttcgtatgtttctcctcaaggaatttgcacttgaattttcgttgtcttttcagcttcaacataaagatgttttataaacttacgaaactaatagtagtaatcatatattttctggtttaagggatatcatattggaagctaaatcaactgaagtgcaaagctggagttgtgatatttgccctgtttcggtgccacatatgcatgttcataaagttatattatcgacaagttgtgaatatctgcgtgctttgtttaactcaggaatgcaggagaggtaattgtatttaaagctgtacttgtaaaattaaaacttgctaacatcttctttttctctctgattatctcaacttgccattttaatctttacttatggttgcagccactcacaaactattaaggttccaattagctgggaagcactggttaaattagtagcctggttctacactgatgagattccaaatcctccatctggatgcatatgggagaacatgagtactaaagagaagctatatgagctagaaccatatgttgaactttgttggcttgccgagttttggtttttagagattgctcaggaagcctgttcaaacgtgattgtgtctcgtcttgattcatcgagagaactacctattaaaataatccaaaccgcagccagtttatcactgtggaagttggctgagctcgcagctacgtgtgtggctcctttctttcggcaactatatgattctggtgaacttgatgatcttgatgagttccttattgatatgatacgttctgcttctgttcaatattctcaagagggacatattaattaggtgatttgaattactgaaaaaggttggaacttgatgagtaactttgttcatttcatttagttgggaagttttgatggtttccttcccaaatgagaagcaagaagagagtatatagcaatagtttcaagagtaaaaactgtgaaattgtttgttatagatttgttgagtaaattatatactagtctaagtggtgtaaatgttactttatgaacatgcaaagaatgaaatacagagaaattaatattatttacttcctttacattcaaaaaaatatcatttacttgttcactgacaaacaatatatcatttactttacttagcactccaccccatcaaaccaaattagtggtaaatctctattttttttttttggaaaataaatgtaaattttttattaaatataactatataacgtaattttttttaatattgtaatttaaatttaaactcatatggcacatatctaaaaaagtatatattttctatcattgttttcattgtaaacaataaaatagataaaacattttttttaactattattgtgatgtccttacttaccaaaatatatatatatataaatatattattttttttttaaaaaaaatgtaatatttctaaaaaaaaaaattatagttaaattaaaattataattaataaattttttgaatctatccctataattaataaagagaagaaaaaaattatcatttttatatttagaagggacaaaaattagggtttctcgttcctaaaatttataactattggaggttgtcttttttctggctaggcctgctaacctttcttgggcttaggtgcggcttaatcgggattatattttgctgctacaattcgatttttgctattgtgattagtcttatctctctgattggttttgaatgtttagtcttgtctctgtgacatagttttaagcgtttttcgtcttgtctctgtgacatagttttgcgtattttaatcttgtctttgtgacatagttttgttttattttattgttggttcttctttatttttcgatggctcgccatcaaattgttattagtggttgaaaataatattttttctgctactgaaggtgttgttagtagtgtagttacataccttacacaatagttgagtgctcaaactacgagattgaatgagcctgctgcaacagtctctactgttgtatcttctgagcggtggatgaaacaaaatataagtgttcttaaggttaattgtgatgttgtaatctttttcatcagattttattttagttttttatcaaatgatctgggagttaagcgacttattatttagttcgtttttctaattttaatcttgatcgtgtctctaacgagaagatgtcccgattgaattgcaggctatcattttaattgattgccattaataaattatattatttattttaaaaaaaacaacaacaccatcaacaacaacatcaataataattttttaatattattatatatatttttataaatagtacttaaattatttttttaataaaaataatgtagtttattgaataatataaaaaaaaattaattctacaattaaaaatatatataattaaaataaaaaataaatatatatacattattacacactaatattaaaggtaaataccattttggactctgtattttacaaaagttaccgattggactttatattttgttaattgataaactggaccctgtattttccaaaatggtaaaaataggaccctgggcttaatttttgacaattttttttaatataatcaacttgaagataattcctaatacgaacagatacaaaaaatgtaaataattttgtcatagcacttttagatcggattataattatattttagtttgataaaaaaatcaattcagggtcctattggtaccattttaaaaaatacagggtctgttttgttttttctcaaaacagaaaatctaattagtaacttttacaaaagacatactacaataatatttaccctaatattaatctaatatatatacacgatatcaaaatgttgaaaactagccaaaattgtcattattgttatattttttttcttgaaagattagtgttattgattgttattagactagtttaaagttgaacataatcaggtctaagcacaattcaactaataactctagcactttgattctcttgaaagaatatcatataataaaagtccaatagaacattactattaggcactagtggtgtccaatacattttataggtagcgttccacgattggttatcaatattctctaaaaattattttcttaagatatataggactcgatgcttaattacactaatagcagtatgacaccgatgagagtattaaacactaagagtaccttttacaaaatctcataataaaagttaaacataatcaagttaaagcacaattcaactaatagctctagatatatctacagtgtaaatggatcgagttggatctgatctagatcatgtaagaatctgtcaccctctgccccgctagattagatactcaaaataaatcaaatccaacctaacttattcggatcagatctgatccgacccaatttttttttttagaattttaattatatatctaaacttataattttatacctattcaattttatattagtactttttgatacaacactatgtttggtattgacttgtatnnnnnnnnnnnnnaaagttataatatattttcaataatctcgaccccaacaccaactacgggtcgggtccgggattgggtctatgtcctgggtccggttcgggtcacgagtctgggtcctaagtttgggttcgagtctcgagttcaagtctcgggtcccgtgtttgggtgcgagtctgagtccgggtcctggctcttggtttgggtttgggtgtgggtcccgagtcctggatctaggtccgggttcgagtctcgagtctgagttcgatcctgggttcgggtctcgggttaggaccctgaaccaagtcccaagtccaagtttgggttcgagtccaggttcgggtatggtcctggctccgggtttgggtttgggtctagaacccaggtttgggtcttgaattcaggttcagattcgggtttggatcttaagcaagtttaggtttggatctcgggcgggtctggtctgggttcgagtcttgaattaaggtttttttaatatattaaaaccggatcggatctgatccaaataatattttggatctgatccaaatatttcggatgagaagtgatctgcaaaatcggagctccaactaaataattttttttgacatgtctatctacattttgattcaggttatggaatgacaaaacacacgaaagtactctggtagagcattctttccatccgattcatgcttagagaacgaatgaacattgaagattcctcttgtcctatttgtgggatagaggaaggaactatgtaacatctatttcttcattgcaacatgacctctcatctatggagagattttctttggtgtctcattcatgttcaagaatcgggaactagaatgcgggattgggtaaaattcatttagaatttgaatatgagagacgtgaaagttgatgatgtgttcttatatgcgtctatcataaatgacactatatggagagcgagaaatgacaaggtacataataattatatgtatagcatcgattattatatagattttattacttattgttatacaaattacgatactctcttttgcctcatttacgacctcctcctgttgtctctgtgtgggctccaccacctatggactggattaaacttacttgtgatgtggtggttagggagggggctaatcatctaaggaaagtcctttgggctagtatcaagagactagttagtaatgaccaattggtctaattgctttaatttatccgatgttattttcaaaaaaaaaaaaattgtccaaggtgtcccactatagacagacaatttttttgaaatgtttccaatttcaagtattttaataatgtatttatgtaaattttgtatacatattatctgtaatttttaaagaatattttccctcacaaaaaaagaatataatttgtatataataaagaatatactttttatttatttattttttttacgttttagtgttagtggttagaataggagaaaagtttagtgctaaataaaattattttttagtgttagttgtaacacaaaatcaaaattttaccgttggagttggacttgccctaaaacaatacaatagattagattgtgctctctctctcctctgcaactcttccatcgaagaacaagaaagaagaagaagaagaagaagaagtagaagacgaaggaaaggacttacaagagggaaattaacttatttttttaaagaaagatttgatttttattatttattgttatttttttgggttgggaaatggggaaattactatgtgattcagcgaccgttgcggacacatttgacccaaagtcagcgccgccgctaccgtcaccgccgcagctcgaagcagtagatctggtcgaccaggctgttactgctatctgttccaccgcttgggatgaggttcttggccttgaagaccagcagagacgccatctccagaggcttcacgctaagggtgtcctgtggaagcatccacaggatgattgtactgaggattcctcttcccctaggtcggtggtttttaggctctctcacggtggtgaggtctcttccgacgggaactgcctgttcacggcgtcgcagaaggctatgaaggccgtgtctgagatcgatgcgaaggagctgaggcggaggacggtgaagaggtttctggaagactttggatctgcgacggtagaagagactgatgttattaacgatgcgattaggcatatgtacgcaccagatctgagaaatggttgggggattcatgtggttcaggaggtgaagttattggctaagaaagaagatcgtttgggtctggattccgccattgatgagctggtcaatcttggaatgcagagagagctggctgctgagtcaatctacaaagagagatgcctttgtgtgaacgatgggccgagttgggcaaagtacatgtcgatttcaggttgctctgatgatgaatacgatatcatcaatttacaatacacagaagagggtctcttatctgttgatgagaatagacaaggccatgctgcagcttttggagatgacatagccattgagtgtctcgccactgaatttcagcgagagatttatgtggtaataatcttaaccaatttttcagtgactattatattcattgctttcaaatgaaaaaaaaaatggagtctttgttaattgggttttgccccatttcttcttatgtggttttctggttttgggtctttttctgtgcattgtttacacattgattactagtgcttttttttaacaagattactagtgcttttgtttacttgttatgtatgcaattttgaaaaagaaaaggaaaaagtgtcttttttttttacaatatattctttattgttttacagttttctataataattaaggtaggttggacatgtaaatgagaaaggaaaaaggaaagtcagcttttcttactcttacctgtgactctctttgtcaatcataggtgcaagcacatggatcagacgcaatggttgatgaagaaaattgtgtgttcttcctaccacaccgtccaagaagccgaatttgtgaacttcctttctttcttttcatgaaaggaacaggttggtgtggagccggagctgatcactatgagcctcttattgcccatccttgctctttcgtttcctcagagaaagttgccatggtactatgagaaagtgcagttttgttgtggcatagagaaagacagattaagtagagagttagcttacatttatttgttcctttcaatgtttggcatgcagtccagttctccctgattgattcaattttcggatcactcttgagagaatttcaaatgcataaagctcattcttttttttgttagtcattagcagccttattagaattggtagaagagcctttctttttccttccttgattctaggcgcaggtctctttgcctgcatttgagcaaacccaacccagccctagaacccgtatactagtcttaattgtttcaccggctattgttgttgtatttttgttgagtttttggagggagcttttcttcttattgcttaaaaggctctatttcggccaatctggaatagtgccaatcaatgttgtatttcagagttgtaactctatgaggaggaaaccaggtcctcgaattcctgggtatcaatatcacagtatctccattttttgcttctatttccttcctattttcttgttgcactgtataaatttaatggcctttctgctcttaatgtgaccaaatgatcctttcttttgttattatagtttctgtttttaaagaccttatgtgttaggaggatggataacaagttttgctgtaaatagtggttgtactgctgtaattgaacatggaaaagaattccatttacaggaactaataacattgatacatcaatggtgaacaatgaattatcatagggatagtggattcaaccatcaatgaagtgcccatgtaaagttgatgtgtttgtatttctatctatgatgtaagatgtgttaggaggataacaagtttgaacttgaagaccacatattgctaacatgtgtttttgcttttcttttagaggaatagatttttatactagcaatttgtgttagaggtaaggataaaaagtgatagaataatttaagtgtgtgtaccaaaaagaaaatgacacaaagtgagagacaagctaggtggaatgaaagagaagagaaagcattatttggtctcttttcatatattgtgtctgccttttatttttaaaaaatttctagtgttatcaataaagtccacgcaaataattagctgtgaagcatttttcctaagggaaaataacagtcactaactagtttgatttttgcaataattggtccaaagaaagaaagaaaaagaggtctcattagtcataagaagagttcatttttaccagaagaatacaccaactgcagtagtaaagagtgctatagctttttttttcctccataacttcaggttttgatcatggcagcagaactggtagctggtgctttgctttctgcttcacttcaggttttgtttgaacgattggcctctgaggagatacccaagctgttccatgggaacaagctgattctagaccagctatatgagttgaagactatgttgtggtcagctcatgcactgctcaataatgctgaggagaagcaacttcgaaacgaggaggttaggatgtggcttatcgagcttcaagatgtgatctgtcaagctgatgacttggtggataggattgattatgaagctctgcgatccaagcttgaacatgatcattctagcagcagtggaagcaaggtatttagccaactgaaatctttgtcaattttcatgtctgaatttgataaatcagttaaagttgatgcaacggagatccttcgtaagctgaagattcttgttgatcaaaaagatgctcttggcctgagagaaggtgctctgaacaaaccttcactaaggccaccagctcctttggtagaacatgctgatgtttatgggagtgatactgagaaaaaaatcattaggatatgttgttaaaaagtgatgtcgatggtggtaataagatttctgtcatcccgattgtagggatgggtggtgttggcaaaactactcttgctcaagttgtttatgaaggtgatagggttcagaaacattttgagttaaaagtatggattactgtgtcggataagtttgatatttttaaaataacgaacataaacgaaatttgaaggagactaaaggaagcactgaaggggaagaattttctctttgttcatgatgatgtatggaacgagtcttattctttgtgggacactttaaagagttcttttgagagcggagcaaatggaagtaaaattcttatgaccacccgaagcacaattgttgcctcgactatggccacagggcatgttcataatctaaacactttgatgaatgaagattgttggcagttgtttctcaaacatgccttcggtattaacattgatcttaatgactaccaagaactacatgtaattggcaagaaaatagttgacaagtgtaaaggtcttcccttagcaataaaatctcttggtggattgttgcgttctgaacgaaatgccaaaaaatgggagggcatacttaatagtgacacatgagaggagttgtacaagaaggagggttccattcttctagctttatggttgagctattgtcacttacctacacatctcaaacaatgttttgcatattgttctttatttcctaaggattatgaatttaaaagagaaaatctgattttggtatggatggctgaaggttttgtgccaatggatacaaggagtaaaaagatggaggaatttgggaataccttgaagatctcttatcaaggtcattctttcagcattcaagtaagaatgaagcccttctccaaatgcatgaccttgtacatgatttagccatattcgtatcaggtgatttttgttctagtttaaacttgagtaatgatttacttagctctgcaacaaagattcgtcatgtgtcatgtaagggaagcacttgcgatcttaacaagcttaacagcttgagcgaagctagttgtttgcgtagatttatagcattgtcattgtggactccaaatgaacaggtctctccaaattactcagttctatttgacatattgcttaggaagggagcttgcttaagagtactttctttaagccgaacttctttcaagaagttgcctgattcaattggcaatctaatacatttaaggtatttggatttgtcttttagtgcaatcgaagagttacctgatttgatttgtagtctgtacaatttgcaaactttattattgtcatggtgtagatgtctttctcaataaccaaagatcatgggaagcttgatcaaactgcgttacttagatattgacaatgtacctttgaaagagatgccgcaaccaatcagtcaaatgaaatgcttgcagttcttaccaaaggtagtattgagtgacaaatataaggttgatgggtttaaaattacagagttagcagaagctgagtatgtacgcgaagggctttgcattttgggtttggaaaatgttaatgatgcaacagaggcttcaaaggctaatttaaaggataagaacaatgatgatgaggctgaaagttcgcaaaaagaattagatgtactggacgcacttcgaccccatacaaacttgaagcatcttgtgattgaaagttatagaggtacaacattctcgaactggattactgattatgctttttccaatttagtatccgtctatttgaaaaatcgtaaaagctgttgttatacaccaccactcggacgagtagcttctctaaaatatctcacaatcgatggattggatagtgtgtttgcaataggtgatgagattgatagcattgttcctctcaattcatttgtttagaaagcttaacaattttatgtggaaagaatggtcattttgtgccaaagttagtagtcaagaatttcaaatgttccctcttctaaaggaactttgcctaaaaaaatgttcaaagcttaatgtcgggttaccttgttatcttccatccttggaacgtctcaatattgagtattgtgaagaaatggaggttttgcttccgagaaatattcaacagactgtcacagccccaccctttctcgcttctgtatttttatcagattgtcctgtgttggaatcacttctgtattggggatcacactccaaagtagagaatatttggttatggagtacaaaagcgctttttaagaaccgtacgaaatgggatctacatagactctcgtgtttgaaattggtaaatatctgtgggtgggaagatgaatcgtttcctgacgaagggctccttcctatcactcttaatgaagttgcaatccaaagctctagcaaccttgaaaccttaaacggcaaggcctttcaaaaacttacatcccttaatttcttatatattggtggctgtaaaagccttcggtgtttgccagcagaagggctgcctgcttcactttcatctttatatatagggggatgtcctttgctaaagcaacgctgcgagaaaggaggagatgattggcctaagcttcaacacatagcttccatgacaacacactaaggcatgttgatgaggaggagcaatattctaacttccctgcaagtatgttttcttttcatttttcttcccacaacttttacaaattctaaaagtagagctgttgttagtttaagaaaatgttttgaatttgattaaccagatattcaatgctaactgagagtccaccaatttgaatcctaattccctagtttcataaggaagtgcctgtaaaaatgttcaagtaggcagttagttagtctccaagtttgataaatgtgtacttctaggtaagctaatacaacagtactatataagatgtgtttgggagataacgagaacagaaagattaggtaattgagaaaggtttcaaataagtttataaaggcttgacccagaaaaatcttttgggattgcttagtgaaaatctaccatttattggccaaatcacatacatgatgtattcttaattagtgttgagagttttaatcttcttggcattattttgcagagctaattaccactaaggtatgacaatgacaatgtagtttattggcaacaagccgattggtaagcgtggctttggtcgaagcagaagcaggagcaggatataatagctacagaaggcaaagaagttcatattgccacgacaagccgattgttattctatgttgttttactctacttaaaggcaaaatggaatgcctttgagggtagatttggagtgaaactaagagtccttttaggattagtgtttctttcctcggttcttgaatgccatgtttagcagttccttatcctgagatatggttttgtgtttgtgtctttgtttctaaggctctatctatgattgtgactgactttggccattatgcttggtagagttgctttgaaagtcatgctgatttaaattagaaaaaaaaaaggaacaaatagataatatcattcctctcttaataactatggcttgccaaaatggttgattcattttattgtttcatatcaagaacaagaacacaagtaatatgtctaatttcttgatctgtttgactctgatctgatctgatgtgtgtactgattgttggtattcaattgacatgtggagtcaatccctgattgttggtgttctcatcttggggttttttgctaattggaatctgtttcagttgttttggatcctagaagtttcaaatcaatactagtacaatttaatattgattagacatattctaatctatctcataatggcaatgctttccctcacaaaacaattgatatatgaagagggacattaatttataaattaacattatttgtaatgctaacaaagagaaggaaaaaataaggaccattccatatacacttggtcttgatcacttttgggtgaaaaaaatttcataatattgttaaaagatttacaattctgatttaacttaaaaaaaaatattctccattcttccatatttgcagtaagcagcaaactttctctcttcttttttttcatctaatatttaaaaatgaattttatatttttcaaaatagtataaataagattttgagctcaatttttaacaattttttcaataaaaccaacttaaaaataattcctaacatgaatagatgttattaatgtaataagttttgtcataacatttagatcgagttattattaagttnnattttaataaaaaatcagttcagatactatgtagtactattttaaaaaatacaaaatttaatttattatttgacagagttaagagtttaataaataacttttaccatttacagaatttaaaataatattaatctttaacataattaatattttataacattattaattgtaatgcactaatgctatataataatatatgataagaaatagtattgcatctatttaatttgtattttattttactaatttttttggagcacagtgatcatcactaaatttcataatacaaggcactataaactaaaagaaagaaaagaaagaaaaatgatgattaaggaaagactagtccactaacacagcttcctaattattatcaaacaaagcttagaccaactgatcaatacatcaccactaccagactagctaacaccatcttttattctctttcttctattgttgcttttccacatctgtttggctacacatttgagcaacatttttttgatatctaagtctatccctagctcggtcaagtcctagtgccaagatcagaagaaaagagagagaaaaccaaagttgagaggaaaagaaagagagaaagagagagagaatcatgagggttgtaatggagtgattatgtttctggtcgtggagtaggcaagataacacgttgttcgaaccactcgatttcatttgtccattttattcaatttgtagttgttatgttctgttcttatatcttgtctttagttgtttattttgtgttgagacaaattccaatgatattgtccactttggcttaacctttaacggttttatttttggacaccttcccaaaaaatttcatactaatggaggacgtaaaacacttatattcaagacaactcttgcttattcttttagttcctacttcactacttctgtctacatagtcaagaagaatcatggcagtcgatcatgttgctggtgcttcgcttctgcctcacttcagattttgtttgaaagaaagattggcctctaagcacataccccagctgatcaaggggaagaaagtcatcatggaccagctaaatgatgctgaggataagcaacttagaaacagtttgtctgagaaaacaattgtcaattcagtacatgcacactctacatcttacctaacagtcactttgagaggcttgttatacaaaccatttgtatttgtacacataattaagtgaaaacagtttataatagtgttagtaatttagtagaaactgtacctaactttaattttttgttagccaatcatattgcagaagaaattcaatggcatttctttaatgtgtattataaattactagtagagtcatcactacattccaaattaattacaacccataagcactaatacaactttttctgttaaataatatgaacaaagagttcaataacataaaaaggagcattaaacacttgcttttaaccaaatacagtttgtcctttattgaaaactgaggccggccattacactttcttccattattgctttgctttctggatttgattcctttcacttgaggttttgatcatggcagccgaattggtagctggtgctttgctttctgcttcacttcaggttttgtttgaaagattggcctgtgaggagataccccagctgtttcagggaaagaaagtgatattggatcagctagatgagttgaacactgtgttgttatcagctaatgtacttctcaatgatgctgaggagaagcaacttcgaaatgaggaagttagaaagtggttgttcaagcttcaagatgtgatctatcaagctgatgacttgcttgataggattgactatgaagctctgcaatccaagcttgaagatgatcaatctagtagcagtggaagcaaggtatttcgccaactgaaatctttttcgttattcatgtctgaattcgatagatctgttaagcttgatgcgatggagatccttcgtaagctgaaaattcttgttgatcaaaaagatgctcttggcctaagagaaggtgctcagaacaaaccttcaccaagaccaccagctcctttggtagaacatggtgatgtttatgggagagatattgagaagaaagccatcattgatatgttgctaaaagatgatgttgaaggtggtaataagatttctgtcatcccaattgttgggatgggtggtattggcaaaactactcttgctcaagttgtttatgatgatgacagagttcagaaacattttgagttaaaagtatggattactgtgtcagatgagtttgatatttttaagataacaaaagagattgttaagggtgtcacctctagaagatgtgatattgagaatttcgaagaacttcgaaggaggttgaaggaagaattgaaggggaagaaatttctctttgttcatgatgatgtttggaatgaatcttattctctatgggacactttgaagagctctttcgagtctggagcaactggaagtaaaattcttgtgactactcgaagcacaattgtggcttctactatggccactgggaaggttcatgatctaaaaactttgttgaatgaagattgttggaaactctttgttaaacatgcctttggtaatggcattgatctcaatgagtaccgtgagctagaagtaattggtaggaaaatagttgaaatgtgcaatggtttgcccttagcaataaaatctttaggtggattgctacgttctgaacgaaatgccaagaaatgggaggacatacttaatagtgacacatgggaggagttgtacaagaaggagggttcgattcttccagctttatggttaagttatcgtcacttacctgcacatctcaagcaatgtttcgcgtattgttcattgtttccaaaagatcatgaatttgaaagagaaaatttgattttgttatggatggctgaagggtttttgccaatggatacacaaagtaaaaagatggaggaattcggaaaggaataccttgaagatcttttatcaaggtcattctttcaacatgcaagtagtaagaaaggatctcttctccaaatgcatgatctcatacatgatttagccatacttgtatcacatgatttttgttccaaattggagatgagtgatagctattcatcaaagactcgacgtgtgtcatgtaatgaaagtagttacgaccttaacaagcttaacagtttgcgtaaagctagttgtttacgtaccttcataacattgtggaatccaaatagacaagtctctccaaactacccaaactacatagtcttgtttgatatattgtttacaaaaggaagttgtttaagagtgctttctttaagtgaacgtattaccaagttgtttggtagaaactttatcaagcagttgccggattcaattggaaatttgaagcatttaaggtacttggatttgtctggtactgaaatcgaagagttacctgattcaatttgtagtttgtacaatttacaaactttattgctttcagggtgtggaaaactttctcatttaccaaagaatatgagaaacttgatcaagttgcgttacttagatattgaaggtgtgcctttgaaagaaatgccaaaaggaattagtgagatgaaatacttgcaattctgtccaaaggtaattttgagtgacaaatataatgttgatgggtttaaaatagcagagttagcaaaggctgaatatgtacgcaaaagactttccatttcgggtttggaaaatattaatgatgcaactgaggcttcaaaggctaatttaaaggataagaaggaccttacaaaactaactttgagttggaacagtgatgttgttggtgttgatagttcacaaaaagaattagatgtacttgatgcacttcgaccccatacaaacttgaagcatcttgtgattgaaagttatagaggtacaacattttcgaattggattactgatgatgctttttctaatttagtatctgtctatttgaaaaattgtagaagttgttgttatataccaccacttggaagactagcttctttgaaagatctcttcataagtggatgtgatagtttgttgtcaataggtgatgagattgatagcaatggtcctctattcatttgtttagaaaacttaacaattgacaatatgttgatgtggaaagaatggtcatttggtagtgaagctattcttcaaggtcaaatattccctcttcttaaatcacttagtctatggagttgtccaaaacttaaagttggtttaccttgttatcttccatccttggaaagtcttagaatcaatggttgtgaagaaatggaggttttggttccaagaactactcaacaaagtgtcatagccccaccttttcttcttgtgtccctatgtattgaaaattgccctatgttggaatcacttctagattgggaattacactccaaagtagaggaaatttggttatggaacacaaaagctctttttgagaaacgttgtaaatgggatctacatagactcttgtgtttgaaattcttgaacatccttgggtgggaagatgaatcatttcttgatgaagggctccttcctatcactctaaatacattattaattcgaagttgtaacaaccttgaaactctaaatggcaaagcctttcaacaactcacatctcttcaaacattggatattagtggatgtaaaaggttgtggtgcttgccacaagaagggttgcctaattccctttctaaattatatatcagtgaatgccctttggtaaagcaacgatgtgagaaaggaggagaagattggcctaagattcaacacatcaaacgtgtgaatttggatggaaagtgtatcaattaaatgcccccaattgtctataggtacatttttttccctttcttctatcttatcttattttttaactgttgcttattatgtttaataaatggacaaaatttatcttttaaacaggtacttacgttctgtcaggaagagaatcttttagtgtcgattctaaacagacatattagccaacctattgtgtcggttcgaagaagttgaccaatgtgttgactaaagggaaatgatcattttggagtagtgaagatctatggtcatgaatgattatcttttgctacataattgttttgttggagtagtgatgatcactttggtttttatgctaagtagagttgcttttggaaatcataacatgctgatttagtgtaacattggtttgattttgattgtttttgtagtttaaatatgagtttcaaaattgaagtaatatgattttgggagagtttaaagcttaacgggctaggtaatcaaggatccttaagcactcaaacagtgttcccatctcaaatgttccatcgatattattataattgtataatttttgttcttagaaaacaagaaatatttctttctttatctttctttctttatcaaaaaagaaaaaatataattgtgtggtctaattttgattatgtgtcctaatatgattaagaaagatctaactaaacttatttttcaatttttacaattttaaaattaatatgagattaaaacaaaaaaaaaataatatgagattgatcgaccaataaaaatataacgcgtattatcttaataaatacaatgagcatttttaatattggtagtaataggaatgaaaagtaacaatatgtggaaaaatgatgctatataattgtatgaaattagaaaacataaactatttatgttgtaaatttctcaaaataaaataaatctatcttgtatttatctttatttttatttctatagctcaaattcaaatttacttttatcacacttcaagctcaatgaaacaatcccatccaaataaaaaagaacaggaaattttgttcgagctaatctatcagtatcatattaaaattaaaaaaaaaaaattaattttaagttacagagagaataaaaaaatgaagcatttttaaaaaaaaaataataaagattaaatattttttatatgaggtaaaagaaagaattttatttttttaattagatagtaaaattaaatatgaaaactttcttaataattctaatttatgagcaatacgctaaggtggcaaaagtaataaaatagactagaaataatttttattttatttctttatttagttgcattttaaagtatttaaatatcattttaatggaactacttttccatatttttggtagaataattattctatcttaaatggatggaaaattatttcaatgaaagatgaaaaaaaatttaataattctttgatcaattttgtatgcattttaaatttcaactgaaggaactatttcaagaaaaaaaattaataatttttttatcaatattttttttatgcattttaaatttaatttcattactattcttattttaattcttccctttcaaggaactcgactattctgtctattcagtttggttgtgtgattcgggagtgtaaagccatgttggctaatctaaataatgtttatttttgttttattaagcggtcagctaatagagtcgctcatgagtttgctagagcgtctttattatatcctaattgtattttcagtatggaaaacattccaactgagttattacctgttttagtgactgatttcgaaagttaataaagatttgatttttcttttcaaaaaaaaaaaattcttccctttcatatcttttcattcattcccaccaaacggcagaagaagacattttgatcctttgttcatgtcttttttttttggtacagcttttaacaaaatagaaaacaaaattaactattcaaaactcaagataaaactacaaccaaaaagcctcaaaatcattattgaaattatgtccaaaaaggccaatacaaataacatagctactaagacaaacaaacaaacaaacaaacaaaatcaccacaccaaaggaaaatcaaaaggcagaggtaacaacaaagaagaattaagcaaatcaggtcgaaaaaaaccaaatcttctaagaacttgattatctgcaaaattcaaagccctctgcatcccattccaacaagcttcccaagtataagtaggattaaattccccactacatggctcacaacctgtaaaatgtacaacaaaaggtcttctctttactattccattaacatactcttctctcaacaaaccataatactcactcactttctcagcatgtcttctcctcaaaatctcaactttttgttcaatctcaatataactcttactaatatcatcaagatcatcaactaaacttaaccaatacccttcaaagttataatcactctcaagaaaaatcttctcaccccatttctctctctctttcaaaagaagataaatcaaagcagattgatcatctgattcaggatacaacttatctttcagtaatgatttctgggtttttccccatttttcataatctgggctcttaggtcccatactagtccacctctccataatctccattgaccattgacaatttcttatcaagaaaacgccggcgtttaaactggtccagcttttgttgtcgtagaccaaatttgaccacccatgaacgacaagattgaatctttcgtatttctccaaaggtaatttgaactccatgtctgtaaaaacggcatcggaatcgacccaccaaacccattcaacttccgggtgagctaacatggctgatcggattaatgggtacttagcccaaaacccaggcatttgaggatgaaacagagcattgttgtagaagatttcatggccatgaatacgactgtaatcgactttgttcttaaacaaccgaagatgtagatgatcgccggtggggttccggcaaacggaaggttgagaacctgtaacgatcaaaactcgattgtttgaactttcggcgaagtgggtatggtgtttgagccattgttttcgtttttggtcccagtttttgactggtcggtcaatggagtagcttaattctgggtcgtcgtagaatgttgactcaggtgagtcaacgacggaagagactgtgtttaagctgggaacgacgtcgtttgaggttggttgagtagtggtgaaaatggtttcgaataatgggtttggattaatggaggtgagaagtgcccatatcaatgaaatggctaatgaagctccgccgacgaagagaaagccgtcggcgatgagtgaagctgttttgtataaaacgctgcgttttggtgaggtttggtatcgagaaaattcaggcaaaaccattttgaagagagtacttttggttacgtttctttcttctataactaaagaaagaacaatataagagagtgagttagtgagtgagtgactcactaaagtttgtaactttattttgtttttttgtttttttcttgaatattatattgagatttatataaagaaccgatttttatgtacatgcaaagcaaggaaagaataaaagaagagtcttttcttgcatgaatgaactttgatattttagggtttttttgagtgtcggtttgtctcacttttttttttttggtcaagtttagaagatacctattattgttatagtgatgatgatacaatctaggcattcttcatttatggttagttggagagaagagagtcccaataatatatattgaagtaaggaccttttttcttctagtgtgaataaaaggataagcttttttgtattcatattggattttgttacggaagtttgcacatggctctagtaaatgcagtgtctccttgtctcccttttagagagagagagagagagagaaaggttaggtggggtggtgaatggttatggatttaggcaagacattattcaagtcaagttgttaaaaatataagccttgtcaatctttgatggttttcatgcatgtgtattatttttgtattatgaaaatctcactgtccaaagtaatcaaaacacattgaaaagtgcaagatttttttaaattaaaatgagaaacgtgtcataattttttattgattttatgatacttgctaagatagtgtgttgaaacatgtctaaaaaactagtttataccatatatgctccttaattttagaatatctttcctattttcctttttttattttatttgtttctttaactttcatctgaaaaaaaaatccaagtttcttaacatgtttccttattttaaggagaagataatggaagtaaat

SEQ ID NO: 14449 - DNA, 10057 bp, Cannabis sativa
tcaagtagaacatccaaaacgttaggttattttacctgttaaacaactgaacattgataaatgaaaatatctgagcgaacagttcgcagatcagcaatggaggtacctgaaagaccaccatgatattggagaggattatcatgtatatggcaagaaagataaccattttatagcacatagtttagagttatatactcacaaaattggctttcatgatcatcaagtagttatttaaggtattcacaatgctctgccagtgagcatttacagcttgttgcgcttcagaattagcttgtgaatgcccctgcaacacactaacccgagttgttccatacctcggtgccttttatttaggagccaaagaagtatagagcacaaaagttctaattagtaatatattctcgcatacaaagaatgaataacataaataaaagttatcagaaatatgtcattttgcaaagtgactttaaaaagagtctcttttcactgattacttagtttatttatttttattcatatgatacaaaaatgaccactcacacgcacaaacatatctattatccatttgagtatacaatgtatatttcaaattgtgaattgtcaagaataaaacataatggtgacaaagctattggttgataggtagagaacgaagaacacaactactaaagatatgagaaagctttgcatatacctggatgcacaacccaataaacggggtgatgtcgtttttcaaattgtctctcagttttccatatatattctcaagaacagctataagttgctgcttgaaaagcaaagttggatatctgggttcgacatgccgaacttcatccactccaccaagtacccgattactgaagaaggagaaaccagcactctgtggagatgcacgaaggccctagaaatttggatcaatgaaaacagaactttactagaacagcacaaactaggaacattttcaaatgtttggaaaattagaaagacctatcttacttgagacatcctcccaatcagagaagttggcatccttcgacgttgtggagttaagccggcaactccagtagctcgtagtgtgcgttgaaggagtaaaagcaatgtggatgtattagacagccagtaagatagcacatcactgttaccacgggccttctgtggaattaaacttgcatcagtaacaagtcatgacaatccagttataagatctaatagagtttaacagatcacgttctatgacgagactgcatcacattcatggagctgacttgtccccgtatttcaaacataaaccataatccataaaacccagttgaaactagaaaaaaacaaacaaacaaacaaacaatttacctcaactaatgtgcctatatttttaatgatactgtcaaaaatactggctctttcaacctcaaatgacttccactgcagaaggcatttgtatatcagacaagcagcaacaggcctacccccagagaaacctagatcttgggatatacacttaatgagcaggtcatgattcgcctgcaccaatacatatagttatgtaaagaatgaagacaatctaaaaattaaaggccctatctcagaaaaacagtagagtactgaaatctataagttcacctgctgcttcttatttgcagatttctgtgggctttcttcagtttcagactgctgaccattacatgttataagatactgagcaatcaaaagatattatgtgtattatttaaaaacaagattttacctaaaaaagtaaacttgaaaaaaaaaaattaaaaaaacacttactctactttctctcatttcttcattatcagcatgcccattctctacggtctgtattttgttgaagcgtgcacaaattatttaattactcaaagaagtcagcaaaatatggttgaatgcaaatataagtttcatgggcgcacaagaataacttttaatttcttgcagataaagacttaccgggtttcttctcatttctccattaccagcatgaccattctccaccgtctgatattttattgaaaaagtgaatatatataattacacaaacaagtcaccaatatggatgaatgcaaatataaaatttcatgcaagtaccataataatttctttacagtcttgcacataaaaacacttaccgggttttctctcttttctacattgtcagcatgcccattctctaccgtcgtctgttattttgtagaaaatgtgaaatatattgaattaaaagaagtcaccaatatgtatgaatgcaaatagtcttttcactgtcttgcacataaagacacttaccgggttttctctcatttctacgttgtaagcatgcccattctctaccatcatctgttattttgtagaaaatatgaaatatattgaattaatgcaaatataatttttttcattgtcttgcacattaagacacttaccgggttttctctcatttctactttgccagcatgcccattttgtatcgtcgtctgttattttgttgaaaaatgtgaaatatatttaaattactcaaagaagtcaccacaatatggatgaatgcaaatataaagtttcaaacgcaccagaataatttttgactttcttgcagatgaagtttggccagtgggtgagatagatggggcctctttccggagtacctggttctctgattctaaattagataccgtctcttgaagcctaaaaacaggtgagaaattgattagaaaatcataagagttttcttttcgtatatttaaattggtaacacatcattttggcaactagaagaactctccacgccaaacatttcaattccctatattcattagtacaaagctttcaaaggaagcataaatttgtaaattatgataaaattataacatttcattgagaagaatacttgtttgaatactgtaaattagcaaccatgttccatttcaaacctctgcaatgactcttcaaactcatcttctttcatcttcgcaagttccagcttcgtagccaatttctcatacgcgatttgttcagcagcataaccctcaatgaccttctcatatttctgtgcttcggatgctagtaacatctataccaaaaagataataattcatcaccttacagaaaattccaattgaatatgtaaacaatttgacacccacattttcaattcatatttacttctcgtccgaataactgaaacagatacaatcttttaatatgaaaatggcggttgaaatttaatcatcaatcaaatgttctacatgatcataaataaattcacatgaagcaattacgtgagacacagtaaacatcattctaccttcaacttctcaacttcagtggtcaaggattcaaccttttccatatcttgtactaaaactgggatctccttaatgacaggaggtgcttcttcaatagcttttttagctacctctcgctctttaataaccaaggcgtttgcttcttctacttgtagatcttttgcacgcaaaatatccttcaattttgcaatttcctgagcttttgactcctcgagatcagtctatttcagaaaccaaaaataactatatcaaattataaccacaaaatggctaaaaatagaaattatatggtatttaaactaaatgtgcatataaacttttgattaaagtaaacattctaaaactaactcgttttaatcggaataatacagtttgcaactatcaccatataaattaacatcggcattaataatttttttactaatggtggctcttattttcaaattttatactccttaacttgattctgaatctctttattaaaagaaaacatgtttcttaaatttgaatttgaaattttttattaaaattaatggaaaaattgaaaatcacatgatgtaaaatatagaaagaaaaaactaccctcaaccgtttctccaattgtaaccgccaagtaagctcctcaacacgcttttccaatttgtccttcgcttctttaagagcccctgtttctctggcagcctaaataaatttgaaaaaaaacagcatcacttactcagaaacccgcactcaacatgaaaccagatcacattgagttgaaagtatattaatgtgtatatatgtaatcgataacatgccattttgagctttctgagctcttttcttgcaactctgcatctccattcacactgagtcacaaccacagccttttgtagacttctatagtaagaatgagctcggtagcaatgccaatgagcctacaaaccatcaataataatattcaatgaatacaagaagtttagcaactttaacaaagaaatacataatacaaaaagtagttgcaaaaagaaaataaaacaatcacatgacaaacacaaatatattcttaccatacattcaatgaagtattccctccttaaaaagaaaaaaggtaaaattaattactaaatgcataagtatgccatgatacctgaatgttgacagcagcctttgtttgctttcggaatctgaactccttacgtgcaagcattgcttttatgcctgcctgcaattttattgcggaggaccgttgtattctgtaggattttgtgattctatattgcttgaaattcttctggatcttcaatgctgcagcttcttgtctcaagtgctgatacagtttgcatgcgattttacctacaaaaaattggaaataaaaaaagctttttattttcattgaaggtaaaagcaaaaataaagtgaactgatcacaaaaagtacattatgatattaaagaactgaactcttatatgtttctttaaaataaaagttcgtacagagagattgtcacagacaaacatgcatgcctaaaaccatcaacttaaggacacaactgaacaacctcggatgcatctcaaaacctgatctcagatattaacacagctccagattttcttttttatactaataagtctcatgaattttaatttgattatctaaacgtatgtctagaaaataatcttattaatttgtgatatcctgacatgtttcccaaaaggaagagatgagttagaactttagcagacaaacggagagatatttgagtaaaaaacaaacctcgccaacgggattgcaactgaattgcagctttgcgcaatgtaacaaactctctatgagcaatgaaggtacgaatttgtcgttgaattgttctagcagcatttccaagtacttctgtcctcctagcatccagctcagccatctgacctgctctgaggaagacctttgacttgcctatctgtaagaacacaccacagagacggtactgatatgcaagtgcaaaacgaaacctcaatcttttgggtataaaagaaaagtattaatcaaaaacctggtatcctttcaatccctttttatcaagaatcatttggcttgcaaccttgtcatcataactgcaataagatggaaaatgcttgtgagatattacataaaaatttgtattaaaacaatcacagcatgtataaagtaaaaccataaaacaaaacttactttgcttctaaaacttcaggaaccaaaagaccaaaacgatttacaaaatcataaaatgtgcgtctagtaggatagccagcacaactaatcctgattgcctcaaggacaccctaaacaagaagagaaacgtaaaaatatttctctaaaaagaaaatacaaaatattaattaaaaagcatatgaataaataggaataagaagagcagttcatgtgaaaactatagatctatttaaggaaaactaaaagtaacattcaagagacgaatgattgggaagatatgcttacaccgcatcgcaattgttgaataatattaagattctcaaatatagcaggtttcaggacactgtttggcttcacacatctaatgtagtgaggtactgttgtactcaagatttccatcaaagactgaagttgtagctgtgaattaataaaagtctatcagtccttatgctttatgatcagaatacaaaacacattctgacattcataacacaaaattggagacatttgcaataagagagataaaaaatcaaagaattggtgattttaaggaagagcattggcctaatgtacaatttattattattttttaaatggaagaggacttcaaatatacaaaaattcatttaaaaagaaattacataactacttcatgggataaatcaattccaataaaaatttaaatagcaacgtgtgaaaataaccttaaagcgcgatccaatggaagaaaatttggatgactttgacgaatcttctggaagtgggggaaacagaccacccacaaatgagcaattagaggctgttagcaaagcttggtgttcagcaatgacataatctttgttcttgtctagaaactgattggcttgataagttacctttgcaaggaagaaaatgttaagagactgagttgattaacctttcaagtcaaaagtcttatataagtatacaaccaaatacaacgaatttacctcgcctgcatagtgtgatatagtaaaatcagtctgagaaagctttggctttataaatcgtttctcatttttgaaagtctgatacaacttctgtgcaaaagtttcatgagtggactttggaaacatgctgcaacaaataataatatgcatatacaatgtatttattattgtacacaatatattcaaaattagcaaaaaaaaaaaggatcaaacaagagcaacataccaggcttcatctaagagtgctataattcctccaggtttctgtgaataattaaattgatttaccttagaaacacaatgatactaacactaataaatttatcaaaaatgactttagagttacacttccacaacatgtataaaaggtcagaaataggaacaagcaacagctaaaaaccttttcaattagatccaacacatcttggttatcgataaactcaatatagctccagtctatttcttctttgttgtattcctcttgttccattttaaacacatgctgcaatcgcaagagagcaagaaattagactctcaaatacatgtggagtatagcaaagtttatttattttatttttttttatgaatagtatagcaaatttagtctcgtcaaatatcaacaataaatactaacctgattaaaatgttgttgtagtttttcatttgtaaagttgatacaaaactgctcaaaactgttacgttaaacaccgaacatagcatagtatcaataattacacacatgtatagtttcctttcttgaaagaaataataatgatgtacgaaatcgcggtcataaatgtagtatctttggtacttgacacatggcacagtacactatcctttctcatcatacctattgcacttaaaactttcaaagccataaatatcaagaactccaattattgaatttgagtttggatcctgcccaattgaattgttgattttgtccaccagcctgaaacaatatcgtaatgcatgttattatcttcatgcaataattacaagatagataaatatatctaggtcaagggaaggcaaggctcaccaatcgaataagcgagaatataatgttttagctagtgcatccctgctattaatcgcattatcagggtcgagagtttttgtgataacttcttctggagtcaccattactcgtttaatgagagcctcttccaagctctgggcatcacatctatatgatgattttagttaatatgtgacaggaataactagatgtatatatggaaataaattaaccatgacaaaataccgaagaagttctgaggtcacattaagatgatatctcgattcatcatctttgatgactgaggaatctatttcctcccctttggaaaaattgatattaccaaggtgaagtattgcagctacaactctaaatattgactcctggaagaaccacaagtaatcagaaatatgattaaaccataaaattgaaagttgacacttcaaattagaatatgaacctgctcctcttcactgattccgataatgctcatcgcccttctagtagcaagatattcatcaccatcactcaccccatccagctcataacatttggactgatttaaataatggaaagacttggggctacccaatttatatttctcaatatcctgccattaaaaaaagaagaagaaactgtagtcagaactctataagaatgaatatttcattctgtcaaatgtgcaaacttttaaagaaggttacgaaacaaagaaaacctaagagcagcaatgtcaaaatacctcttttggtgcagcacaaagaaggtagaaacaatggtagtttctctctggatcagaaatttggcaaacccgagacctttcaagcagataggttttgatagcagccccagatatcctcccatacttattaaattgaatttcaacaaattttccaaaacgactgtgtattacatccagaggagataatggatatcagaatctttaacaaagctatataaaacagccttcaacaggtcaaataacagtataaaactattgcataccttgagttgttatttctaactgttttagcattgccaaatgcttcaagcactgggttggactacaatatatttgagcccaaaaacaccaaaaactttagttagacccgcttagttatgatagtacataaaactcaacacgtgctaaacagcatatttatcttacctccaaaacttgttgttcaacagtacatccttccactcccgagtggccacccaaataggcaagatatctcatgagcatctttgttgtctcagttttaccagcaccactctctccacttaccaaaatggaattactttttccctcattaatcattgccctattttcgcaagacaaaaacatcaggaaatagtgtaagtttcttgagagaactatagaatacatatttcacctgtatgcagcatctccaaccgcgaaaacatgagggcttagttctccaaaaggagctcctttatattgtgccatcatgtgagtatcataaagatgatccaatcgttgaaatggattgactgctatcagaatatttccagtgtatgtctgagaaggcaaattaccaaaattagaatccagtaatgttgctgcaccttaatatttctaaacaaatatatggaagtaaatgtgacacacatagatttcattaagttcatatctaatggccaggttttccagaactccaggttcatgcaaatatgacagttttgtcatatcatctatccctccaggtggaacttcggtatcctttggaaaaacattcatgctatctgtgattacctgttgaaaattcatttgagtgaattagtaccaaatatagaagataataaaggaaaattacaagttacaacacaataaatgcatcttcatatgtatataaatacgcaagcatgtctcatttgttttactacgtctgcatggctgacgaagcccttactgtttttccatttgtggtatgaacgtgaacctccaagccattgatccgcgtaacttctccatcaatccaagccaaagtaggatcttcaacccatacatgagagcctaacactatgttaactggtgcagcctgaaaaaagtaagcaacaaaatgcaattgcaaacatcacactcaatataaaaggaatctttaatttactttatatcccatgtaaaaggtttaaaaaatgttatcttgaaaataaagaaaacaagactaatatcaccatgccactagtgaatttggagttctaaactgaaaacattaatagaacagttgcattgcattcaaaaccacaatggcattaggaacaacagtgactttttgtttcgaacaagtaccaaccataacatccattacatagcgtatttgagacaaagactatcatccaaagtacaaacaaaaacgattactgtttaaagtgtcaactcataacaactatgcccaaacaaaaattattaacagggaaagcccaatgattgtttaataaatagatcaataactacaattgttaacacttactaagcaaatgtaacaggttaaagggttctctgcaacattaagcaatgagaacccaaaaactagtatcatagaaga

SEQ ID NO: 14450 - DNA, 11423 bp, Cannabis sativa
tataaaatctctaacagttgtgacttatagctatacagagaactaagaccacttagctatgaataaaacagtcaaccacatattaaagttatgaaatttttaattaatagttgatagtacggttctttgatatctgctcttcagtgcaagtaatctcagttcgaattacggatgtagtatgacatcaaagtgaaagtattatatataatagagattatatatgacaagtacttatatgaataaagtagtctttattaacatactgtttactgtaaagacttgattcatatcataacgatgatcaatagtagatcggcctaaatcctgagttatcatgaattattagtttttttgattcaatcgtaaaagtttctcagagaagatgattctcacaacttctgtttttggaatctaaaatgtggatggctgggaacatgatttgcaattatagaatcttaactttcctaacgaatcaaatattggttcactttaaatgttaattttagaactggaatgttgtgcacaaatttagatgagatctaaattatacttctactaatgaattaatggtactaaaggataagcaagaaattagaaggataaaaaggtaatttgaccaaaactaattatgaaccaatacgtggagggctaatcactgaaattgattatatcaatggacactgtactaatacttagtaaatataattctataattactaagagtttaattctatatttttagtggagtaatcatgaaattaataaacgaagattatttggttgatgagactcaataaataatctagtttattagagcttagaataataggtccatggtccctgaatcgccactttaaaacactgccaagggttgagataaagagtagtataatgtcattcggaaaaatctagtttgaattggcaaaatagtaattatttatttttttgtaataaataaataattttttaaaattaattaaataggagaaaagacaaaaagttgttaagataaaaattttcaaaataagatttgttgagacaaaagttgtcaggacacttgtcctaaacaacaagggtaggcgcctatccctataggtttgtctttgttgggttaattaattatttaattaatttaattaggtaaatatctaatttaagaagtggttatagatatttcaaggttgttgagatattctcaagtaattgagagatttcctcataaatatcagtttttgaattaagtaatagatatttattttttaagtaattaaatataatttaaatcacggattttaactagtataaatagaagtctgatttaagaaatctaaacatcattctacactgtaattttgaaattaagagagaaaaagaaaaaagttttctctctcaaagtgttcttgctcatgtgttgacaaattaataagaacacagtatacaatttatcctaatagcccacactattctttgtgtgtggtggaacgatttagaagacactggtgtgagctcaaattgtattttttggattaaggtcaggtaacttgagatggccgaagaacattagtgatctgcaaaagaggattctgccagccaaacctgacttgctgttgatcttgaacactgtcttctcaaccactctctaccagttgtggagaaataggaatgattgtctttttaatgttgtttgtaattcagcttcttctcttagcaaggagataaagtgtatggttaaggctagagtttttgaatttctttgtaccaatcaaaagaggaaagaccgttatgtattgagcgtagtgaataattggtagctgctctttttcttttttgtggtggttggttgttgcctccggccagtattttgtacttggtttgttcttttgaataaaaagtttccttttgttaaaaaaaaaatgatatgaattccaagaaatcaataaaattttcaaatctaatgaatacacagctcaatatcccatcaaaatttgttacattagcaatacaaaacatgaagtgcacaagactataatttgcagcgacagtaatatcggtacaacaaaggtatatgtttgcttcggtcgcctccatacaaaacaaagaaaagaaagaaaatgaatacaagagtgagtatgataaagtagatttactcttcagataaaacacctcatggtaatgatgttcatcccccaaaacagctcactccataaaacttcagtgccttaaaacaattcggtttgcacaaaagagttgctaaaaaatcccaacattctacaactgagcttcaaggagcactcactgaagaacagtttgattgaattccagccacagaaaccagattcccagaaagaaaaaaatggctaatataggatgtatttatttactcagtttccttccgacgaatgtttcgcttctcgtctgacctgtgatgatacagtttggcaatggctcttctctcacagtcctgcaaaacattgaaaaccagataaatcggtttaatttaatacgtgtgcataagaaattgtccttttcaatttaatattcttctgaacaattaatttgtggttggatgtcatcggttgatgttgattatgaattacccaccttgaacatattaagatgaaacggttttccaggattcatcctttttaacttctggaatgtataggcaaaacttagctgatcacgaggagtaaatcgttcaacctcattaaaccatagacaagagaacaaatttgacattggggtgtgagctcgaatgatgaatgacccttcaggtacatctgtgaataacaagagaaaaaacaaatgtaatgaaaattatgaagaaaattacactcaactaatgatcattgaggacctgacaaaaaagaaaaagaagactactgaggaagatcattactgctggggagaagcttttctggatctgaggcattaaatctagtcaagccatcagcttgataaaattcgaattgttcatctatgatggtatggttgtacttgttcaatttcttattttgcataacctcctcccaaacacaatgtctgtcatagtgattggagattgcgtactccttatcctttcgccacaggaagtattccaatattagtagagggtcaagttggagacgtaatttgctgtctaaccaaatagaatacctgcaatgatttgaaaaatttaaaatagagcttctcaacattacagatgaacaatttttttataaggaagaaggaaaacaaaaatactaggaagtgagttgctatttagcgcagcaatattgaaatacaccaaagacaaagaacatcagcaaaatgaaacataaaatcctgttgtttgtatttgtcatgggtctattaccaaggcaactgccttttgatatggtaccacaaagggaatcatatcatacaatgacaaccctaaaggtattcactttattaatcttccatcagattaattctctatacagcgcagaaaacccatttgaattcagtactaggtggtacaaagttaaaatttaccagcaggggaatcaggaaaattgtgtcaaaaggttcaaaagagatcggaaattaatgagaatgggattcgatcaacaaagatgtactgacaacatgttccattttcatactgctttttagagacaaacaggttttccagttttgctttaatatatggctgggtaagagataaaattagctatatctgattctacggtctctaataggcactgcacggaacataaatctgattgtgcgtcaatttcatgttcaaaatatgacaacatatttcatatgcaaagcagtgatgcatacatgacaataagggacgaacaagtatgcatctttacttttttttcaattagaaataaatgcagtcattagcagctatatgaaatattattacgcatcaagaaactttcacatagtattattcccaccttgcagatggaaaaagccggtgaggtagaagtttaggtatttttccaactctccgcatatcagcatatggcaagtttttcaccaccacaatcctccataatccaataaaacccattctgtctggtgtctgaccttctgaagaaagtgtttctagagtaatctcatcaatgaacataacaaaacagacatttttccttgacaaacgagtgacctgaaattaattaactgacaatgagccacatttaatgttcaaataacagattaaacaaattagttagctcgaaattaaaaaagatatcaccaccaatattcccacaatcaaatcaagtagtatgatataacagagtttttcttccataaagagttctgcacagttatttctgaaggcatataatttctgaagtagatttcgtaaagcctaagacctcttagtttccaaagaaaagaaggaaaagtaaataaaaatgaaatctttcagaatttttctgttgatagcattatttagaattttgacaaccattaattgagatgggaagaaagtgcaaaaacacataacagtgatacacaattagacaaaagatgatatgaaactaaagttggaaagaaatttaaaattttgggttgtcactatgagcagtttccacaagtgcagattgatggtgagttgcattacgtttgggtaaagtttgaatctgaatatataaacacacaaaccatatatggagaaagagatatcaataaaattgaaaatcttaagacaagaagaatttgttaatgcaaaggccaatgatgaaagtaaatcttaagaaatcataaactagatttgagcacaataaaattttccaagtgtaaaatatggtgaattccatcgtattttattcaataaaatagctagtatttatatacaagactaaaaagactagggagactaaataggaaactatgaagaaattggaaactaagtaatatatatatatatatatatatatatattctaacactccccctcaagttggagtataatgcccagcctgttacaaagataatcaaccatcactccattcaaaacctttgtgaaaatatctcctaattgttctccagtcttcatatatcctatgcagattaagccttgttgaattttctaacgaacaaaataacaatcaatctcaatgtgcttagttcgctcgtggaacacaggatttgaggcaatatgaaaagcaaattaattatcacaccacaattttgctagaactgaagttttaaacccgaattcaatcaaaagctgataaatccatactatctcacacacgaattgtgtcatagctctatattctgattttgcactagatctagacacaacattttgcttcttactctccaagagatgagattgcccccaacaaatacacaataaccttaagtggatcgtctatctacatctttgtcaatactccttagataaagtcgaatcatcttattccactccaaataattcaaaccagtcaatttatggttcgtaattttaaacatcacgagaaccacattagaaaaaagtagtagtttcgaatctaattccgtctctgccataacctcaaaaacaaatatcgaaagagaaaagaaagaatcaaacaacgaagaacaagtaatgaacacccaaatatgaagaagggagaaataccaaactacaacctgagatagatgcaagtaggcttagaagaactgaaaatagaaccggaaagaaaacgtcatcacacatgcccccacgcgtcggcacttaggatgtgtgcagaaacttcaggcggcatgtgagacccacgcgcagggattccgatgaccggacttcgagggttttgagatcgacgactgggtaagttttctgagtgggggtgagaatagaaaaacactccaaaggagttttccgagaaataaccccttaagaaaagaaaaataaaaactccaactataaatcctaattttgtgacagcccaaatttcgaatttcgaatccctaatctaaagtggctctaataccatgtaaaatatggtgaattcaattgtattttattcaatataatagctagtatttatttacaaaactagggagactaaataggaaactagaaagatattagaaactaaataatatatattaacactaaccatcagtacagaattactttataaaagtcaaatcttaccaaaagagtttactagactactacatagaagattgccttattgctgacaaaaaaaatcagaattcaaaacttgctataatatttaaaactaagaaaaattttcttttcaagaaaaaaaaaaagaagaaaatttctcagatcatgtgaagttaatttattatctacaagtttatatcgctgcctgtttttttttcatcatatgcagaaaatacaccataagtagccaggtctcattaaaataacaacatgtttaagttataacattgaattatgtgcctatgtaaaatttcatttgtaggcactcaccatcaaaggttttctaattgaaacttcacctagtacgtgaatttcaaaataatacattacattctatgggattataattttccttagagcacatatttgaaaaatgttgtgcaaatacaccggagaaactagatagcacaacgaaacaaaaacagtgaaaccatctttaacttaataaactgtaaatgacatccataccgctttaccagtaggcgttctcaagcgatctgagttgccaaaaatacaagagctgacagcaatatggcatctgctcatataatttgcatcatcttcagccaaatcaaatccagtacttgaggaccctttaggacctttaacaaagccacaatttattttttgatcacgtgccaagaatgaatcttccctttcttgcaaactctgatgccctgcaaattttggttcccagtgctccaacccatcaggtttgtcctcaaattcagtataatgcaagctaaacctagcgaattttcgactttctagaggctctataagatgtgcagtagagtttgcaaatttaatctcacaagatgaacctgaatatttgattataagaagttaggaatattacaaagaataagaattggagataatattaaaatcaccagcaaaagcccaaataaacatcctttccaacaaggcatgtccaaagtactggtcatgagacagccatttttcacattccagccagatcagtaacaagcaaaatcaacattggactgtaacatttattctcacatcaagggtatttattcctctgaatacttctagattgatataaaccaggctgtaattttcaaatcaattctaatgttttcaacatccacaaaaacaacacaaaaaatgttaattttatttttgtaatttcgcaagaacttaaccctctacatagtgaatgtatcaaagaaatggtttgcaacatgaataagaatatgaaagacgtattaaaaaagtcgagtcattcaaaaaaatactttcattttggtcattctaaaattatatataatacagctttatattaatttctcagatcggaaagattgtgaattgtcagttgacataacatctaatatcagctctgctttcatgagtactgctgacaagctttttctaatagcttcaggaccttaatccaatattaaggtgcccgagaagtaaaataaagacaaaaatgatagaagaaacatatatcactgcacaaagaattaaaaaaacatagagaagcataataggtaaattaacaaaccattagatggctacattgactgttacagtaccaaactactgatcacattaatgtacacatcactaattatcttgatgaagttttgtttgaaggtagtgactcagcaaagaagtaagatgttcgaatgaattaccaattgataggtccaagctactaatttagtgagccaagttgatgatgatgtttgataataaaaattacataatcattctatttacaaggtaatgtttgtttggaagttgaaacaatatttataaattaattgagcataatattaccggaaaactttcgtcgctttcctttcctttttaaatctgaccgtgacctttttgaagattgaccatcgctgacactgaaacctctggacttcttattagcttcaactgtattctgagagtgctcagaagaatcctgcccaagtgatttgccaaaagtgttctcagtcttatggccgttattctcattatgtgttttttctatgtcaaaaggatcccccttgtcatgtctagtatcatcatactcatctccatgagcctcatgataatctatcccatcatcatattcatcaaaagaatcaattagatcattttgcttttctgaatgtttgtcatccagctgctcatgttgactgacgtttttcactgattttcgtgaattttttaaggaggcctcatattcagcttcatacattttcaactcattacgcccagcttcgttgtacaatccaacccctttcccatctgaatccttaagagaaccaagaataacagacttcttttcaaggttctttaatttcaccgacgcaccactactatctataatttcatctctagcacctactctactgttctccacagtatcctcattgtaatcgctgtctcttctcctgtcatccctgtcccaatacctggaatctcggccatgaactactgaccccttaccaaacttgaggactttataagtcttcgtccgtgtcacgttggctaaaaaatcaaggtcagtccttaaatcatcatcctcaccatgaaaagtatttacttctgcatcagcaaaataagtaaataaataagcaacaattcaaatcagttgacttctagctaaattcacaactatactatttgtgaataaacatactagctcgtctctaataccagataaagcaaatattggtttctatttataactattaacctcataacttctccaattctaagcaaaaacaacataagcgacagagatcaaacattcccaacacaaaagaaagcacagataagataacgaaacgatttctctcagcaaccaaataatgtcatcagaaacacgaaatgcacaagaatcacaaccgagataaacctttcccttcagtatcaacctttgtaatcaaaatacacaaaagaaatctgaactggaaaccgaagcaataccttcattttctttggaaatgaagtagtagaagaagacagtgagaacgagaaccagcgaaagaacaacgatgacccagccgatcgagaccccaagtagtcctctactggatcgacccggtcggcgaattcgagcctgtttgtgcgaggcggagcggaccccgacggtcacgtgatccgagacgccattggagtggtggttgtggtggtggtggagatcgtggacacgtgagccgaacctctccgctcccgactgcctgtatggggccattgtagcattgtttcttccaccaccaaactcagatcacaacacaaatatttttctcagtcttgcattttccgatttatctattctattctcatttttaattaaataattattaatagtttataatataattttaagaagggtttttggtttgggtttggaggaagagttaaataataggaggaaattattatactatatatttctttttggctatttgaatgggttaatgctagcaaggcaagtctaaattttcgaccggcatctgccaatttgacttgtcaaggtatgaaagcgtataaggtttgtcctatttatctctagaataatgagactactattcatgttctttggctttttccttcgcttaagtctatctattttgattggatcctgaaagggctcgattctttaaaggatgcctcttacttttatgcattatttttgggttgtgtggatattttgagtaaacagggagggactggaggagttaattgcccttagttggcgcatttggcataggtgtaatacttttcttcatgattgtaagcttctccccgatagtatggttagttcttgggccattaattatctttggaggtaccaagatgctaatgttgggggtcttcacttattggtcagccttctcgtcaggggctgaatgaagtgtcttctacaaaatccaatctagctttaggcaaggtcaacttgtttgtggattctggggtttgtaatgaagaccgcaaaatggggatgggggatatggcgtccaatcttaatggtcatgtcttcttctctagtgcgtttccgagcgtgggatcttttgagcctcttgttgctaaagccaaagctttgcttcaaggactctccctttgcctgcaattggggtatacatctattactgcttctctgattgccagcggttagttcttgcaataaatagtaaggatcctcatcttaatgagtttggtattgttcttaatgatactgcttatgtttcgaaatcctttaattgtatatccttgactcattgtaaaaggtctaagaacacagttgctcatactttaacaaaacatgctctggatttagatgagtcacgtgtttggtggtgggatctccctatggatctagttgtctaattcttgagactcttttgtatcttgaaactttcaaggctttgctccttttaatggaattgttctgttttctttcaacaaaaaaaaaaaagaataattaaaaaagacataaaaataacaaaacaaatgcacatatatgcaataaaaatattttctagaataaattgaaaatatacatgattaaaaatgtatataaactaaacaataacgattctgcaaaaaataaaataaaaaaataactaccatacaaatatagaacacctaaacaacaacataaaaataataataaaataataaaaatacaattataaatcaatagaaaattaacaagacttcaaccttgtttaaatatgcaaatcattcataaatcaactctaaataaactataaaatatccaaaaaaatgtactacttttactaatcatataaaagagaaaaaaatagaaggagtgctcttaatttttttgtaagaaagaaaaagagtgttaaaataaatatgagaaaatgatgaaagtaaaagaaatatattttagtaaaggttaaaagaaaattgattaagattttttttatataaaatgtgattaataaagaaaaatagtttgaactttgaaatagttagagtgagaatagtaaaaaaataaaaaagaaagaaaaaaaataaaataagtgtttgtattttatttttttagaaaattaataaaataaaatttgtgtgagagtgcaaaagtgttaaaaaaagaatataaaagtgtacacgtattatatatttgtatatataaaaataaaaaataatagtttgagaaaaaagtaaaaagagagagagaattgaaaaaaaaatgaaaaagagaaatagagagagaagagaaaaaaaaaaagtgacttggaaaaaaaaaaaa

SEQ ID NO: 14451 - DNA, 6664 bp, Cannabis sativa
agtttttcttttgtgcataggatccattggctcctagctgagcttgctactgcccaacttgatttaaaccatttctttacacactttatatatagatcaaccaccatggtcaggcttagaagtctgacttattctcttaaaaggggttggttcaagtctttctaaaccacattattttctgagttttcttgttcttttgtttttttttttttggtgaacagcataggtgcagagagagttaaaaatggctgtgttgctttccgcaacctctgcgaggaacagaacaccgatgcgtgagttcttttactctctaacatttgcagttttcttttggttcaaataaatgttttggacttttggtaatcatagtgaaaatgttttgtaaacagttgccttagatgtcttcaacaagtaaaacaagagtactaccttgtgaagaacaagcttgaaaatctattcagggtaaggaaaatgaagttgtttttgtttttgcttaaacaacttgctgatttatgtgaatgttaataattatctggtataattagtcttgtaactgataattatattttgtggggtgcagctggagcaacaaattgtggcagctggtgggtcaattcctatgatggaattaggattctaaggcttaccaaaaaccaaaaaaacaaagaaacaaaaaacaaaagaaaaatcagacaaaacaagaagatgaggggtggggtttgttgtagagaagcaagcatgttacaagtgtttcagacacttttgtctttgtattagtattctctaattaactgatggtgaatctgtgattgtgtatgattttcactgagaaaaagagtttatatcaatctattctcatttcctacttcctatgatctttcacacccaatacaaactcattcattcattgcatttttaatcatgaaatgtcattatgccatctcattggtgtaattttcaggttttcaagtcattttatttggtcatgaaaattttacaccctgcagagattatgtggcttggaaagtttagcctacaacatgacatcttcttacttggacaagaagtaattgttccaatcaatttatcttgtcaaaatcattatcactacattatttatcatcctattagctgtttgctaccatgtatcattaagcttcatatgacttgttagttggcttccttgctttgctgtcaaaaattgacaaaaatttggggtgagaaactccatttgtttttgttgtttgtataaagccaatagaaaagaataggaatcaatttgaaagatgtgattcttttagaggtcaatctttgatttgtgggggatgtttttggccccttgatagataaaagtagtgccaaaaacatatcaaattagtggtggtggtggcataggataccccatcttttcctttgtttggtatttttaaaagagaaagggagaagaactctagtgaacattgaacaaagaccactcaccattaccaaagtaaatttagaatattaggtagaatcaaaggaaggtgcataaattttagctcgtctatgataacttgctatttaagtcatttcttataaacgaaatccaagagattttaattcaataacttttcattggtgaaccaaccaaatcaaatttagagattgaacaaaatctgcaagtactagttttggaaattgaaaatggtgaatatgcaatgcatggtgcaccctttggttattcaatgaatttattaatgtttgtcttattaaaaaaaaaactaagaaaggaatattaatggctgaagaagatatgacaaaaactccatacacggatccatatcctgaaatattaataccattttcatttatttcaacagggtaagatatgctgctgacacttcatatgggttttcagtctttcagcacatggaccaccaagatcaaaggcaagaaaactgtagatagagaaaagaatacccttactcacagcattagaatacactttttcttaatccaaattttataaatatatataatctgattcacctaaagacaaaaaccttaatccatcttgtacatctgtttttgcattcactttgtgcttttaaagagtaaaaaagtcaagtttattttccaaagctaaaaagaataatacaaaaaacaatgatttaatgccattttatttgttctatctcatctttgttttgttcaactgaactacttacaatgcactacaagcactttccactttgaacatattttctcactataagcattgcacatgaagctgtattatgtcaaaaaaataaaaactgtataaataataatagtaataatatttagaatcattgatgtgttttcttatgaactggtagctgatttcactgtttattttgttcatcaaaacttgctatgacagcagactgcttctcataactgagttgttttgcaagcacattataatatacagtgtcattaatgttctccaatattttgactgattttcctttctttacatcaatccaagtttgcccatcttttgattcaatcccatgagcatagactttgatgggtttgacttgcaatgatggactcagttgagaatgatcattagctaagaaaactgcaccaaggatttcccccaagaaagtatcctgcaatatcaaccaaatactattcaaaatgatataaaaaaactgttatgttgaatgacaaaatctttttctttaccataaaaaaagaagcagaaagaggagaatgtctcaaaaagtagaaatgaatgaaaaactttaccatgtggttatatctaatatgattttgtttcaaaagatgtagcaatgacagcaaacgcagcgcgaaccgagactcagctgtcgtttttgtcttgctcaactttttcaagatctttttatatgagctgacgctgcgctggacactgaggggaatgagtgtgatgtcaagtgttgattcaaagactgtctttgcagctaaaggatcaagaaacatgttgaattctgcatagttatttgaaggaactgaaaacaaatttcctttgtccatatgaccattgcttatatgtcctccaactatatatacatgctgcaaaagagcatagacataattggaaaatgttagaattctaaagagttttggagtttgcagcctgatatgctaagtaagtctacttgggatttctctttatactcacttgaattagagagcttgctttcttgttagatgaaataagcttggctagattggttaagggtccattggtgagcactgtaatctttaaaccaggatcaagtgtcttcagtacagaatcccatacttcctgtgatagtggttgccttagttcaggatgatctgtatcgcgaggagctccatacttgatagaattttctgctgtatacctgaaacataaaaaaaacaagaaaaactcaaacacttaattcaactctaactaaaagaaaaaccatcaaagaaatctctctctctctctacatatatatatcagtttgtaacataatcataaccttcttggacttcttggtaaatctcgagcaaggccatagagtgtatcagagtccagaaatcctccactgccatgtgggatggccttaatgtatttgcagtctccaacagcagaaaatgttggaagagactggttcaatgcaaaaacttctcctagaccaactgggatgtcgtcgcggcccatcatatgaagtatgtcataaacaatgtctattgttgcagcatttgcccacccagttgggcttattattattgcctacatttccaagagagaagacagcatgaacaaatcaataaactgatttattattagcattattacataaacaaaagataattcctttttgtgttattaacattttttgttggaggcaaaaccaaaactttcattaccttaaggttgatgacttcaagtggaactttcagaagatacaacagagctagaaaatctccagcactcatgtccatgtcaaatacaactggttttcctagtcttctttttttcaaatctggtttgtaaagaacttctttgtagtttggaaactgtgttgtgaaattgaatcttccactgttttgaggagcattcaacacctgtgaccccaaaagaatgtgtcataaaatagtataggcaatcatatttagaagcatggaaacagtttcttttgaattacatttaagaaacttttgtaaaaggttctgtcaagtgggctgttaggatctggattaagttttgcttttgttgcaactagaacacgaaccgcctcaggtccagtcaccacttctgtataaccatcctgtttacaagatctaaggaactttagattaaagccattataccaaacaaaaataacacaagttttactgtagaaattggttgatttcacatgaaataaataagaaattaccttacatctccctttcccattattcttggcaatgcaaaatggatcttcaagtcctgtttggacatgaccactatgaacaccacctctttttaagttgaacttgggaactttcaggccatcaaaggatggattggatccatctgatatcccataaggcttgtttgaagtaacaactgttatgttcatgtattccatttcagcaaactcattttcaccattctttttatttaagttgctcatgattgagacagccacaccggatgtgaaggagtcccacatgaaatagctctaaacatagtaaattagtttgattatttaacagcaaaaataagaaataaattaatactgttggcttgaacttaacatcatcaaagacactaccgtgtagaattggtcaccaaaccaagtgtcacgggccatctttaaggattggaaagtatattgtgcctcatatgtattctgagtcttctcaaatgtatcgaaaaattccttattgataggaatagtgttcgtcgcatccaaagggatgagtgtgataggaataccagaatgaaacacctaaaaaatcgtcattatttagtttaagttacaaccattgagttttagtttctttaatatattgcccaagacatcattttgttcaaattaatattgtcatacctgatatgctgcaaaagggtctccaaagatattgaactctgcataaggattactagtgtaggctgtatacaaattgccaggatcgccacattgctgacgagtacatgaagtagaatttttgggacaacaacctgtcgggttctttgatttcactccaccccccatgacataaatatgctccacatttttcttcaaatgtggatatttcataaagaaaatggctaagtttgtatgtgctcctatagccataacagttataggaccagcagatattttatcatacataacctgttgagtagttggttgagtagttggtctatatctcctgctcccctaagtcataaagaaaaatgaaaaagtattgattatatcttagtataactcagatcagtagaataaaaagttcatatacctgaggaagaaaagcttttctaatgccaaaatttgtatcaacatccatacgacctccaataccaactgggatagcttgtctatatctacatcccccagtggttgtaacaccctgaaatatatagacatgttatggcaatgtacaaagtgtttttgtttttgtgtttttttttctatgtagaagacaatcaatgtgttcatcatgcctgttctattataggaagatatccaccaacatttggaagaatggtaccatctttaagtattcctccttcgccgccaactccaacagcgacatcatcgcgccccatcatgtaaagaatgtcatagagctgattcacagcatgtccagcattactccaggcatttgtgttgatagtcactccctaaaatgaggtaaaaaaactaaaattaaaagaattcttataaattagcttttcaaattggagactagaaaaagcaaagcaagaataagcttttaaaagtaaaagatgttattacagtagtaattggtaaaaccaatactaggacacattatggtcctaacatcaagtgttcttttatcctttgaccagaataatattttactactgttattatcatcatcatcaataccaatataaaaaaacaaattatttaattttttaaaaaaaaaggaaataagaagaagaagaatatgaaaactcaatgcttcgatggtatcaaggattataatacgtaactgtcaatatgcaacaatttgtttgaaaaatgtttgttttcaaatttgtatgtggtgttgtctaatcttttaagtgggctaaaattgtaatagacaaatgatgaagaaagaaaaaggttagttgattacctctaagtcaaagtctgatctgttaagctttaaaaggtagagcagagcaaagaaatcatctgtatcaacatcagtatctaaaagaatccgccgaggcctaggcctaggagtgccttttgcagtgtgaaaattagctgcaaatccaaataggagtagaacaaaaacaagaacccagaagttgtttttcaacaccattgatctctctctcatcattcacaccaaactttatgaaaaacctatcaaattttctggttgagaaaacccattgaaacaaacaaacaaagtttcaaaaccaatgaaaaagattgtaatacaatactta

SEQ ID NO: 14452 - DNA, 4772 bp, Cannabis sativa
  modified_base (28)..(29): a, c, t, g, unknown or other
atctccggaattgagaaattataactcnnatgcccatttctaaaaatgggacccacaacaatataaaattataaatatttataaatatgtcaataattaatgctaattgtctttactaatccaaaatctaacatgcggttattataagaatcctcaaaatctgaatgtcccttatttccagccttaatttataaacctctaatccagaaactccaaactttacttcaaattaatgatgcaaaaatccataggcaccttataaagtttagccaagaagaaacttcaaaccgttataggcgattcttgcaagaggttattgagggtaaacgtcatttcttacgagaagcagcttggttagaaccaccgtgtttagctgatattcccctagcaaaactaatgtttttacctccagtcactgttgctttttcaccaggtgacttggactttgaaattatggctcaaaaagctcgcaaatccaagaccccacagaacccttatatcacctttgaggcaaaactaatcgagtcaagggttagatctataggcccttatgttggagacattttaagatcatgcggcgttaggaacgaaaaaggatgttgaatttggtcagttgcccagggagagttcatttgttaccctcctgaacgtttgactcaagatgaaggctgtagcaccagcgagacatctagaattgttgcatggagtgttaaacagataaaggctggagtagttcttccccttaaggattatttcaaggaattctgcaactatcccgatattacaccatttcagctcgccctaaattcttacaggattctcgctgtataaaatccctctaccacatcttgaagtgggagtgtcgaacacccctagaaattttatatttttactctgtcaagacctgtcctgcgagaaagcatggagcaggaggcttttattacctcaggactcatactaatgattgtaagatcatcgtgaggttgcccaacaaaaaatggttcaaggatgacttcttttggaccactggtctatatccaatcaacaccaacaaatttcgaatcatacgtaagtaccaatttttctcaaaatccttggttttgagtttttctttgaattttcttttgtacttaactaattatgctcttttgtcacttttccagcgatcattaggagacccaatcctactccagaaatcaaggaaaacatgagatcttactcaatcttccttatggactacgagcggctgacttcctgttgcatgacaataatttgaaggcatgtggccttctcggtagagactagtaaatgactttaaacccccttctaaactggcaacaagtccctatgcccgaggatgaagaagaccaagactacgtcgcttgcatccattattttaaaacgtgaccactcgggaagctaaagatgaggcctcccaaggtaataatcttggtgcttatggatggtctcctaccgttcttatggataattgaacaacgttagttcaatttaaggataatcagtataatttcttcatttggaactacgtcgaattaataacccatagatttgatagttggtaccctaaacaccatatccaattaagttgcaatagtttctactttgggattgctgaacagtatggaactaacttcgatagggttggttgtttaaactgggacatgtctcctcttaatccctttgacctttatatgattactccttctagggagtttaataattattatagcagttcctcctcgtctgatgattatggtaatgttctaagtgggagatttagcctcgccacatttgcactatttgtttatgcaagtcttaatgttttatcttctgtctcgcaaatatgtattttgaagacattctgtgcaatccgactggtcctactaactgaggtaagaggagaacatcctccgtggaagccacttttgggtcaaacctagaagtttctaagaaaataaagaagactgtcagtaacaaatctgactcgaccggaatctccattgagcataaaaagactacaacttctactgtaccagcaaccgcgagcactggtggacaagccttggggtctgtccatcaggttaaattctccaagtctcaacctgagatggctctcttggagccatcctgcccctgcctacttttggaggtgttgatggctcgcaggcctggtcgtaatacgctacctagagttggtttcaagactttctaataggaggactgagatttgattaacaaaggcaatttttaaagccttatgacgaggagtgttgatcttatgcagccggttagtccaaacttcataaaactttgtatatcttcttattctttgatctcttcttctgacctcgttctctgtaggtttctttcttatccttcatggctcagtagaggggcttctaatgtgtcagccatcttagcactgaacttcgcaagtctaatgaccaatgcgaggtcttgactaagcagtggaatgacgctcaaacggagatctctaggttgaaaaagaatgctaaaaaccaagagaaatttgagaaggcccttaagactaagctcgaggccgttcaaaccaaaattaaggaacttctcgaggctaactagttggcccaaaaaccatcatcgaagccaacaaaaggcttgaagaggccaaatcagacgctaaggtgcgagtcaatttgattgccaagcgttccatcttagagtttggaaagaaaatcttgagatgaatttgagcttcttgggtactagagccgatgagatgcgagtttattgtgagtagaccaagaagggtgaggttggcgatgctaaagaaggcaaggttgaagaagaagacgatccctctaagtctccaactatgtagacttagtttttattattttaatttttcaacaatggtcatttggtcgagacaatgttttgccccttgtggcatttattatgtaatattaattttcatttgctttattggatgaccaacattgctatatttacatttttttatgttactttaccttactttgcttgagttatgaatgttttttgaatattgtatttttattcacaagtaaacaaaacacctttctcaatttagcttaggctatattgcaaacttaaatgttcttacataattaaatattttggagcattctttgattgcttatgtatgagcagtttaagattctactactttaattatgcggttggtattctaccataaaaatttttaagagcacgctttaaatattttgaatagtatttaaaactgctttaaatatttcttgattgctcgcatgaatagttaatcctctattcatactttaacttgtaaataattttttaaaggtactttgtaaattaaaacatttttaaacataatattgaaataacccctataacattagttaaaagagataattatggaactaatgtgaattaggtttcgagtaattttgccggaatttttaaaatttgaatatttatgaacaataaattaaataaaataagtaattatgtggtaaaattccaaatatttttaccatttatttatttttataagtaccatcgatattgccaaaagtaagaaatgaaaatttaataagtaatttttaatattttctacgtattttcaaccaattcttaccaaattagtgaaaatgagataagtttgtttagtgtaaattataagtatgatcattattttatttaggagtgttatcaaactgctcataccatacaaattgcctacactgcaccattaggggcaaagttaggattagataattgggggggccaatattagcaggtgcatacaaaaagtataaattttaattgaaaaaaatattgtagggttttatttttataaatattttgtacaatatttaaaaattatgaatcaaataattaaattgaaaataaaatgtgagttctagggtacgttaggaaggccaagagaaaattgcaattggtaattgaaggtaactataaagttttgtgtgtttgtctaaccacacaattacactataattgtgtaatgagaggcaatggagagatttctattacactatctaattctcatactcctatgaaaattgagtgtaattataccgtgtaatttctaaaactttttttttaatattaagtactaagaattattattttcttctgtaattactagttatttttccaaagaagatattagaaatttataaataattattacctcatatccagatacatcttgtaattgtattttaaggactcagtttatacttgtaatttctcaaagaaaaaaaaaactcatattaaattaaaaatagtgtaattttttaatttcactaatattaattaaagaagcgctaagttggataaagagtaaagacttgtcagaggtggtggttgaattggatgctttagtcgtggttcaagctatcaatagcttggttcccatgaccttacagtttgaattttcggttcaagattgtcgtttattactctcttctctaaatcatgttcccgcttgttgttaaacgatctgcaaataggatcgctcattgtgttactagaggatcttgttttatgttagattgtacttttaatgagcttaccgctcctgcttccttaatggacattgtaatggttgaacgctattgaataatatatattgtgtttacttgtagttaataagtataagacacacatagtttgtaaacaatgtgagactcttacaaaatatatatattacttagaagaca

SEQ ID NO: 14453 - DNA, 2766 bp, Cannabis sativa
ttaattttttttaagtataattttgtttacgagtgtccgccaatttttttactataatttcgtaagtataataaaatattatttctccttatttttattttaaaccaattcatttatctcatttattattctattctaattaaacaaaaataaaataaaatgcaaatcatataaatttgaattttgagtcgttttagaagaagcttcatagtggtggacccaccatttttttgttgtgagctgactggacaatacgctgagggccccacttaaacgtactaaaaacatccaatttaaattacttaagtcaactaattaactcatttactcacagacaatatatccaccaataaggctcaaatattacccggccccacaaatttagaccaataaaaaccagctgtgacaagaaacaaatcacctacccgtaactttatcttctctcccgatgattatccacggtggtgggctactcttgcttttcgcgcaagaataataaaaaaaataataataaatataaaaataaaaagaaacccactctcatttcgttgggcgtgactggtgtgagagagacccgccgacttacgtcgtctattgctccgtttattaacggcgttaactcctcttttgtcttcttacaccgtttggtatcgattttcacagacttagggttttgattatcggctccctcttccctcctcgaaacgcccctccacacaaattttccctatgaaaatcatcacactaagccaatttttcctatctatatagctggtaatatataattttgttgatttttttctctgatttttcctttaccatcctttgtcatttcctttttttttttgttttttttttcttcccgttgaagttcttagattttattttgggtgtaaagtttagtaattcgattagatcgaagttggtttaggattttttgttttgagttttggtttaatttctcgaaatttgtttagaatttagcttctactgatttgaagattagatttttatggttctgatgatttgttgattttgattttggtcttttttactggaagattgaaaataagttatttaatttatttagatgtagtttttgtggtctgatttgtgcaagaagaaaaaaaaactttattttttattattagttggaatttgtggttgtatataggtgaaaaagatcagatcggattggtctagttatgaattgagggtgtaagtaaatatagagttggcttttaagctgtgaaaattctatcaaagctcagctctgtgtttataaacatcatgatgacccatatgtatatacctagtggtgacatcaacggcaactgcaaacctaggtatatctcttccactttatatatctcggtttttatgtatgtatatatatttatgtatgtatgtatgtatatatgtatgattcatttttttgttgaaaaataatgtatgtatatgtttttcatgcatgctgatatatgttttgatgtttaatatattagggtaagagatttttgctagattttctgttgtttaattacagtatttaagggtcttgaaatactctcaagcaattgtttacgaacaaattttcaaaataataaaaattgttttaatttaaaaattatttgtttttgctgttgggtactggatgcagctataaaattcaacttctcattattttgttacgttgtaatcattttttttacttgttttttttaggagtgaaaaaggtttattgtttaatttgaatatatcgtttggatatattatctcacacaagaattggtattatagactggtgtgtgagtggtctgagtctggatagaggcctttatagaactcagcttttctttttcccacattaaaacattttcttctactagtggtggtcaagctaagggcattaagttactcaaaaatggaacttaaagaaagactagtgctatctttttttaacccttttgtgcgcctaaaaaagaaaaggatacaatgaagaggaagccaacaaatagaaattgtatagtctacaatatcctttaattgttttatttcagttttattttccatcgaagcaccaatgcctcaagattaggtatgtgccaacttcagagatggaacaaggagttattttcagttttattcatggagaagcaatgacaacgtttatatataccctgttcctagattttgtgttaaccctgatggaaatctgaccatgcatggttgcaagatctcaggaatcagtttgtggttgatggatcaatggtgagggctcatattcttcgattactcaggttgaactttttcatccattatagaaacgaagagttgcagtctcttatagattaagagaatgataactcgaatgtagcttcaacttcagaagagaaatgatgattatagcagccatgtccaagggtagtgatccttcaagggggctctggcttcagaagttaattaaaattttccctcggatgattaatttccaggttggtttaccattagtaaggacaatgcagccaactgtgttgttcttgctttttgccagaccttgtttggctgttccattggttttgaaagttttggattgccttccaaaataggcaaggatttcagagggaagatgagaattggagttgaattgtctgtagtcattaatgtttaggaattctctttttactttcatttttgttgataatttttggccaagttcagaagctgaaatatttttggaacctattagatgtttagttttgctgt

SEQ ID NO: 14454 - DNA, 6341 bp, Cannabis sativa
  modified_base (6312)..(6315): a, c, t, g, unknown or other
ggttggaatgctttgaaggactgagctgactagagtagttctgcctgcaagagagaggcattttgccttccaaccatcaattctgttcatgattttctgctttaggaactgaaagtcatcttttcttcaacccgtgaagaaaaacgggtttcccaggtacttctccttagcttttagagtctacgtttggagaagttggagaatagccattttcttgctgttgtgagtatttggagagaagacaactccacttttctccctgttaatacgttgtccagaccaagcttcatatttttcaaagattttcagcagattagtagcattatcttctgtggcttgactaaagaaaattgcatcatctgcataaaaaagatgagtaatggaaggagctttgcgcgataccttgataccacgaaccgtgttttctttctcaactttaagaattaactttgataggacttcactacacatgatgaaaaggaagggggagaggggatctccctgtctcaggcctcggttaggattgaagggagcgagtggtgctccattaagtaggatagagtagctgaccgaagtaacacaactcatgataagaaggatagccttggggctgaatccgtttgctttaagaactctcgataagaaattccattccagcctatcgtaggctttgctcatgttagttttgatagccatgattccagtcttcccttttttatttttaacagcatgcagcacttcttgggcgagcacataacattcgacaatccatcttccaggtatgaaggcagcttggaaaggccagactagacgatcaatgatgctcttcagtctatctgtaaggattcgagagatgatcttgtaaccaaagttacatagactgatagggtgaaatttatcaaaagtttttgcttgagcctccttagggattaggcagataaaggtatggttgcacgactttgggagaattccatgagtgaaaaattcttgaaccattttccagacctgcgatccaactgttccccagtatttttggaagaaaacacctgggaaaccatctgggccaggtgattttagcgggtgcattttgaaaacgacagtccttatctcctctatttttttgactttgcacaattgatcattctcataaggctccacttaatcagtaaagagggactccaattcttcattgatcaaagggtcagtcgaagtaaatagattctgaaagtttgactggaaataatttccaatctctactctgtgtctcaaccaaacacctggtttttcctcaatgccgcatattctgttatgtcttcttcttatgattgtcgatgcgtggaaaaatttcgagttacgatctcccactttgagccagacttctctcgacttttgcttccaaattctttcctgatatgcttccatcttcaaaatttccaactaaattcccgcttcagtctcgagattatcctgggaaggttgggtcgattggatcatcgaaagttgttgcttcaagtctttgagtttgagatcgacattaccaaacctcgccgcattccaagctttcagctccttctttgttttctgcagtttcttacagaggatagatccctgactccctattaactgtgtagactaggccttcaaaatagtttctccacattcactgcttgatgtccaaacttctaggaaccaaaatgggtagtgaagtctttcccgatctccccaggccatcagtagcaaaggagcatggtcagaaccatatataggtaaatgagagacctttgccttgggaaaactaacacaccattgagggtcagctatcgctcgatcgagtcttttacgaatgtgctgagtgaattttcttgagttttgccaagtaaacaacggtccctcacatcccagatcaatgcctcctgaattgtacaaaaactcctttagaatttctccttctctgctgtggaaaggtctcccaccaattttctcacttgcctccaaaataacatttaaatcgcccattaacatccatggatcgctgccctcttgaattttaagaagaagccaattccaaaaatcctgctttagagccatataaggcggaccataaacacagaatagagcccatggtggagttccaagggatgaacttaccatggctttaaatcccgagtcataaacttccatcattctcaactgaattccaactctccaaccgatacaaaaaataccagcaatgcccaccgcgggaatacaacattgattgccaaaacacagcctttgcaacacttctaccataacctccgtgctcaccttagtctctgagaggaagatcacgttcgtgtccgtgtcccggataagactccgaagagtcctttctgcagggggcttgcagtgggctgccgaagccccctgcagttccaagataagcacctcattggggaggtgggggcacgcttccggccgcctcctcgccataaccaaaatcctgaacataattcactgggatctctacatagttttgtagaatatcttctaagttacctggtattgtagagttcgattcttgagcctttttccttttaaatctagttttgacaccagaatttatctttttgatctttcccgagccattaaaacttttcttgtttcgactatatttcctacccgtggctcctgctgtatcatccacatgcccactattgaatttcaaatttggctccagagcaaagggatccttttcgtcaggcaaaggggctgcttcattgtctccaatctcagtgatggagcatttcgaaggagatggagttgggctataccatgtgtgggcctttcttttacgagtgcccaagaggtggatgatcaattctgataagtctggatggtttgaaattagcccttgttgggccctgaacttgtcaatgacatctggtttatagagcttaagaaacatctcttgtaattcagggttatccgtgggccacataattgggttatcatcaggataattgtggggagtttgtgacatacagacccacgaatggggaatttcaagggcctgagtgatagtaggcccaatatctggaatcctatcttcagtttcctgggcaaaatcgggccgagggaggtccaaatagttgggcccaatgggaatagggttttgagggtttgaataaactcttgccactctgtccaaaggaaccgtatctgcattcgtaccctgtgttgcaacacgcatagaggacgtacctgccatatcaacgttggacattcctgcatcactgtcattgtctgtacccgttgctggcgttttgtctcccaccaccagcccctctttttttcgatcagaattagggttccgccttttccaagtgcctttcttctccgaggttcttttcccccatatccctccattatcttttatctgccactgagtgatgccttttccttccatagtgaagcaattgttcctgcccgtatcgctttttatccacgggccatacatttgaactgcattcctagcctttgggaacaccatagctttaggagcatgacaaattttatcaagatgtgccaggcgaccacagttaaaacaaaggtaagggagcttctcatatttaaattgtatccaagcttcttccttcccagcagctttaagaaagaagccagcagtgaaaggatgagtaatccatatatctacccagcacctgagatatcctcgacgaacaagttcaaattttggtttttcatccgatttgataaagacccctgttttcttggcaatgatgggggtattgtcattcgagaggcagcgggttggaagctcatgaaactggacctaaaaacgagcaacttcgaattcagcaattcttacttctccctccaggggccacggtttcagattaagtaagacaccattcaccaaccaaggccgtttctccataacgaactggcagtcttcctcagaagcgaaaaagaagcccatcactccttcgccacattttttcattctccatgagccgatgttgcgccagacccccatgagaatctttttcaccactgatgcaggcatctctttatttcccataacctttccagcacaagctttgttaatcactacatcctcaagggttatgtcttcaaacagttcgagcatctccatttccatgttgctatctctttccaagagtttagtactagctacatcaatgtagtcaacagacacttccttcgcatgcatttcctccatttgagaaaaagaaagatcactcaaaaccacaaggaaagaaagacgaattgcacgtagggagtaataaaatgggttactgtagtaaaaaactaaaagtcatagagactagactcaacatggagccatagttgtatattatgaacccaaatactctcgagcaagaaagcttttgaccaaagtcattgcattgacctcaatcactgatgatgcttatgatgcatatggtactattgatgagcttgagcttcttaccaaagcaattcaaaggtttgtcaattttgtactttctcttatcaatattcacttaactttctcttttttttttttttgaaagaaacttaactttctctttactaacatcctctcgcaccccaatttctctatactttttctcttctagccaaaattaaaaataaaaattgacaaatgtttttttttttgtcgaaaacaaaaacaaaaatacttaccacacatatttttaatttttaaaaaataaaaaataataaatatgtatttcaatttacatgtttgatttatttttttttcaaaaaaagatccacgtttttactaaactttttacaaacacattcttaatatttcgtattaatttcgttttcacatacatagcacaaatattccggatgaatttaaagtgaattgactaaatcttaaatttacaattttgacatgcttaaataattaattgtgtttgttccgacaaaacatgtcaatttatatgattctcttttgaatccaattatataaattaatgggttgagatgcaaaataacgttaaatttagaaaataacgttaaattaattgttgactaaactgctagaaaaataaaagaggaacgatattaccgaatgaaaaattctgggttgagtcgcggactaagttgctctttttaagacgttcgtggcactgttcaggagtgtgcaagcagtcagaatttgccggtcgtccccaggataaaacagcccagtcgtactgtatcagaaccccactgcactgtagagcactgtcgaatacactcaaagaatcttgatactgttgatggaattttacttatttatgaaaattgtatatttctgatatggaaaagatgcattcttcccatcagttcaatcgcattatatagacgaatggattgaataatcataacgggaagaagaacgtttagtgaatcgtggggtgtagttagttggtttaaacgtgtctcattaactaatatgactaagtaattaaacacttttctcatttaaattaaaaataaaaaataattattttaataaatattttttctgtaaaaataatagagtgtcacaccactccacactacaccaaccaacccaacccggtccggctcagatcaaacgaacggacggactgacagtgcgcacgcgtgtatggtgggtcaagtgtgtgagtcctcacccattcgcacaaaactgggtaccccttggggcccaaacccaaatactaaagttgcactctatataaaaagggttcatatcccatgtgggactctttaatttccacttcacacacactataacacatctatattttgttaaaagattcatcaaatttccgcaatcccccacttgaattttttaaaaaatatttctatctactagtatcattcaactgtaagattgagcataaacaaaggtatctttggatttgaacgtctgcgtagtgaatactatttagattttactagagtgacccgtagtcttgaactctatctctaacattgtaccacgcaacaacattttcgagggtgtaatccaaagcccgtgcattaatggccatgcacgtctatcccagtatagtgaacgctctagaaattttgcttgaaatttcataggaagtggccccattcccacattcacacaggtgagtctatcaagagtactcccgtagctcggtactccactccacttagagtagagatctcattgagagcttctattaactcagccttaaatcgcttcaggaattcatgcatctcttttcgtataattatatcatgatctcacttttatcacttcataacttgttnnnncccattgaacctatttcttggaatct

SEQ ID NO: 14455 - DNA, 5887 bp, Cannabis sativa
atatataaatgacaatgtacagatacctcagcagagaaagtcttgagaggatccttatttcttctgaaccttttcttggatccattttggcgaggaacattggtatttcccatggcagctcgagcaagcttaacaaccttacttgcttctcgagttgttgcatccaccaagtattcaggaacatcgcgtaggtgaggagcagggggcttcttgcttaagaccttatcgtgcttcagcaaatctattcaagaacaattaaataaaagagatcatttcttgcaacttcatgctgaagtaaaactaaaatatatgaaaaagcaaaatttgatgtattcaaatctgccagtctcattttgatgtctcgccttctgtccttaaataatgactcacgtaaactcttttactttatttgtataataaataaataaaaattgctaaggaattgtcacattggagggacataggagacaccaaaatggccagcactcccaacatgctcaagacttaatttcatttacctaaatctcctggattagcttcgaaatgagccttcaacctaaatacagaaaacacaatcagaaatcagtccaaaaacataagaaaaaatcagatcagggaatgaggtgcaagaggttgcttgggtgaaagagaaaaggcactcgattaagaaatcacaaaaataaataaacaatgggggaaaaagttataagattaagaagtgccagtattcttgggaatattatataaggaaagcatagaaaacataagtaatctcacttttcagagttaagaatttcatttcttaaatcttgagctcgtgattctcggacagcaattttggtcacactctttccaacatcctgtaaagggtcattgctttgaatcagttattttctttgaagtcatttcaccataaaagacaaaacaaggtgaattacaagaaatgtaactattgaagtataagaaggaacaagaaattcaacactaaaagatttatgaccaagacccatacacaactaacaataaatccaagtaaataagtgcatctattatacaacaaagtaataagttttaaaaacataggctagaatagattttgttttaggagctctacatactacatagatgcatcctacctattcaaccaaagagaagtgtagcacgtttcatttttctctctctagaaaatactggtatattaagaaataaaataaggttgtgcagtttcatccattttaaaggcaaattaaactactgaaagaagcattggggatatataattaaacatataaacctattttttgaaccaaaaaaaaaattactcttatatgtaaattctccactgcacactaaaaaaggttttgttatgagcaacagactcacctccgctctgtaccgtaaagactccacagcattttctgttaataaaggaaatggaacaattaaattttcttccttgtctccttcatcccctaaaaaggattttatttcctcgaagacttccatatcctcaggacaaacctgattaaaaaacgaaaaagaaaattaaaaattgccaagagttttaataattgcatggccatacaacatgccaaaaactcaattaatggaaacagttctgttttacaacaccagtacaatcatatttaaaagaagctagcatccttgtcttacacccaaaacttaaactacctaatgcacacaatatcatatttgatttgaaggttgaatccaacactacaataccagcattttaacctggcattataattgagcacagccacacagttgtacgaacaagcattatttgaaattattggactatgcctttaggtccaattttgaagcctggaggtagatctaacctgggtgaattcaggtgtaccaaccagcttcagtataattttagggcatatagggagtggcattatagagaaggcagtgcatgaaatagttattataaattaacatttgtgtccagtctaataatcatgtctcctgcacatttaagtgaagttcggccatggacactcacaagtgagacagaagcaccggtattaaatgctcttccagtacgtccaatacgatggacatatcctgcagggctttgaggcatttcaaaattaacaacctacagaacaagcaaccagggtgtttttaggagcttatgcatccattataaaagacaatcaataagataagcatgcagtatataatatagctttagaataacaaataattgttgaatccaaaaatccacaatttccatagcatcagcataccgtatatacatttttgaagtcaattccccgaactactccaaactcagagtctaatttttgtttggcattctttctaaactttttctgtttattattactctcaatgttggcttcttccttctctttcgtttcactatcatcagttgcaattaagtaatcaaaaagcccagcattgaattcctgtcaacaagacatcataaaagttctcttttaatactgtgatgatcaaaagtaaacaattaatagaaattgcacggaaagtaaaaggtccttcctgtgatagttaaatggagtgtgcagcaaacctcaagaatatgctgacgcgaattttgtggcaactcggcattgagcacagcagatttaattccaaactgcccaaaaaaattaaacattcaatagaaattgcaagaaaaggctgccagagtacaaatatgttctttccaaatttttacaaggctgtttgttatggggcagaaataaagcaagcattaaacttgatgacagattagaagtttttaatacacggtgaagggaaagctgcagaattcgataacacacaggaaatatttcccattgaagcgtaatttttaacatagcaataaaaaaaattgaaggaacatgagaaaaatagttttacttacaaataagtaccaaattataatctatatgtaaaaaaataattattttgttgattttgttaatatatataaacagattcctatgcacacaaaaagctcatattcccgcaaatcagggacaagaatctactacacaaccaaatacagtaatatagctttctagacaatcagattccccatctcaactttccaacaaaagttaaaattttaaactcttgcataccaagccacccctaaattaatgttcctctctcttcaatccaattactctattcctctcttctcgaatttcataccacaatgttattagagaattaaaaaaaatggtaaaggtttaatttacacatgtagatgtactgtgaaaagaatggccataccttttccagaaataatcttaatctaaatcccatgtcgattgtatttgtaaatatcaaaacctttttctgaaccaattccaacttcaagagagagagagtgtaaagtaacttatcccgatagctgcatgatatctaagccacaataaaataaaatatattgttatttcttcttgatagtgagcatacatcacatttgttgtataagtaggaaataaaataaaaaaaggaaagagggaaaaagacttataatagagttatgacctacagaaatttagtaatgaaaaaacatcatacccaaaattgctgaacgttttttgggataatatcatccttgacatctcctacttcaggcagagtcaaaatgaatggattgtgaagtataagcttctttaacttctcgacatcatcactgccaagagcaacatttataaatcaaaatgaattaagcttaaatcccacaaatgaggaagagataggcatgaataacaatagtaccaaatcagttgaaacttgaaatttcccttttaattacaaaagataaggcaaacctaaataaaagattagtaataggaacaacaggccctcttagtaactgactaaatcaaggattcaatattacctaggagttacaattatttgcaaataaatcagaattgaactcacaaaacagcatacatatgttgtcagaagaaataatatatagacaatattaatgaataattttcccttagcattatagttaacatcaataacacaccttgacgtagcagacatcaaaagacactgacagtgcttaggaatatgaggtgttaatgcctttatatcttcttcaaagccaaatgacaacagaagatctgcctgaaaattaatataagtcaacaattctacaagagaacactaagcaatcatacaatcatcgataatattcaattataaaaaataaggaaaactctcttttttatcaataatttttgcctcactttcaccccttctagtttatgaatcgaagatagtcacatgtaatgacaaatcagagccatattattagaagcttgtggtataaacaggctctgctctagtgcaagaaaataatattctgtttcattttgaataaggtctgtgggatacggtattacacattcaatcatagagaataattttgacactaaacaacaaaatttacgtagcttcataatcctaaaaatacactaaagtatgaatatcaactaaatccgcaagcatactaatacccaggtatttgggaaaacatagtactggcaactaaatatacaaataaacgtacaagcaaagacctaattaaaaatttccattgaaaaaacagcttaaaagatttgagaagtaggtcctcacctcgtcaagaacaagaatctctagtgaaccactaatggatgctgattgaagaacaccaaccgacatacatttcaagatacaagcaggagtcgaaatcagaatatctggtggtcctgacaatgcatttctctgcaatttaaactcaacgactaaggatcaactattgcttagcaaaaaaacatgtcccaagaaagtatacttccaaatagtcaaaaaagaagcaaagaacaaaccaattccgaggcagacatactgcttttcaactggataactttcaactgaactctacacagctcaatgagtgacgagacttccccatatacctaccaatacattatacatttacgtattcagaatcagtcaattcagccaaaataaaaagtgggaaattctgaatgaatattttataacctacttgctgacagagttcccgagttggtacgagtacaaatgcactagggccaagtttggttcttgcaccagtatcgacaaacaacttctgtagcaacggaacaaggtatgcgaaggtcttcccagaaccagtttttgctcgagcaaccacatctttaccttcctggagatcaaaatcaatgaaactattaagatcatttagaaagccaaaaatgagtatactaatgaatttgaagagaaaaagatgtcgatataatggattaagtggaaaacttactaagacgagaggaatagccacgctttgaatgggggtgggtttctgaattcccttcttttgcaaggcacgagttaggcgaggttccactccaagcttttcgaagctgggctcctcttcatcctcttccacttctttgcgttcgggtacgttctcgggtttttcaattgtttccgccattgaagacagggaaactttggcaataataccaaattatgatgcgtggagacgaacagagtctacagaagtagaacaactagggtttaaggggtttttcttattttgacaaaacttctcttttcccctctctctctctaaaatcgggtcggcttacaacattgaagcccaatatatttttattttgaacgggccttatttcctctttgtgaaaattaccctgattttccaaaactttgttactaatattaattttgatcactaatggcatattttagtttttaaacttattttatggtatttaagcaatatacatgtaaacttaattttaacgctaattaggatttttttctcccg

SEQ ID NO: 14456 - DNA, 9777 bp, Cannabis sativa
ggtttatgcctttgaaaaggcatttattgctgacatcaattcaatttgatatagatacatttttcatgtcacccaactacaaattaaaatgctgagttatcttctcataaataattatccttaaaatttgtgtctcttatcttcagtcagctatcccttttttcatcattgaagggaataaaaaaagaaaagaaaagaaagggttcagctaaacataaaaggagtatacaaacttaaatgatgtgattttagaaggtcacttgttaatattatgatactgtaattttaccctgcatcagtacaaataatctctttctttttctgtatacgatagggagcataacctcagacttaatatatgtaattaaaaaaaatgcaagaaagaaacaaagttttaaagggggtaaaagaattaacattagtggaatgcaattaaaattgggtgaaactattatattcttgtctggtaactttggcagtagtagaaaagcagtgcagtgcagagaagagcagagcagagcaatgcactccctggaactgtagccattctcttccttggcaggccaaacacatgcaaactacttttctttatgttcgtacaaaagaccccacactgtgtcaactggctaaataacctcatggtcactgggtggctgggtcccacacatttctatgaatgtatctttcccttttcatatcttgctacccacatccacaccacgttacttttcagtttcaatcccttgccttttactatattaaaaccttcaaagttacaaaggaaaagctaataggtttcttaattttcacttttcagtgttcaaatcaacatgaaaccgatctaaggccacggtaactctccaatttaaaattcatatgataccaaaaatcaaagttgagtttcagagttatggtatagatgtatacatacataaataaataattaaagtacgggtttctcaatgtatgcatggacgagatactatacaccacccttgtaattttcattaagttgggaatattctcttgcatacaaatattttatgatataaaaaagccatacaaatatatcttatgatattaaagaaaggctgcaaaacaagccttcacaactaggttgccatacacaaatcaatcagtcgatagtggcaaaaaagctgagaagaacatttcaaggtagggaatttttgttttaaccctataccttaagataagtagcatcactgaacttacgttcaagttacaacataaaatataactctaaaggctaacccttgtatggtcggtactattccttttggaagaaagaaagcacaagatctgtatgtccagaaaacagttgcgtgtccacaaaatgcttcatgtattaaaaaacacaaacaaaaagaagaatcagtattagcttacatatcagattattggaacaggactaagagtataaaccaaaccccccgaaccttctttcgggaaatttttggaaaattagcacaaagaaagtaagattatgcaagagcataccttcataaatggtcgatcgcgactagggaatgaatcgatgaaactctccttcaggagtaaagataccttaacattgaagaaacacagtatcagaaattctgttctctgctaaataagatagaaatttttagtgtgatatgattgtgcatgcctgctttgtatgcgtaactgtaacaattattacatccaaaacaaaagctacaatatttatttttcactcctactccaacataattaaatggtcttgtaagtcacaaattgatgtatcgtgcttcttttatttgcgtaccactccacaaaacacatcgtcaggtttaagttgatttgttccgttatttgtttgtaataaggatagtttgtctctctttttttcttttaatgatgtcactacttaatgaatctattttgtaattcaacacataaacgtcttcatcattgcagagtttaagacaatgtttgttcggaaatatcatttatgattttcttttgcagaaatacagcagagcaggcagaccaaccttatcatcattggactgtacatttgtaattgtgtggggacggaggtttgagcaaagtgaatctgagtaatctcttagcactgataagaatcccttggcggcttcaacctacatgcaacgtgaaaatttcagattggaatcttcaccaagttttcccggaaattaacaccaacaaaatttcccagacacaaactactattctaagacatttactaggagaactgaacattcagtattgttttccaaccagaacaaacaattcatacaagcaggagagttttctagtactcattttaaaaccaactcattgtatttgtagatcttcagacaacaatggtgactcttggttccactttattacataacacaaaattattcatgtagatgaagcaagagatcacacctgtacatctgtgcattcatatattggtcttttcttccccaagtaactttctccaacgagctttgcatgataaggacttagggatgcatacaattccttttgtttaggcagctgaggtatggtaggcgatttcacctatagaaaaaagcaatggggaaaaaagaatctttatacttgaactatctttttataagcattaatcacaattgcgaaagaaaaaaacaatggtacaaagtttggaacctaaacaagcattcatgaacatgtactcattacccatccaccatatcaaacggtgattaattttgaaagaagaaaggtgtaaagcctatttttggccaaaaataacacatcaatatacaccatactgacagcatagtcatcaatatacatacattatgtcagattgacgacggcctccgcggatatttttaagaagtaatcatttttccatttgcttcgtgaataagaaaaaagatggataaagtatttcatccaaatacgtacctggttcttgttggcatcaaccacaactgaattggataattttgatagcacatcattggttttgttcttcacaccgacctataatacattgcagtaacatttagatatcataaagaatgaagacagcagtagcagtagtagtagtagcagaactataactttattttccttttcttaaggaggtagcactacaattatttgttcctaatctagacacaagtgagctgataaaggtctccttcaaaaattaatcttgaccatgaattggtgacaagcattcaactacaagcctgttaaagttaaacctaaataaaccaaaagcatacactagattatataaatgattgtatggaaatcctaatatccaacatttatgatttaacaactcacaatgtaagggacgggtgcatccaaaaagtctagcatgtcgtttggcaaaacctgggatattaagagcatggtttaagtcaaataatagttaaaagaccaagcatattactaaagaattacctgctcagtgctcagaaaaagtaacaaaaactaaataaagcttaccggcactagtaggctttgccaccgataaggacggatcagaggaataattgacaatactatagcagataagataccctgtatgcatcacaatacaaaagttgtcaggtttcccataaaaagctgaaataactgagacaaatgaaatgaaatgaaatgaagtgaaagactaagacggaatacttctaataggaaataaagaaagagtgaagcagtaaaaaatatgatctaagcagtatcactaacatctaatatgatacactagcttaatgcccatttcaaacctgtctcaaatcatcaaacaatggatgtgtgtgtgactagaattgtacttgatcaactataagacattttacacaagcgcaactatgattctgatgacctagcttgcagttactttgaatcccaaaaaaatatgctatacacttctcagtgcgtaacacaaccctatgtcagcaaggctaataaatccaaacttcagaacaatatggcaagtccattgaaaccttatatatttataaaacaatggtgtaactcagtagggaaaatgagacgaaccaaattggaacagatcaccacaatattcttctccagaagtgcgccagcgaacaaagttaatatctgcaaagtgcaatgagaatcaataacctaatttatattagagagagagagagagagagagatagaatccatactattgaaaaaaagtaaacacttaaattcaatcaacctgcacgcaccttaaaaatctagaccatactattaaaataaacacataaattcaaccaaactgcatgcaccttaaaaatctagaaaattaaatctaagagaatcatttactgaaagaaaggtaagtctgaatatagatttggaaactaacgttatcaagtcgtaaagagccacatatgcatgcaactgcccaagtagacaaagcaattgcttcctcctcaaccaagagtgctgtatgtgcctgacaaaacaaacaatgcaatcaagtttagattaaggaaatttttataaagaatcatatgacaaaaatatagtctgaaacaaatcttccagggacagaaatcggtaaagactaatttcgttattataatctacctcagcaagttctaaacttgtagtgcatgacctcaaatcaatagttgaaccaccgatatgtatgactgtttcttctaatctatgatattccaagggatgcaaatgatccaaggggtgaaatcgaagagttgaaccctttgcagggcaacgcagctgataatactcacatatgatttgtagtgatccatgattatttgcctggaaattgattgaagaagggaatgtaaaactacaacttaaagcacaaaataaagttctaagtgcttaatagcctaaacatctcatatgaaagaaacctaccttagcccattccaaaatgccattgagatcattagaatcatcttggccagagaaagatgcctcttctgtctcagtatcatcaacatcactccgaaaattcctgtcctcgcaaggagaaccctgaaaactgcataatacagttatagatatccttgttacatacaactgaccatgtcccccttcactcacccccattctaaaccgaagagagaaagagatggaggccataggtgggaggggggagaagaaagaaagggagataaaaagaacatgctacaaaaaaatcaatcaccatcacataatgtacgtaaaagtgtatttgaaagagataaaagatgcaagcacttatttacctgggtgaagattcagagctttcatattgataatagcgcaggagaggcagaacagcatttgggaaacggctttccactgcttgcttatttaatgcaataatatcaacatagtcatcacaatcttcaccatttgcaccattagattctcttttggctgtaaccaacttggtttcagattcaacagaaacaacattatccttaatctttttcttcaacaagtccatatcattgtcaagtgtctgacaatctaggtgactcccatcatttgtaactgctccaggttcaaaatctttgcattgggaatgctcagctgatccattgaacacatcctctgcagctctatcgtctactgagacactgtcagaagtttcttctgtactttcatctatattttcatccttgctatagtcctctggtgattcaaaatctaaaccaccaagaccttttgtcagtcgttctagcctttcttctgtgaagatgctgtaggataatcgagataaaagtcgaatgagtaaatgcatgaatgaaaaacatacatgtgaaactgatatacatgaaaggactacattgaaaaattgtaaaagaaacattgcatcattcaataaactgtgaacacacacctattcaatacaccaaagtgtaagtcgaaaaaagggagccttgagagaatgcagtaacatctacgagtggttagcatatgacggctcaaaggaggataggaaggctgtttgtctgaaattatagaaagcaatccagaaggtttttgtactaattcttcaactaacatgcagcatccatataatgtcgaatcagcaacctaaagacagttgtggaattaaatgcatcatcatttaaaaaagagtatcaatacaaaagaattttttatatcttacctgtaaccggaatacaaaagacagatcgctttgtttaaggtgttcctgcatcataacattaccaatgaaatcagtcttacaacttagatttttaagtaacacctgaataaaataggttaagtgaatggaaattttcattaatcagatgtaaggcttaagacaggatatatcaaattcattagttataaagcctcgttcttgtagctctctttatgtaattctaacagtgaatgatttcaatggtgctcaggtgcgtgtttaaaatctgtaaggactaagcatctagtctatatacctattcccaactatttaatcatacatatgagtttaacactccaggtatgtgatgatgctgcattataacacttaagaaatttccgctcaaccagtacgttagatggccaatgccatcgattcaagaaactcatcaaagtgaatatataatactatagtaatacaagttatattgagaaaccttacaagctcatgaatagtaacagggaggaaacttggtatggaagaggtacaagaaggaaacatagtaaattttaagataactcttgaaaagataataggagcaaaagcaaaatacctgcccaagaagaatttcatttaattcactcatggaaggagttctttcaacagcatgaacctgaaattttgaccaacaaagctataatcacctacacaatttcaaattaaccttccataaccaaagtacataaaatacaaactgaccagccaaaagtaaagatatttaacgtctaagatagtaaacataaaactaccagtcaacaactgaccaattgactgccagacacttttaaaattaaagcatcaaaatatatatatatatatatatatatttatatatatagcattttaatcatttatgacaatgattatacacagcttaatactgaaaatcatccagaagttcagaattttataataatagtgtcatcttaatatcaaaacaagtgcctgacctcaacacctccaggaaagcaaaatgaaagaagatccttgtatttcagtggtagctgcttttctggagggtaaacaaacaagacctggaaagggaaagagatcaattgtatcgaatacccaaagcacatccaaataacaatagcagacaatcaaattgaatattttggccacaaaagcccaacctgaggttcaatattgggttctacgcgtgattgattctgataactaagtgtatttcgtaacttgccagaaccttcagcctttcttccaacatattgcctctcaagtgcttgaatgtcacaattagggtgaaggccaacaactaccatgctctcgaaaagccgtgttggctccttataagacttgtggtcctgcacacttaaataagacaagggttacataaacactattggctaaaattatgcagctatagcttccactggtagatgaatggcaatatcaaaacaatgttcaagtagtcatcatcccacacatgtctttgagctaggttttttttccttgaattgtttcacatccaaaaaaagtaaagcatgatactaactcatttaaaacagaataccgtaccaagtactgcaactgaaagcttgcccattgacgcttcaggctagttaaatcttctggattataggttacacgctttacttcacgaggctgtgagaagcctttcaggatactagtaacttggcgttgaattttttgaaattggccaccaccattttcatccttcgatgaaaatatcacagatggccgtggagaacgtggggcagtggctgctgcagcagcagcggcaaaagctctggcaacatcttccgttgtttgcataaaaaaggaagcaccccaaccagggctacctgaatcttcgttcttagccatttttaggtcttccacctaccaaaaagtttttatagtcacaaaaatccaacttgacaatatctaaaaaaagaaataactagaacatcagaatcttaaaaaaaaaaaacccataaactatcaaaacccagaactatttatcactttacaataatcaatcaaagagaattgagtgacttttctaaaggtgatttttttttttttcattttcttagaatatcatatcaggaagatttaatatctgatctccatagcaaaattgataactgattttcatttgtgaaacagatcaataaaacttaatctagctctttgaaaacataagtttcacccgttccaaactccggaactgaataaaataataaaaattcaataatccaacaatcaataactccacaatttcaaaccgatgaaagatattcatcaaattaatatcctaaacatttaaacaaccagatcacatatactaaaaaaaaaaacagcacacatgaagaatagacaaggaacaaaaaaatagaaaattggacccaaaagaaaaaccccaaactcacctgagtatggctgtctgaaacttgaagagagacagaaagaatgataattctagagagagaaaggtgcgtacagaaaactattaatatatataaatatagcaagagatggaaatgatgacgatgaaagccttaggcggccataacaaagttcctctagttctgaactagggtcccttaaaagtagagcaaaaaattggtattaaagtaataaatataataattattatgcaaagtgggagggtgtttataaatggaagcctcgttagcgtcgaaaattagaaaatcagaaaaaaaagcaaagagaaaaacaagaaacagagccttctaacactaagccacccttcttcttcttcttcctttttcttcttccttgtttagttatggtctgtgtttaagatgataaacattaaacactgttcgtgtttggtaacaaagcatccaatgaaccccacccaaatccctctctttgagtcttgccctcttttttttttttttttttttttttgagtgattattgctcttggtatttgatagttggtatttcctatagttttctaaagaaaaaaatttaaaagaagaaagagagagatgccatatatatatatatatatataaatgaatgtgccctccattccaaaagaaaaaaaaaaaaaaaaaaaaagaagaagaagaaatgactgtgcccattcccccatccaagtgtacattaaaaactcactttatgtggtgaattggttagaggcctagtagctagtttgtaagaaatgtaattaattaaactaattgctatacctccagcagggtctgagacctgagtggccctgagttctaaattcaaaataaattttgggcttcagcttgtgcttgtgtgcttgaccaacaccgtttataattattatatacctaataggtgcagtggcttaactcctacacttgttgtatagtttcgatacgtagcaacataatcatacttatttatatgatctacgagtgagtgtagacactagtttctgcaatctaggcctagctgagtcgttaaaccagggtaagtggtccaattatcgtatccatggactcaattgattgtggtcctcctcatattgtagattttttaaatcacatctcatagttgtttaattattatataattacaatttgtagtacggactgaacagtgtcagttgacccatggccttt

SEQ ID NO: 14457 - DNA, 8529 bp, Cannabis sativa
taactataattttacatgaccatttgaaaaaaaaaattactaaaaaattattttggctactaaaataaacagagatgtatcggtgcatctcttttaagagagtgcattataaaattttccaataatttattattatttttcttaaaaaaaaataacttaaaagaggccacgactacccaaaacctatattatattccaccaataggcatttggtatgtcacattgtattatattgtataatatatagtattgtattattttaacacaatactcttataattagtattgattagtagttcgtttggtacaccatattgtatagtataattaacattatgttagtttatattaataggttgtaaaattatactatcgttaccataaacacgaccccaacccagaccttggccttggagggggaactagaccccaacccgaccccgacccaaacccgatctcaagaccccgaccttgaacccggattaagacccagtctaagagtctgggtccaagttttgggttgggttttgggtcaaggtccgaggtttgggtccggggttaggtcttagatatagggacatggtcgggttaggttctgggtccgcattcgagtccggggtctgggtacagggtcatggtcgagtcaggttccgagttcacatttgggtacagatcgggtgggtccagggttcggggctggggtctgatgtccaagttaggggtcggggtttgggaccaaatcaaggtctaggggcgagtccaaggtttgggtatgggtctggggtctgggtctagagctaagttcagggttgggatctgggatccggggtctgggtcccgattcaagccatggtacaggttcacatccagatctaggtcctatatccagttttaggtctcgagtcccgtgtccatatttggatcagggttagggttcggatccaggatccatgtttagggttggatccccaatcctagaccctttctaaattttataattataacatgtaatccactagttcttatgaactctaaataatttagagagccacaagcataatttgattaaaaaatttagtagcatatatacacccgcatattatatatatctgtatacataaaatgtagttatgtaacagaatttttggtttaacggtgtcttttagttttttctattaactttaacagaatataccattatttgacaaaatattcttaattgatcttattattttattcatatatttaaaaataaaaattatgtagaaatttttatttaagaatattttaatttaaatttaaatacataaaatacaatatatatttttaactatacaatacgatatattttattgtatgtgtaccttttctaaatccactcaatcgtatatgtactttttctatagtcatatattgtcgggtctcacttacatttttattatctaattagaggatttatttgtggactattcaataatactccaaatttattgcagttagtttttatagaataaattcaatagcgatgtaatattaatttctatatagaatgaaatcaataacgaaatccatatttctaaatgaggtttgttttattaactagttagtataggaatctaagtaaacattacacaaaaggtaaatctccctacgtctttagaacaatgtttgaaagtaatagataattgatgattgtagagttattgattatgaagttcatctaatttcgtcatggtaattatacagtgggaagtggatataacaccgctatgactttgaataaatcattaccctcttcagctagtgatgtattctcattatcgtggaaacaattttgaggtttaaaaattcccaagaaaattttatattttgcgtggagagatattcatgaatttctgcctactcgtaagtcgtaacgggttgaacaataaaaatatagtctttaacaattcatgcgagctctatggttttagaggtgagtccaatgctcatactattttctggtgtccctttgcacaagaaatttggatgctcttggattttaattttctacatgaggtgagagaggtaattaattttaaaaatgtgttactatatgcatttgaggtggtagaaaatgaattgtttgaaaaaattattattagtgcttgggccatatggacggagagaaataaattaatcatggtcaacaattaagacaaccacaatagattgttaattggattgccagttgttatgaaactattgtatctggttgtgatggagccaatcatagtagcattagtcttcaaagaaataggaatggtttggaagttctacctagagtttctcaagaagaacagagccacacaatacttatggttgatgcaacggtattgaataatacaagttcagtcagcttaggggctattattttttcagttgataaaagggtgaggtcagctttatgcaagcctctcaaaggttagacaatgtttcaactataaggcaaacattttttcgatttgtataaacctttaaattttcgacagcattaggctcaatttacatggtgtgggtttaagattgaatagtattaggactttatttacaagttcagttggcataaggactattatattttaattgctaaaagggtggggtcagttttttgctaacctctcaaagattagacagtggggtaacttgatgtgtataagattttaaaatattttctagcttcaagtttgagtagtatttggtgttgttttatataatgtggataggcatttttagaaagtttagttagcaattagttatacagttttgagcacttttgtatcaagtttttgatgtatcatgccttatgttgttctcctttcgagaaaaatgttttgtattgagtttcaaggttttctttcactagccaaagggttatccctttggctagtttcttctttgttttttctttgttttcttctctagtttgggttgtgtttttgtgttgaggcctgtttatagtatttacttatatcttgttatatattgtggtattttttgattttattgtgtttttacgtagtatttcagttttacaagtcgagaccttgacgcttttggttggacttaattgggctctttcatgcggaatcccaataaaagagattttttcagattcgttgtctctggtcacaactattaacaaaggaagggtgttctttaatgagttgggtgtgctacttgaggatgtcataactttattgtctaaacttccggggacagttttgtctcatgtggctcgggatgcgaattctgcagcacatggtttggcaaagcataccattcagttagacgatgagctatcctgattcgaggaggtgccgttgccaattgtggattgttactttgttaatcatgtgtgattttgatcaccacgtcaaaacaaaaaaaaatcaacaaataagtgaaatggaaaagccttgttgctagtgtatattttctttatttaaaattttatatgaaacatttaattttctaatataataatattatttattcaaataaattccatataactttatttaatataacagttaaaaattaaaatgcattacctagtataaattctaaaattcaactttacaatcatatcattaaactaactgtccccaaacatagattcatattatgacaggcttgcaatgttcaactcctcactcgagaccatctttgcaagttcttgagcttatcctcgaacctctgttcggtttgcaagaaggatattgaaactcatactcaccttttctttgattgtgtgtatgccaggaaaatctttgctgaaatcggtagttggctgggtattgtgaattggccaactgacattagtaatatccagcaatggtgtactcagagcccccttgactttacatgatttggaaaaatagaaatagttgtattttttattttgcttgtacctctcctttgaaattgagcatggaaatcaggaaggttactcaatctagaattttgagcatggcttgtagtactcttaaaaaaatagagatgtttctaattattgtaatgaggtcctggtagcaggtttttttggctattgttttattaggaggcccttggtggctcgttgagcctttgttttgtgctgtttttagcgtgcttgtattgctcaattttaaataaattttcttttattaaaaaaaacaaaataaatataaagtttatatttcaaattatacataataaaatctatatctcaaacaaaaataacttaattattaaaaataatttatgtaatataatatatataattaaaaataattataagatttttactaggttattcatattactttttttttttttaaaaaaaaaaagggtttaatttgtgcggtttaattaaattggacatttaacacaccttatttataactagttaatgaaaatttattccacttttattaatacacctacccttaagaaccaatcaatataggcagccctaattaaattaggtctcatatataggtaaggaaattcaaaaacaacacccgtccacaaatacatgaacacttagtcatatatttacttaaattttattattaccaaaaaaaacaaagaaaaagtagtacttaattctagaaaaataagtcttacaagttataacacttaactaccattgctaaactattaatagtcaatacatagataaatatattaattgttcaataatcatgtgtgagtcatagattggtccaattaaatttttatttttatttaaaaaattaatttaattacaccaataaaaaaatagcacatgaataatgatttgacacttaacggtcaggtacttatgaaagttttagaaatataaattatgtattattaccgtcaaaaattaaacttagatattgaaagaactcagaaaatagagtttgagctgaagaaaaaggagagaaaaatgagagtagcgaatatggaatgaacgctcaatcttgaatgattgagaagctctttaactatattgttttggatacaatgacatctgaagagaaaagaccttaacaaatactaacaacctctaataactctaactgtttcttattgactttcctttttaaatagtaacagaattaattgttatgtatattctaacatgccccctcaaattaacactggtgtaaaccaagtgttaacttatcaaacaaataatgaaaagtcgtagctggtagaggtttagtgaataggtctgcaatttgatgttcagactcaacatatctgacatccagtttttgagctaaaaccctatcttgaacaaaatgcaattccacttcgatgtgcttggttcgagcataaaaaactggattggatgcgagagagcctactctcatgttgtcacgccagagattgggacattaaggtagatgaatgttgagttcaacaagtatatattcaatccaaatcagttctgaggtggctaatgctaatgcacggtattcaaattctatgctaaatctagcaacaacagtttgcttcttggagcaccaattgattgaatttcctcctaaaaatatgtaatagcctaatgttgatttcctatcatcatgacaccctgcccaatcagcatcagtgaagccttgaagatccagtctaggggagagtctgaatgttaaactgatgtcttgagtgttagatagatatcttaagattcttttacaagctcccgaatgttcagaagttgggttctgcataaattggttgagtctactaactgcaaatgagatattgggtgtggtcattattaagtattgtaaggcaccaatgatgcttctatactgtgttggattttgcattggaatgccactagtagtagttttgttgaggagcacattggtgtggactgaggctttgagtccagcagctgagttttagctaataggtcctcgatgtattttcgttaagttaaagcaaatggtggaagcagttctatggacctcaaatcccaagaaataattaacagggccaagaaccttgagagcaaaggtgttgtgtaggccagagatgacatgttaaactacttgagatgagttagctcctttgatgagaatatcatcaacatacactaatattaggagtagatttccatttgtattggtgaagaaaagactggtattagacttgctgttggtgtaaccccaacttaccaaagtgctttttaaaatgtcaaattaggcccttggggcctattttagaccataaatggcttataaagcttgtagacatagtttggaaattaagagtgcacaaagccttgtggttgagccatataaacatcttcttgaagttccccactcgagaatgcattgttgatgtcaatttattaaatttcccaaccttgtgtaacaatcaaagtgaacatgattctgatggtacatgacttgatgatagggctatacgtttcgaagaaatcaatttcagtagtctgttgaaaacctttggcaacaagtcgtgctttgagtctttctactgtgccattggcattaaatttgattcaataaacccacttgttttgaactataataatgtttgaagttcttggaactagagtctgtgttttcttattcttaagagcagtgatttcatgttacatagcagcattccattttgtacttgcaagagttgctttgattgttgtaggctcaacttcatccatgatgttggcaacataagtttttggtttgtagataccatttttcaatctagtcaccataggaagttgattttggacttggacaaaaatagggggtatggattgaggggaactgacttgaggaggaggagccacggaattttgagaggaattttgtgaattgaggcttatagagggagaggttgtttctgtaagaacttgatgttggggtggaggcggactggaaggttcaaatgcaggtgttggaatgggcatagcagatcgatgagaaggaacaaggaaggcatggggatcaattattagtgtgggggtggatgtggtggtgttcctgggagtaaacaaagattgatatggaaattcttattcattaaatgttacatttctagacatatagactcgacctaatgagtgcaaacatctaaacccctttgatgtgatgttgtagcctatgaagacacattttgaggatctaaaggcaactttatgttgttcatatggtctaaggaggggaaaacaggagcatccaaacaatttaagcatattgtaatctggtggttgatgaaatagtgtctcaaagggtgagacatgatcaagaactggggtacgtagcctatttataagatagatttatgaagcaaaagcttcccaccaaaatgttaagggcatagttacttgagcaagtaatgttagaccaatatcaacaacatgtccatgtttcctcgtaactctaccttgttgttggtgagtgtgagggcaggagtttctttggacaattcttatggttttgtatagattatacaagggttcatattctttttcaaggtcagattggacatatttaattttagtgtgaaattatctttcaacaaaggtattaaattgaagaaagatgttgttgacctcagtttttatttttcataggaaaaatctaaacaaatttagtgtaatcatccataaaactaacatagtacttgaagtcatcactagaagggtaaaaagaaggaccccaaacatctgttaaaaccaatttgaaaggatgaacaatttaatttttagtagttttgaaactaaactgatgaaacttgccaatttggcaagcattacaaaaatcaagctgtttacatttgacattaggtacaacttgaaataaaatttcattcaaagtggagtgagatgggtggctaagtcgatagtgccatattttggcaatttgtgacttgtcatggacagggttgctggtagtagtgtggttgtatgctttaggctgggaactgagagagacaaagaaattcttgatagaatcttgagaattgggagaggagacttgaagtttgtagagaccttcactgagatggccctgcaaaagaacttggttggtgttcttgtccttgatataagatagcaaagatcatcaaattcaagaatgacattattatctttactgaatttagagatgctaagtaaatttttggtgacattgggtacatgaaagatatcttgtaataaaaatattggtttggaagtgtggtgggaacagaacttgtgcctaaatggtgaatagatatggaagaaccattacctacaataaactttgctttccctttgtaatcagcagcaatagcaaggttatttgcatcattagtcatgtggtgagttgctccactgtccaaatactaagttgtggagatatcaagggtggaggttgtttcatagagtagagcttaaggattttcaccactggtagatgatgaagttgaagcagatgctgtgacagtcagtagtctcgtgatctgtaaggggaaataccgggtaagctgtgcaatccc

SEQ ID NO: 14458 - DNA, 2294 bp, Cannabis sativa
tttaaaatcggttttaatccaggtgggctgtggagtatcaaatcgacggtttccagttccattcactcgcttcaatgatgtatactcataacggttttgcttcatttaccggtgacttggaagagtaaggcatttcctttatattctgattgaatcaattaagttttaaatgagagtgaaatattaactaatacagtttcataatcaacaagattattcttctttagtttcataaacatgaatgtttacataaaacatgcataaatggaatttaatcacatctcatctcattgcaggtactgcaatcaatatgttgacaagaatgctcttttatatctcattttggcgaatgagattcttcacattctccacccgaatataataactatcgctgaagatgtaagtagtttgatcttcttcaagtataatattcggctttatgtcgcttttcttatatttttatcttaaatttgatttacaggcaagctattaccctggactgtgtgaaccaacatctcaaggtggattaggatttgattattatgtcaatctttcggtgccagaaatgtggtcatcttatcttcagaatgttcctgagcatgaatggagcatgagtaaggtcgtatattataatcaatataaatcatctcagcatgtttctgttatcttaatttactttgcactgatttttgaactaatttgatcagattgtgagcacattaatgggtaatgtacaatgtgccaataagatgcttatttatgctgaaaaccataaccaggtaacctctttttgtaatcccttcttccacaatcttatttgttcatatttgaatactttcattatgtctcacctctcaatcttcaatgtcagtcgatatctggggggcaatcgtttgcagagatattactcggtacaataacaggtgattctggtgttgcaaaagaaccattgcttaaagggtgttccttactcaaggtttgatttatttctcatcatcaaaatttactttgtaggctttctccatttcttctacttgtctttgtttctcaatcttttggccaaccgaacttttcaacatttttgataagtggttgctcaaacctattgggatcagaatactagcagtatcagatgtgttggttaaatcagttatgtttatagttacttttcttttgatgcagttgatcagactaataacatttacaataggcggtcgcgcataccttaatttcatgggcaatgaatttgggcatcccgaggtgaagtttctttgctacctagatccttgaaaattctagttcatttcatgcatctgatgatgtttttgtatacagaggatcgagttcccaatgccaagcaacaatttttcatattcactagctaaccgtcggtgggatcttttaacgaaaggagttcatcacaacttatttatcttcgataaggtatcattttacttactctgttatatgttccccaataaaggcagtttctcaacatttcaattctatagtaacaaagatgaaacccttggtaacaaatttatttttctttcctaggccttgatggagctggatgagaaagaacgagtactatcccgagctttacctagcattcaccacgtgaatgatactaccatggtatgtatggaaacttactctcattttttgttttcagtagtaaattttctttattattgtaatgcccccgcttcaagcttttattgagcctttcccacggaattatggctcttatacataggtatataactacaaaccaacacgagcgtttgcagtgtgttttgtcctcagtcgcacgcttccagttttcccaggaggtcacccatcccaagattactccaaattaagcgcacttaactttggagttctaagtgatgggccagaaaacaagatgcaccttattgatataagtagtaccaatcaattcatttaagccctctttaactgtgtagtttcatacctacacagtctcataatcatcacactttacctttccagacaatgtgggattgcacaacttacttggtgtttcccgatctacttattgtcacaattatattttggtatttcaatatttctgtaattcatttgcccctttattctatcccatttaattattcacatgaaacttccaatcccaaactcgatcgaagatgccttaaaatagttgacaatctgcataactataacaaacatcttatcagatcaactcatggactgatggagaataacatgaataaatccgcattaaggtgataaagctatttgttttgttt

SEQ ID NO: 14459 - DNA, 3366 bp, Cannabis sativa
attcaattttactgtttcagtgattgtttatgtactaaaccatgctctccagactttgtgaaagactctgttaagaatagagtatgaaaagagcaaaaagagaacaaggggaccaataggaaaaatggatactcaatactcaaatgattggcatcagacttatcatttatataggaagagtttcagtacagaggaagaagtaaaagtcataacagaatacaattaatagcccacttgacagttggagcaatataacaaccacagctcaactgtacgtagctgaaaaatgacaaacttaactgcccttaatactctaatattccccctcaagatacactggtaagaccatgtgtaatcttgtccctgagataaacaaaggaagagacaggcaatggttttgtaaaaatatatgccagctgatgtgaagtgtcaacataacgaacatcaagttggtgagcaatgactttgtcttgtacgaagtgaagatcaacttctatgtgctttgtacgcgcataaaaaataggattagaggccaaagatcctgcacctaagttgtcacaccaaagtatgggacattgaggaagattgatgtcaagttcaaacagtagagattgtatccatatgatttcggttgtggcaagagcaagagcacgatattcggattcggtgctagatcttgcaacaacggtctacttttttgaacatcagctgatgagattacctccaaagaatatgcagtagccagatggatttgcggtcatcaaaactccctgcccagtcagcatcagtgaacccctgaatattaagccgagtagcaggggtgaactgtaaaccgattccaagagttcctgcaagctatcttaggattcttttgcatgcaccccagtgttcagatgtaggactttgctgaaattggctcagtttgttggctgagaaggctatgtcaggtcttgtcaaagtcaaatattgtaaagcaccaagtacacttttatattgagtgggattgggtaaaggaactcctgaatgctgagacaatttagtgttggagcacataggtgtggattgagctttagattccaggagttgtgtggagagaagaagatcctttgtgtacttttgttgtgtgagatagagattctgaccatctctaattacttcaaaactgaggaagtagtttactgggcccaaaactttgagtgcatattgggagtgcacaagagagatgacttgttgaacttccataggatcttctccagtgactaatatgtcgtctacatagactagaatgaggaggagtttattgttgatctttttgatgaagaaactagcatcagatttgctgttggtgaagccccattgttttagagaagtggtaagcttttcaaaccatgcacggggggcctattttaacccatatatagccttttgtaacttgcaaacatgattggggaatttttcatctatgaaccctttaggttgatacatatgtacgtcttcttgtaagtcaccattgaggaaggcattgtttatgtctagttgctgaatttcccatccatttgtgaccccaagtgtgaacatgatccgaattgtgcaaggtttgatgaccgaactgtaagtctcaaaaaagtctacccctggaacttgttgaaatcccttggccactagtcttgctttgtgcctttccacagatccatctttcttatacttaactcgaaatatccatttgttgtgaataattttcattttagatgtgggaggtacaagaatccaagtctttttcttcttgagtgcaccaaactcattgttcattgctttgttccaatgaggattggcaagggcttctttgatagtctttggttcacttatgtcctgttgtgctgcaagatataatttgggtttatatatgccaagttttgagtgagtaaccatggggtgattgttgtgagagacattttgtcttgaattactgctgtcagcagtagtagggggattgggaatgggactggtatttggaggattgtgttgtgagtgtgggaaggccttattggaggagatagttggtgactggggtatatttagctcattggacgagccactggaagtggggacatgtgatatgtgtgttggagtaggaacatgtggactttgaggtattggaaataaaccatgatcgacagtagcagtaggttgattggattgaggtttggtgggaaagagttgtgagtatgggaattcttcctcattaaaagtaacacttcgagcaacatatattctcccactaggatggagacacctatacccttttgaggacatggtgtatccaataaagagacatttggttgacttgaatgagattttgtaagattcataaggtcttaatagtggaaaataagaacaaccaaagaattttagcatattatagtcaggtggatgttggaagagggtctcatagggagatttgtttttaagtatttgatttggaagcctattaataatataggcagcagatgagaaagcttcccaccaaaaatttaagggcatttcagcttgggcaagaagtgttaatccaatgtcaacaacgtgcctgtgttttctctcaacacggccttgttattgatgagtatgtgggcatgattttcttttgcaaatcctaagatcttgataaactttatttaagggttcatactctttccctaagtcagattgtatgcttctaattttagcgttaaagaacctttcaactaagttgttgaactggtggaatatggttgttactttagacttgtttttcatgggaaataaccaggtaaatctagtgtaatcaacaagaaaacttacataatacctataaccatcattagaacagtgaaaagatggaccccaaacatcactaaaaagtaattcgaataaacttttacttttattgctggtacttttgaaactaaattgataaagtttgcctatttgacaggcagtacaaaaggaaagttgattacatttagtgttgggaacaactatggacaaaactttgtttaaaattggaagagcagggtgcccgagcctatgacgccaagtagtagagatggcagatttattgtggacagggttgcttgaggtggtgtggttgtgagcactaggttgggaattattggaaagaactttctggtttgaagaggtaggtgagtgaacttcaagcttgtagagaccttcacaaagatcaccccaaacaagactcgcttcgttttcttgtccttaacgagacaacaaatgttaggttttgtgccctgaatacaactcatttcaatataattagatttattaattaataaagatcagaaatcgtttatattgcatggttcacatgat

SEQ ID NO: 14460 - DNA, 7087 bp, Cannabis sativa
attgggttcaacttttgaaatccttgtaagaaaaacctctcaccaaaccccatttcagcacttgaaaatcaagaagagctattttcccctaaaaaatgagcgttaggtggtttcttgctctaggaatattaaacatgcatcttactcagaagaaggccttttcaggctctcttcccagcttgtgcctgctttgaacctgcaagttacagaatttaatggagtgttgatgccaaggcaatgacaagttaagaatcttgaatgcatcaacaatgtcgaattagtatcttcctctttcacccatttacatttctaaccctgagtggttcatggacttcaaggctatataccattttacctcaaatctctcatctcgaaggtgcctttgcacaccatggcaatgaacatgttgcaattggtgacggtaaatcaccacctttagcctagagctcatatttttattacaaattcatcccctaaacattatctaatgtcttacccacaccttttatcttccacaatcttattattatttctagactttttcatggtaataatgcttatgttgaattctttgcattgggcaactatcattgccatggggttcaattctccatttttgccaaaggctaccaccaaaccaatggcttggactattttgaagatttcggcccagtgtgaaggaggatgataagcaccaaggctaatattcatatttttattatgttattctttacgtaaggatgtataggtctaattaatgttgaccacttgtccattccttttcttggttgtacatatcagacacctagcgtattgtacttatttaaggaatacaaaatacaaattcctttatcttctctcttgggttaaatcacgttttgtaattttctttaatctacttagagatttcaataatatattgtaaatcgtagtcttgttacctttacttttttggttttccaccaccttctgcagccctaaatccacatttgtttttttttttaatgaaatggagaacccttgtcccctctccacaaactcacatacccaacaacttcacctcgcctcaagtggctcgacattttatgaatttgtgccatatggaactattttccaaacgaaacccccacaactcattcataagaaaagctctacttgtacgctctaactcaccaatacccaatgctccttgtaatttaggtctacaaatcaactccaaagccaccaaatgctcattccctaaaaaatcccgtccttgccagaagaaattacaaatcattttttcaaacaagtttatgacagacttaggagctctaaaaaatgagaggtaataacttggtagcgttgataggacgattaagaactggttgctttgttaatttttaataccaaagtatatgtctatttttctaatttacaaagaaaactctcatcttgggtctaagcgagaatttcaagctatcaagaaaacaacaattattggataaccacttatgctataagtttaagctaccaagaagcaaaccaaccttaacaaattctttttgggaaggcattaattcattactttgtcatttaagaatctgagatcaaatcaaagagtatctagttcctgatcagttcacatactaagagaaaatttagaaagatacttagtatttttcttggagctataaacaaatatataagcaaaaagaaaaatgcatctataattagtagcaaaagggtacttactgctctatgtcatcaaatttcaagtagtccaaagccaactgcaatcgacgtattcgaggtattttcaaatcccaccctgtaagcgagattgatgatatgtcaagattgtgctaaactctttagatataccttgatatgagcaatacacacaataacataggaaacataaacgaacaaacccaacactgagaatttcagtcttcacataatttatatatataatatatatacgttataaaagtgtaaatgtggtgaactcaaggcatctttctctaataccatgttaggttactattttatttgagaatctcttcaaatataataagaaagcaaaaggagaaccacaacactgacataagatgacaatttcctaaactctacttatagataatttgtatcccttcattatgttcatgcttaaaaatcaaatcaactttgtagcatcaggcatgaatcaattatcactaagtgctttaatcatcctcgttgttgcatccactaagtttaaatgtgccaacaactatctaatagcatatttatcccaatcatgattgaaattcaaattaagtaaatgaattcataatcacatggattaagtttcacatgatagaaggatttactttgtcttccaaataattactatatgaaataataacggggtgacaacaaattaaaacaaactcctccagcgtgaaacaagagaagaaaagtattttagtatcggagacttctttaaatttattgtcaataatgattcatattctcccgtaggccattacatttttcctatttttgaaaaagggacaaaggtcataaggaatgacatgagccacacttatggcaaaggaaactgtggtaactcaatcttgtacattttttcataaaaaaatgagacttattttattggcaatccaccacaacaaaccacatccataacacacagcacagatgtgtttactagacgtcaattgttacacaactattgaaattacttcatttatattttccagcagcctagaaccacatcatgcatgcttccaaatccttaatctactcccattttttaccttaaatctcacacaacctaatttcgggtgccaaaatgaaggtcatgtggccagacctgcatcccacccattgctatgacacacccaaacatgctatcaaatgataatgccataaggtatttggctcaagaggaaaactacataaccatttaaactagatatttattcttactaatcaaatatcctatataatcctccttgttcatgaatttgggtacaggaaccacaaacatccaacagcttgtagaagacagcctacccataaacaaaattagggtgctatcatctttgaaaagcacaaaaataatataaaataaaataaagaagtcattccctaatacaaaaacaaaaatgttgaaataatatatgtgtgtgtgcgctaggccagcattctagttctaaagtagagaatgaacactgatctacaagcaaacaccacaattattactatgaaaactaatatgattgtgtgcctaaataataatattattacatgctagatagtatagccacaagttattctcaccattttcaatacataagcgatctgcctcttcaacactgtcatataagagaaccctatcaagaacttcaatagtccaggatgagcatgggtgtctaaagtttctaatttccatattgtccttttctttatatacactgcctgagttgatactcccctgcctgtatcctatgaattcaataggaaggaaacttgatgaaactgaaatagagggcagaaccactgaaagaccattttctgtcacaaggtaaaagcaaccctggaaagtgcaaccaactgcatctccagtaaaagattcttttcttccattctggagatgcatttcacattccataagcaagccactatcatcacaaattgctgactctgtaaaaagattgaaatgaacaatttgagaaccattttgatctttcgtgttgtgctttctaatcagacgagttattccgaaaggagaaaaacaaattgaatcatccttattaactctattagtgggaagaaatatcctgcgcatacgacgggacttccctacagcatcatgaagggtctgattggtactcccataagctgtaaagaaaccactaaaacattttgtgtattgctgcattccttccccattaaggttccaatgctgtatttcgtgaagtgcatgatttctggaataacttaagaaagaatgatatctgctccacatagatgaaaaacaaggttggtgagaaccagaaaacttagaatatgatctttggcagcatatacaggaaccaccaacctcccacccagccaaaattccaagtccaaaatgttgacaatgtggaaaaaatttctcatctctatccacaatatactgatcagcacatatcacataaactacaccacattcatcagctgctgctaacataaaggtatgtgaagcatgaatcaacctattaaatactctcttgccaggaaccttttcaacttcgatatttttcctaactatgcctacagacattttggtttgctcacacaattccatattaggttcaagttcacaagtctgtaatatatttatatgcacaacatactcacctgacattgcagaataaaaaacgacaaagccagaagaagtgagagcaacaagaagattattaaaaaaacaaaaatctgtccactcaaccagtgggcctatattttgattttcctccagcttcactagcgaaacccactggatcgcccatttgtccaacattgcaacaaggactaagtttttgtataggtttttagcactttcatccctcttatcagtagatacaggatccaccaatgtcaaagcaaatccaacatagtgtgaattgctggagaatactctgaagcatttgtacatactgcttttcccaacactaaaagaactagacaaaacatctggctcaaaactaggaccagatggagatgaatttaattttgtagacccatcaccacctgaatcacgtaccttttccttcaggcactcctttaacaaagagttactatgaggtacgaagtccttaaaaggaaaaccactattaaaaatgtgaaatgaaacaactttggctgagggaggaaatgatgacttatcaggaaatctggtccatctttgaccatcagattcaaaatcttcaacattagcaagaaaggattgcaaccataacttcgattcaatacctcttgacctctcatctccttgtggactttcactatttccattggttgtatttacatcctcaacgttcctattggtctcatgaaatgaactaaaaggttcatctaccttttcatttgaagttggcgtaacagaaggcccccattccacccactcaccttgttcaaacttgccctgtgatgcagtttcagaacttctggatattgtagtgtttgtattgttttcacaaaaagcatgaactgtcacaccatggctaccagatacaaacaaaagctctctaaataaagcatccttgtgctgattatatgtatccccacaaacaccccaggcaacagagtacacatcacctaaataagcagaccttccagataatgattcacattcaaaagagtaaccgctatcaaaatccactacagatccagaaggacatggcatatcatctcttcttggatctaaagctgaacctggatagtaaacattttcactacaactattcttcacttcattagtcacaccacaatcttctgcaaacacaaatgggtattttataaacaagttaatatgttagatggtggggtggtcaaaggcaccggcaagcaaagtaaaaaaggtaaaactttaatacacaatcctataaaaagaacattggcagtgtcaataaaagttacaggggataaataaacctaattaacctgtaaagagaggcagtagcaaagcttcattctgccttgaaaacaacaataactgctgccttgtgggagaaataaaagcttcacgaaactctgacaagtttagtttaggataagatgagtcccatttatgcaactgcagaatagcaagctcctcaccactcgaagagggattcattgtgatacttcaagtgaacaagaaagcaaacgagaaaatcgaatggtaaagtaattgtgccaccgtaggcttttctgcatcaagaaagaaagaatgcagcgaaggatgacaaattaaaaagaatagtgaccgaaaactctactttctcatatatgatatgcaataaacatgaaacgataattatggagaccaactggaacaattcttaagcatccactgaataaaaaataaaaagacagtgtaaacaaataaaagtacaaaatccccaactagaaaagatcaatcacgcaaatgttgcaacaatatccatctcaggtttagtaacttctcatttaaatgaaaagcttgataaagttgtatagaatttcaacagttcaactccattactgaaacaaattttatccaaaggtgttgtttagtcatccaaggctggaagatgactataaacttattatccttcaattccactcagttactctctcgttaattaaactacttccacttccttttttgttcgactcaattttctcggtaaacaaacaatctgcatgatgccatacgataagtttggaccactcgaaattcgtaaaaaaaaaaaaaaacgtcgaagcatcacttagtattttcaaaattgcataaaccaaaattcagattgaaatttgaaacgactgaccaagactaacaatcgacaatcatcgagtaaataaaaacaaagattcgttcgcgaaattaaggtccaatccaataagcgatgaatgaaaatatactaaacgcttcgaaatagaaccagaagaaacctgtaggaacagctcaatcgaggaagaccgccaccaccattttcggtgaatcaggacccgattggattgtctaattttactaattaacagaaatattcccttttcaggcactattctctcggcttttttattattattttttttttccctcttgaactctaatttatcagttcccgatcgagggcagtgcagtcgcgaggtttcaaaagatccgaagcggagaacaggaggaggagagcaggggctttctggtaaaatcgaatcttttttcttttctttttaaattatgtctatctagtaagtttcttttttttttttttaatctagtacgttttttttttcggaatttagtaagttcttttaccaaataactaccgagacattcagaactcaatagcaaaaatatctcaaaatagacattatt

SEQ ID NO: 14461 - DNA, 7349 bp, Cannabis sativa
taatgatattttataaaaattattattttaattttagtatttttagtatttctctagtggatatgatatatggtatgtataatgtatgtatggagtagggtagtgttttgttttgtttttgtaagccaatattcttccttgcttgcttgcttgtcctcaaaaactataatggcatctccactttggtatatttctttctttcttttccctttttcatgattattcttcttctactttctttaatgcctaatggggttttcttctctttctctcatttcttttttgctttagtaagtagctcaacttccttgttcttcctctcacaattcccatgaaggcctctccaggtgagtccctaaccttctcttccttttttaatgtatttttcaattggttttgtggaactaaagagtgtatatcaaattgggttaggtttctactttttctttagaggacttaaattagggattcataattttttgtctgtattatatttatgatctttatatacacatatgagcaaatataaaattatatatagtgtctgattttggttttgttttttctgggaaaaaggttaaaacttttctcttttccaagttgtcaaattttccaaaagattgtttgttttattggataaacattgagcttgattaagaatgtatagatattctatatttaatttgaaactttaagtcttttaatcatgtttagaaagagtaaagatggtatcttttgttaacatttaaagtgattaaactacatgttgatttgttttgtgtttgaatttgaagagaatatattgccttttttataggtacatctaacctttgtccttctctaaagtctttatctagtaaagtaggaggcattttttgccattgtggctctccaaataaatataagagattggatacaaagcttgaaaggaagctagttgaagtgaagaaagggtcacaaggacatggtaattttaagtcaatcaacagcataattttgaagtttcccaggtttaaagaggaattgaaaaaaatcagaagtgtttttgaacaatatggtaagtttcatatcattattgctttttactaaattttgcatattagtttgttaagatcccaatcgcccaagaataggattggttagtattatataactataaaaacaccctcctcccttaggctaactgggagtgagttctaaccaagtagtatcagagtcatgcacctaggaccgatgttgcaaaaggggtgacctatggattaggcccaaagtaggccagccttggacgtcggctccaaatgaggtgtattgttatgattctacattgaccaagtataggattggttagtagtatataactataaaagcaccctcctcccttaggctagctgggagtgatttctacccaagtagtatcagagtcagtatcagagtcatgcaccctcaattggggccgacatcgcagaaggaactacctaggattctacattgagtatgggattggttagtagtatataactactcaggcatccctcttttcttaggctaaattttgggagtgagttctacttaagtagttgtaccatattttgaggcggtttaacgaaaagtttccctattttgtagatgaagattctaatggagctattgaccgcgaagaacttaaaaaatgcttacacgaattgcaacttcgtttgactgaagaggagattgaggatctttttcattcttgtgatattgatgggagtgaagggatacaattcaatgaattcattgttcttctttgcctgatttatctcttgaaggaccaaccttcaccctctcaaactgtatttattaacaatcaacttgagtgttttccttcatttcaattcaaagtactaatctagctttgaaatcattatctaaaaacaatgtcttgtgttgtgtttcagacatcatcaaagatgggttcaccagagctcgaagcaacattcgatactataattgaagtgttcttatttcttgatagaaatggtgatggaaaactgaataagaaagacatggtcaaggctctaaatgattcttctacttcagagagatcccctgcacacatcaccaggagtagattcagtacgagtttcttactcaacacgcaatctttgcttcgctttaacaaatgcaatgcaactctcattcttctttctctaattttgctctgcaggagaaatggattgggacaggaatgggaatgttagtttcagggagtttcttttcgctttcattcattgggtcggacttgacaccgatgaagaagttcctcttacaggaagtttccatgatattaagtgaaaatgtggaacaatacttgcttatattaatattcaaacatctaaaatatgttgttaatggggaggagttagccagtaattcatgtctagctcatcaatggtgtttcatttcgattaagctataaacctctttgtgataaacagtgatgtaataatattcttctacaaatctgtaatcttgattggaaataatatgagcaaaaattctcagaaaagataagattttgaagacataattctcttaaatacatctagctcacaagtgtttactgaaagttgcaaagaaaaacacaactcaaaaaccattactgtacatgattttatacttcattgaattcctagagcttgtattcccttaattaacaacaaagatggagcattcatttgtttccattcctcaatgctgtccttcttttgccactgttccatgaagcttttatcattgccatcgagtatttgaacgatctgtctcatgctcggtcttgattgaggatttgaatctgtgcattcaattcctaatttgatcaatctcatcagttctttgtaattgtactctccattcatagtaaaatcagccagttcctctaatggtctttgtcgagctataaattcgcgtactttctgcaccagaagcacctcaggccgacgaaaatccacagccatttgtccactaaccacttcaagcatcacaactccaaagctgtaaacatcagccattgtagttgcttcacctgattctatagactctggtgacatgtaaccgaatattccacgaactgatttcttcgagtcagtaacaacatgatggccgtgctcgtttcgtgtcaaaaattcagcaagagcaaaagcagtgagccttggattcatgtctggatcaagtataacagcagaagaggtaatgtttctatgaataacttgttcttcccattcctcatgaagataatgaatcgccgaagcaagtgatttgatgatgttgtatctatgattccaatgatgatgatgatgatgaccatgatggaaaagcaagtgactcaaaagcctattcgccgagtaatcataaacaacgagcatttcgccttgttcagtacaccatccgcgcagctgcaccagattcctatggcgcaaccttcccaagttctgcaattcatttgagaatcttatcctaagagcaggacatgtcttcatgcctagtcttttcacaagaacatgatgagagttgttgaggaagccttggtaagcagttccgaaatccaattctgctacccttttcgattctgagaagttatttgttgcagatatgatctcagcataagatatttctcttggagtttgaaccatgggaaaaactttcccatgaccaaatccaagagaagtgtttgtttttgttgtagtacttgttgtatggcttaatccatcttctgctgttgcatagattgtttcacctgaggctgttacatagtttgatgatgatgatgacatagacatagctgttgtactatttgttgttgtgattgtgattgatcttgttgttgagtttccattgcttgagcttgtatttgtggttgatgacaaagaaatgtatggagggtgagactgaaaagaaggtaaaggtggtaactttccaaccatattacccgaaatctcttccaaaacccatttcatgttaggccttgatgatggattatgcaatgtacagagcaaaccaacatggatcaaacgttccatatcagaaagactaaaagacccatcttgaagccgagtatcccctccttgtaaaactcttttctcatcagaaagtctgcgaaaccaatcgagtaatatgatctgatcatcatcataagtaagatcaacagctctcctacccgaaacaacctccaacaccacaatcccaaagctaaaaacatctgatttagccgttgcaacgcttcgcctttgaaagctttcgggtggtaagtagcctattgtaccgccaattcgagtagtctcagcaagtctaaattggttatctttaatctttggttgctgctgttgatactcatcaagctcatgttctaaccatctagccaaaccgaaatcgccaagcctagcattgtaatgagaatcaagcataacattacttgttttaacatctctatgaatgatctgagattcaagttgttcatgaagatagtaaagagcagcagctaaaccattaacaatcttcctcctctgatcccaactcaaaggaactaaccccacattttcgggtctcttgaagagtactctatcaagacttctattaggcatataatcataaaccagtaaaagctgatcttcatgaacacaccaacctcttaacctcacaagatttctatgtcttaaatgagcaacagcaacaagttcagcaacaaaagtcttctcaaacttctcacctttctcagctaaacatttcactgcaactaaagttccatcacttggaagaattgccttataaaccttaccaaaacctccactaccaagaatttccttctcactaaagccatttgagcctatataaagctctgaatagctaaagattcttggattttcaccaccaacttctttatctgtcaattgcattccatcagtgtcatgaaaaaacaacaccccagattgttcttcttttcttcttattctttttcttctgatattatcaaagatttcagaaacataatttcttatcaaatcaacaacatgactcccacaactacggtgggattggttattggcctcatattccttggtggggttactttttttggcatcattatcatctatttcatccaaatcagctggtaaaattatgcagagttgtttcaactgcataatgggctttaatgggtttttggctaagaacaaagaaaagaaagacaaactagctttggcatatagatgaaaaaacacttaaagaatgaaactttttagtgtctttaatgggttttggctaagaacaaagaaaagaaagatgaactagctaggttgacatatatagatgaagaaaaacacttaaaggttgaaactttaagtggatttaatggggtttttttggctaagaagaaagaaaagaaagacaaactagcttgacatatagatgaaaaaacaaataaagattgaaactttaaaggtttttcaattcacatgatgtttttttttttcatacacaaaccatattatatatgaatgaatgatctattttttttttttgggtttttttttgttattatttaattcaacacggttaggtttgcatggttgaataaatgaattcccatttgaaccggccaaataagagcctattattatcatcaattatctattatgtcatatatataaaaatcttctaaacaaaacataagtagttctggaaagaacattaagaagaaaaaaaaaaaaaacagattgcttattttgcatactcgcagcttttaagcgcgtgggtacacgctccatatagtatgaagaagtttatgacttgacaaaacttttctttctttgacagctttgcttttttttttttttgctatattttgtcttttggtgctttgatggaggaagtttgtgttcttaattatctatttttaatttttttgaaattattttatatattattttttaaatttttttttgaatttatagtttagattgctacagtgatttttacgtggattgctggattgatttaaattgttccgttaattgctatataagtttttatgtgaatttttataaaaatatattaaaaaaaatactttaaaatataaaaataaacaattaattaatatcaaataaataaataaaaatagtatgattatttataggtgagacttgactaataaattaaatacactagtacacttactatatgtagttggcatttattttagctttaaatttctaattgaacaaaaaatcataactttctctaaattttgagttgtataatcaatttttgtaaaaattatcttatcttataggcacaccccacgaaaaaatgtttgtataattttttaaaaataattaaaaagaaatgttctttagagaaaaataaatattttgatcattttttaactataatttattttgaaataattataatttttgaatatggtgtagggatctttataatattatcttatcttataggcacacaccactaaaaaaaattggttcaaaaataaaaatatatacatataaattaatgaaaatcaataaaacaaaatttacttcttagaaagaaactaatcattttaaatataaaattcactttaaaccattaatcataaaattagttggaagatctttgttcctttgaaaatggtatatctatatataatttaatttgaaccattaaacaaaataattaatgtaaaaatgtgtctttttgtgacataaaaatcaaactatgatgatttatttgttgttttatataccctcttagtgattatatatataagatcttatcttaatgatactcacctaaaacaaaaatacatatataataaaataaaataacattgcataagataaaagttatatatatcttttaacccaaagccaaaagaatcttcatctattaagattggacattgattaaaaggtaaaaacaagagttaaacataacaaaacaaagccacataatattataaattctttttgttttagcttagctaataaaagatacttattattattatcaatgccttgtgggagtgagtaagacttttgataacacttttaagtcacataataaaccgctatattgtacatagtgctatgaaaatagattaaattaataaaagggggcatattgtattactttaatcaaacaatcttttgactatgtgcaccaaaacaagacaaggttattgatgatttaagaagctcaatattcttaacataacacttgtatagtgtgtatatataagctcaatcaatgtgattatgattaaaaagagagtaaatacattattgattaggctctctattttattaaatgataaa

SEQ ID NO: 14462 - DNA, 6242 bp, Cannabis sativa
aagagaagcgttttcatggcggctatctgaagcgactccagaatagtcaggtgtccgggggatggatggaggtgaaggatcactctgttatttccggtaatgcttataccaatcagacttttatttacagagacaagtatggttcttattccacaattgtagactccgaaaatggcaaaattattagaaacagtacagccctcggaagtttgcctttactgtcatcgtaaatttcattaactttttctttttcttttcaagtagtaatttgtgttttctagtcaagataaagaaaaggaaaaaaatctgtttccttttataatacgagatttcttcgtttactcgtcgtttgttctgttgcaataaattttgagcaaactttgacatatcgtcatcttgagttctattaaaaaaaatgaaaataatacacaggtgttgaaatctcttctaacaaagaaaaagtggtcctcattcattactacttagcttacacaagtattcaaatttgaaagattaatattcactattattacacttatttacctgttatctttttatatattcctgtcatttattaacacaatgccattggatttgtgaaattggaaatgctattacaatttacaccacggacttcaagtttgtttttatttttttaatacaccacggatagtacaagttggtatgcaaatttgattggacatttggactcatgagatgataattctacaattctacttcagccaatctttgcttattatgagagcgaaagatgatttatttgctctatgttgactatacactaaaatactaatgatgtacttgctatttactgatttaaaccaagttaaatataaagttatttattggtagtaatatcttttgaactagatcaaaatgcaagccaagccgaaccagctttcattgattatcaagagtactttttcaaaaaataaataaaactataatcacatagaacgctattttttgtaaaaattttatatttttgcgcttaaaattttgtttttagcagtttataattttctataaaaataaaacgaaaataacaaaaaaaaactacataaaaataacaaaatttaacattcaaacaacaacaaaagataacatacaaataacaaaaaattaacagaagtacaatataaaaatacgatattttttataaataaaattataaaaaacttaaaatttttaaaattttgtactaacgtatttttgtactttttttttttttgttatttttatacatttctgaaataatctcaaaaataaatatagccttttgctcttaaatatagttactcataatattaactaatttgtttctcaaataagattttatgtttgttaaaagtgacttcgtagttcctacataatagacgcgtcaaatttgtgtgcacatacatatcattactattgtaacaaatgtcaaaacgcctcatatttcattctatctattgtggtagactggtagttattagtaatggtaggaaatatgaatacgtaatagattttttcgttttcttttaggaaaaaaagtatttatcttgtctaatgtctacaatattttcgtgtagtggaaacgtaaatgtgggatgaagctatgaacaaaagtctgtatcactgtagaaattaaaacagtgttaaaagcaagattagcactattctgtatatgtttttattattgtttttaaatcacaacaacgtcccatgctttagatactttaaaactcgtgcatgagataaaaggattctaccaaaaagcttctagtgggggactaaagcagaggtttccgcagtgtggtaggtggtattgatcagaaatctacattagctagaagagctggtcgtggctgaaaaaccatgaaatccatgactagtaagaaagaaacaaaaagaaaattctatcccgctagaaaaacactctaaaactcatctttttgggaccccttttgttcatccctctttggtgagaagattgacaaaaaccaacgtacaagtcgagagaacttactcatatcagaattagatttctccttatctaactttacagtgcagacgtcagcatattcatgcttcaaatgaggtgcaacaattctttcctgaaatttaataaaactttctgtaatgagcatgagaacagggatggcagccacaaagtgcttgaataggaaatcaagagtaccttaaacgtttcaaatgaacagaattcagaaccatcacaaccctgttcaatcaaacacaagacatgactatatttcagtatattaccaaacaattaaatagggaagtaccagaagtcacaaacacccagagaaagagagagagaaaaggaaaaggcttactggcactggaatgggttgttcattgtgcaaaacttgcacataataattgttgaaagctggacagctgtataaaaccagcatattgttcccagcaaaaggagccacaacgctggccttccaatttctcttttgtggtggctttggagggagttgcaagggttgttccctaagtatttgttgaaattctgaattatttgaaacaaagaatgttgagaagatagcatacagaaaaagctacatacactttcgtgattgctttcacatgagagtatgatgatgaaataacttaccagattcttccagaaaaagaccaagaagacatgaaaatggaattacagtctcggcatgtgcaaaccttagtcttgccttttcataacttccaggaacatgattttctacaacgacagagtatataatttagtatccgcatgcaatagaaaaagcttttatgaaagattttttaaagttaaggctcccactacaaaagcactattgttttttaaattgttaatggaggaagtaaactacacttcctaaaataacatggtctagctaacttgaaaaaaaaaattgaaagataaaagcagcaaaacaggtaacctaaatgcaaaaaacaatacaaaggaatgataaattatacaattatcctcaagcaaatccttatttcctatcacaacctactataccttctttagctcgaatagcctgttccatggattgcaaaatatctttaagtaatggcactcccattcgataatttattgaattaccataacctttcaatataaaggcctccaagtcatctgtccattctagcatggccacctataacatgtacaatatttgtaggcagcagagagcaacatgtcagctatgctttcaattgtattcaaagcaccgcaccaacttatcagaggaaagagaggaaagcccactgtactcataatattatcagaatacatcaatataaatatatatatatatatatatatcatcttggcttcataaaactaaaacggaaacatccactgatgggaagttataagtattcaggaataaaaaggttttttttaatggatgaagaagtaatagcctatagctgatatcacaatcaaaaaatcaagttcaaactgcataactcgaggtatacagttaatgtaagaggaacttatactataagaaagaattatcacattttctttcaagagaaaaaattagaggcgtacgtatgtacctcagaagggctgaaaagaccacaagcttggtcggttatatccaataaggatgcctcctgcaaattacatccccaaattgggtgactacaacttttaagaaaaaagactaccagtttttaaagtaaaagtagttgattctgaacgaatcaaagataaccatatgagctctgataatcaacagtaaaatatgactcaaaacacacaagaataataataattgtaaatacctgtttgcacaggaaccacaaagatgatgcatcctgcctcgtaaaattcaacttgtagcgtccaattaaggaatgagtgatctcgtcaaaaataggttccttgagtttatcaacagaaggctcttgactttttctaaaatcctgcacacataagccttcaataatcagtgtacaaaccagtgcttatatctgaactaaccgatagtcaataacaagctttatcagtcctggaaaacttgctgagcatattctattttttattttggtcttcaaacaccaaccaaaaaccaccatagaggttccagtcagatctagcctagtcagtgaacatcttataagaacatacaactggaagaataactaatgagcacttccaacaaaaacaggattcccaagaaaggagtatatgtaaaatccgttccaatggagccccccaagcatatggtgtatgaaaatacttttaattcacttttttaatgaacttcttaaacagaatgaacattggaatgggtttcctttccttccgaacttatatcaaaacattcataagaaaatgaaaataaactgtttaaacaaaattgaaggatgattatctaatatgccttcatctatttccaccaagcaagctgtcgttttaatggggaaatgttacacattatttcaaaacctttgaagctatcagtttgggcagccaagagaagagatgaagatgttttgaaaatacagtaaaagcatggaaaagaaaagatcaaagctgcagaattaccttgtagttctggcaacagtcgtgaaaacgcagcattgtatcacttgcacggctttcactaactacagcaaaagcacgtttacgccccgggccaagagttcctgttccactaaataagcccatgccatatgccacagcactggctgaagcgcgagggatctatcacgtaaaagaaaaatgcgacgaggttacaacccatttgaataagtgcacaggggaagggaggaagcactgccacaaccagtcacagctatatttatctaagaagcttttatcaaactgatataagagaaaaacataataacatttacttccacatgtgactatttttacatgaaaaagcacatatgaaatgccattaggtaatgctaatatcgaaaggataaatttaaaagatgctcacttgagtagcctttatcgtataaatatcagggtggtaactctcattaaataaagaggcaaatttttctctggtcctgactccaaaatcatacaattcctcttctcctttaataattaattctccacccttcactttgtctttccaaggagactcccaaccctgcaaccaagcaggaatttcctctaaagacaaaccttgttctttggcgtctctcacaagttctttgagatgagcagccaatctatctaaatccctcattcgttttttagtaggagcacgagttccatgccttgcctgagattgtaaagttgcatcactaatttagtaccatttcacattttataaatacaatgggcgtgacatcaataaaaccaaaactagcctctccaaattcaaaatgtcatattacacaaaaaagcgagcaaattaagctttcaaaaatcaagttattttaatgtaaatgtgtagcaacaagaagcacacactgctaataataacatctcctaaacctggtaattaaatatggaagagggagacaataccacaaggtttaagtggataggagtacatccatttggaacatctgaaggttcaaatgtgctattagcaacatttttcaccacaccatatctgagaggaaagttgcaaaacagaaagatcagaaggattaacgaaaccagctacaacaccgtattacctaatcataaatccacattcataaaacagcaaaaccccatatattttgtccgatataacaagtaacaaccgatagtaatcgaaatttgggtttcttttgctggccatttcttcataaaactattgaattcatctagaagcatccagtttacaaacagtgagattaagcaaaagcaaaaccctaatcaatggtgaaaagagagagtatgtgtgtgtgtgtatgttcccaaaataaaatcgaaactaagatgaagattcgacctggatacagtagagagataattgcgaacatcaaaatcttcttgttgagcatttgaatcagccaaaattgagaataataggaggcaaacaatggtcagagcattcttgttcttcttctccattagcgctaaaacaaaatgagagtgagttgagattgagaggagggaataaataacagctttattacctgtcccaacccaaattactgtctcactgcctgcctgcacaactgctactaatcagccaagtgtcctctaactttttttctttcttttttttttttatgtaaaa

SEQ ID NO: 14463 - DNA, 4632 bp, Cannabis sativa
  modified_base (1403)..(1412): a, c, t, g, unknown or other
atatatatcttcttttccaaagcacatacatttaatatagagactacttgaagctgaagtgaagatactcatatccaatttcatttaccttaatttcttgacttttactgtgttgaccttggatggtcattaacaatctaattatttattttatttttctcttgaaaatgaaataaaagggttgttgaatagaggcaacagaagttgattaattataagtttgatggaacaaaataactgcttaagaataacaactaataaattgttaagggaagttgaccttgccattaattaagttgttaattgaaaaattaaaatgagatatatttgagcaattgggatcattattattacacttgctttgcttggcctaaaagttgttacttaatatatgtaataatattggaccacttcataatttttatgtttattttaagaaaacccttaatggaaatacaaatactccccttaagaaaaaaaaagaaattcccattttggaaaatagatttgattgtagagactattggaaatttaatgagaagaaaggttggacccacaagtaaaaatgtatgaaagcaaaagggcaactatagattgaggaggacattgataaagatatgtcatcttgttcttaaattcataaccctatgaaatatatatcatgggttttagcttagcttgcaaaaatcacaactatctattctaatgttattatttatttataaaattttagtttactttaatcttgttaattagtcatgttgtactattaaagaagttattgatattcaactatttgtcccctcaaaaaaaaaaaaaaaaaaaaatcaactgaaaccactgtttagaaggtcctttcatgtaggttagctcaattcattcattatttcgtcatggggtatgactttaattatatattcattaaaaaaaatgggggaacaaacctgtttttgttgttattaattaaaaactaggacataatattagttttgaattacataaagaaatttttataaaaatattagattttgggggaaagtttacaattttactattataaattcttataaaaatactattttttttataaaacaaccgtaaaacaacaaaatagaataattaaaacaacagtagaataatttaaaaataatcgtagaacaacagtaaaaatttaacacagtatatatagtattttttttaaaaaaaaaatccaccccacaataaaaaaaaataaaaaagttagaaatttcaatatataatataaaaattctttatataaacacaagtttagattcaacctttttattttgttaacatgtaagacaatgtgttttttcatttactagagagaattaataataattattccaaagggttagtaaggaaataataataataataannnnnnnnnnaataataataataataaaagaagataaaataagaagactataaaaagtttttgtattgctgttggaattgataactcaatggtctgtcatcccacttttctcattattttgttattaattcacaattaaaacaaataatattgcaccacatgtttctaactacacttgattatttcttttatgaaacaaaactcaacaaattaagataatgtacacattacccaccaagggaatggcctcttattaattattttactataataatattgctaattaagctacttattacataattacattaatattataggagggaagagaccatcatataacacgagctagactgattaattaaggcatattaggcataatgagaacattaaacaaaaccaaaatgagtatgtccaaatatatcactcaatttactgctcactttttagagttcgatcacattagattttatccaaattaataatgaaaaaaagttatgccatttgttagaaatatgcaactttttaaccccaagatacacaattaaaatttaaaaacacaaaggtcaaaagcttgttaatagtgcgtccacaattaatttggtaaaataaaaaaacaaacttattcattatttgtttgagatttgaaaacaattttatgtttttgaaaacttaagaagtgggggtccacataaaaatacttgattgatttagtgtttttaaaaactaaatctgaatatgattttgaattttaagcttaaaaataaaaacaataattttatgttttctatgtttttaaattattgaatctaaaaactctttaaatactgtcttactttttttattttgagattcccaactaatcacaaatttaactttttaaaacacaaaaatataaaattacactacaaccaatcacatatttagaaacaatttgtcacatacaaaattcaaatttttgtttccaaaatactcttttaaaagacaatttttaaatcttaaaccaatcaagccctattcaagacctaaaaaagtcttctcccgaagaccaccacctgttcaaaacttttctttaacctattctatgaaccacaatagatcatcacaagaaaatcaaaacctagttgaacgtactctaagtttttacaaagaaaaatctcttctcacaaagctaagatatgaaatgaagttagaagagataagagaagagattgttctctaggtttcatttatgcacttataaaaatcctaaagatagctatgacacgtttttacaactgtataaaatttttttctaaaataaaataatcttggatttgaatgttgattgatctgcagcaatagattcacagtttgatgtgataaattaatttggatcttctttactagtttcccttttaagttcatctccaccaaattaaccataaaatctatcatataaaaccacacgatttgttgtataaacaaccaaacccgaaacaattaacaaaaaatgaattaatgtaatttaattatacttttatatcttttatttccataaaaagaatattctctttatgaaaataaaccaaataaactaagatctctcacctataatcaaatcaatataatatgcaatattaaatatctaaattaaattaaaaaaacaatattttctcaactaaattgctaaaacaaaattcacaaataatagcacttaaatactattccattatcactactctaattaatacaactaaaagataaattaaaaatatatattaagaaggtgaacagagtactttgatagagtggttaatttaatattgtgtaatgataagttatcatcaacatacattaatgttcactaagtgtgctttttaataatttcatatttgtttggcaagtgcaagtattgatgagatggagtggttgattttgcctatatatgtgtatctcaacaattttttttacctcgtatgaatcatggtatcttattatgaaaattttattataaggctaccatttttgtcaatactaatataggtatttaaatttttagcactttgagaattttttttttttaaaataacaatgtatattagttataattgatatttcactaattttaatattttagaaataatttatagtgtcataaacaggtataacattcggttgcatggatgcttattttttttcccttcatacgcatccaataaactattttaaattatattatttggaatttttcgaaaaaataatttatagtggcatgtttattataattataattatgagatggagcaacagacatcatggagagaagagaagtttaggttttggattttctaagggccttgtcgtggttattcgatgaagaagagagagagagagagagagagggtgagcccgagagatcggggttggagctgcgtgcgattgacaaagaaagagagggagagttgagagagagaaagagaaagattggggttttcaaaaaaataagaaaaaagaagaagaaaaaaaaaagaaaaagtaaaaaaataaattatttttaattattttttgttttaaaatttttaaatatttaaaattatttttaataattaatattacgtagactacttaaaatttaccacgtgtaaatttaccacttaaaatttactattgtgatacttaactgaagtttttagataaatgtataataaacaaaataaaagtgaggttactaaatgtgtaatttaaataatattgccgccaatatctcttttttaaatcattagttgatacaagtatgaaaataatatattttgtatcaaaacaatgaaaatgtacatgcttaatttaataaatttatgtatgaaacgaaataatttttttaatctttagataaatgtgaatttatatgtatattttcgaaaactaaaaaaagtataaaaaaacaaatagtaaaaaacaaagctactttacaaaaaaatatatataaaataaattatttttattacattaaatattttattcatttgtccaaaactaaaatatttttgttacatgtacataagtgtacatatggacagtccactatgatacttaactaaaatttttagatgaaagtgtaatgagcaaaatagaagtgaggttactaaatgtatagtttagataatattagcgcaaattgttagactttttatttgagcttacattaacttttattagtttattaaaagtaccactcgatggttgtagac

SEQ ID NO: 14464 - DNA, 6557 bp, Cannabis sativa
aaagtttttgattcatcaattattataattatagaaggcggtcctaacaaaaatagagtaacataggtaagaaatatttgtgacatctatccatttcgaaattttgaatcaaccgattcattgagcagcattttcctcatataatcaattatgtgatttattgtctgcctacaaaactaacctttagctcttaaggatttcttcgccatgaactccaaaatatatttgcttgaatattcttatgactctgcaaagctatattcgggataccataccacaagaatttactgttggctgcctacaaaattaaccttgtagcgcataagaattctttgccatgaatgcgaaaatatgtttgcttgttttgtttttatgagctgcaagactattttttactatggaacaatgttttctgcctggataccctacagagcaggattcagggattcagtagatttcattactagcgagaaataacttatattttcatgtccccatttgaagctggctgataatctgcatccgatttgatgtccatgtttttgccgttatctgttctagtttattaaagtaattttgcaagtttattttttctataaagttgccaaaaaagcatctgaggcaggtccacatggaatttcaagaaaacacaatagaggtatgaatttcatactttgtataatactacacagttcatttcacaatcatagttttgtggcttcttgtttcctttctctaataaattatatcaatcagctgtttttccctatgaaattgattattttccttgttcttagttatgctatagaatttaattcctaatagaatgatttcagttccacaaccacttaggtagaacttaatctcaaaagctagcataagagaggagggtgcccaaatagttatatttcactaactaatcccgtacttacaatcccccttagagccgacatccacgatgacacactctataggggcccactctgggctttttccacaggttggccctttcgcacttgaaggagcatgataccatttgtaacaatcacttaagtagaactaactcctaaaaactagcctaagagaggagggtgcctaagtagttatagatcatcaactaatcccataatagtcgatgtgggttcctaacatataactttgtggaattttataattttatagttttctcatgatatttcctttaccttcgcctttaggttgttgtagcaacaattgcttttggtatggggattgacaagttaaatgttcgaaggattattcactatggttggccacaggtattctctttttagttgttctttgatgtttgttgtttctcgctctttcataattatgctttatggttgtatgataaccatgaattatatttcaacttgaaattaatttgatttcatttatctcatgaggcaaaatgtcccctaaaatgtgactattcatttttagatggacaaaaataaaattattttttttgctgcataagatttttagatgaattctggtttatgcttcttgtaacatatagttgcactgtagagcctggaagcatactatcaagaagctggtcgtgctggaagagacggaaagttagcagattgtagtaagcaagtctatgtttcatgtttttggtgaaacagtaatttcttatactaaattgcaaatttgaggggatgaagcttctttatcttatttatatttttatttgttaaaaaattaatcttataatatgatagatatttgaaagttcatttttttcttttttgaactcctatttgatcctcaatggactggcaagatgaatttaaatttttagtatggaagggggtattgggtttttactcatttgaatctcaatgaatgttgatactcaacaaaacatagttgcaactcattatctgctttctcaacagtactgattgcaaacttatcaagaataccgtcacttttgcctagtaagaggactgcagagcagacaaggcaagcatacaagatgttgtctgattgtttcaggtttatagttaattcttctcctcatatactactatgtttcattattgtactaaagattattttactccagtggtgtacatcgatgcacatgtttatattgcatatttcttctttatttgcaggtatggaatgaatttgtcatgctgtcgggctaagaagctcgtggagtactttggagagaaatttgctgatgagaagtgtctcttgtacgcacggttttttttatcctcattttagtcgtgatattaaagtttgttttcttgattgtaaagtacttttatgacatttttcatgtctactatcttgattctcattatcatcaaatattttatttcaagaaaagcagtcagggttggcattgtttcacatatatacattaatgtttccatttaaatgaaatatttatgtgcatatgcacgtacatttatgcaggtgcgatgtgtgcgttaatggacctcccgaagtacaggatttgagagaggaggcagacatcttgatgcgggtcattgctgcctataatgtaagtagtacgattattgttatcataaatgcgatgtgatgaattaacttttttatatttgaatattaactataattgctcaaagcattcttgtgttttttgggtctatctagaagtagttacaaactgaatcaatagagctgtgtaaagtatcagaaattacaatatgctcatggatttagtcatgatgtagctctagatttgtgaacggaatacacttttccaaactccaatcatctcatgggtgacatgttgtgtttcagggaagtagaacttttgacgatgcctcatactttgacgatgcaagtacacaacaacgattcaggggaaagccagatctcaggatgtttgtcagtgaaattaggttacaggtatcatatttccaattccttttcacaatctctgtttgcttcattataagacatttgttaattataagacattcatttgcttctttaaattttatcatatgatggccattgcagtctcaaaaattcatggcaactgatctgctctggtggcgaggtcttgctcgaattatggaaagtaaagggttaattagagagggagatgacaaggtataccattttaactatttccgtaagtatattattactccaatgtctatatttggcagaaattgtcttgttggcttgggtttctgttcaccgtcgtaggagtagcatgttgttattgcctttagttgacagacttgtttttaataagtttgcactgttttggtcagaaccatgttcagattacaatgccagagccaacagagcttggtcttgagtttctgcaatacaaggaagaccaaactttttgtgctcacccagaggcagatatgcttgtatccatgaggaatactgaatcttattcgagtttctcagactggggaaaaggctgggctgaccctgagattcgacatcaacgtttggagaggatgcaacccaagacaaagcagagaaaagcaaaggggttaagagggtcaagaaaaagggggaaaagaaaatcaaataagcatactcctgatatgactactgctagaggtagaatagcagcaaaattcaccaaagcaaatggtaagccatttcggtcttaggtgatttattgaaaatttgtaaccatgaactgtgtagagttggccactctatcacgaagtttttgaaaaagcaagatattgaatgatttttaatttttattttttatatgagaatcaaatctgttgttataaattaagagtattcatttgcaacttctacaataatatttgtaaaagtagacaaagtaggtgagggattgttgacggccatagcaactttgagagcatcagtttcaacttcagtaatggcgagttgaagctgcgatgcccaaagaaggctatgaaaaagtgtcataacttcatctcatgtgatttgaatgtgccttcgagtaagcagtagtcacatgcccatgaacatcccttacaatcgagtagaaatactgactgctgcatcaacattcatttcaagacctgaaagaagaggcggcagtgtatgtagtggcttccaaggttcgggaacaacaggaacagttggagatgtcacaaccggttcatgcttcatatttattgatgttaaatttcttaccaaaaaaaatgatgttaaatttacatcaaaatcgaaaaatggttgtcaaatttgtcaaaaaaatgagcatgagcaaaattgaaacgtacaaatttatctgcccaacagcgacaataatagtaaaagataagaagttagttacggatgagaaataatattgaacatttctgtctcatgtttattgctgtagaatgaaaatggaaagtaaatgtatggatgcattttctattagatttgtaacatttttagactatatttcaacaaattttatttttaaaagatgtcatttggttttgtattttatttggttcaaatttgatgcagtgcatgtatcattattcaatctaatatatttattacttgaaagaaaaatctaatataattattaaaaggtagtaataaattattgaacaataaaatagtatagtaatcatttcgcaatatataaatctttatatatatatatatttatatcctatggtttctctctagggttgagagtctagtgctgctgcttgtgacttcttttctcctctctggtcatggcttgccaacctgtttgtgggtttggcagtagctatggttgggagttgttgattgtgcatctaaaggggctctttaatggaggatcgacatcttttggtattggatttttggggttttcgcttgatggccaggcttggttttagacgtttctagcatggggtgtaccgtggggagggtcttgatttgggttgttgatggggatctgttgtttgtctacctgtcgtggctggtttcactactgtttggaagtcattttcgcttccattagggtggtccgaaagcgtcaattttagatggacgtcaaagattcgttggagttaggcttcacggtggagatctcggaatgatttggtccttcaagtttggggtgattctcctctcggtggcaaggttgatattcattgttgtgaggacaccatgtgtttgtattcggtgattacattaatcttcattggtgtttttatttccttgtttatttttcagtgattgtttgttttactatcttatacttttaataattgtggtttgtcaccctcccattggatcaatgggagtcgtagtctcagtggtctgatatggggaatccctagattgttattcattctttgttttatggattgatctttcaatagttttgtccttggtttggttggttttgttatttctcctttattctagttacaataattggggtgtctttgacccaatttttattggaagatctttgactgattgtcattgataagtgtgatctcacacatgttcacatgttcattcaggatggacatcaagtattcttcacattttttcaatgcttagcaacttatgagtttttcagttgaagatgttgttaggttttttttcctatttattgtaaacgacttggttaggctattattattgattcttctctatgaccaacatctgcatgtaatgaattatatcccatttacctattaatgaaaatttccataaaggtacaaaaaaaaaaaaaaatcattccaccaaataatgataagaatcttattagaatgtcattgtttatactttatatgataagtagaataattacttacaaggtgttatccaaatttgtacacaatgacgtgacatctatttaggtgacacatggaacacattttataacctagacaagcaagtctactcctaatgattcgtacaggaagatttgatactcaaggtcataaacaggagttgtgacagttgagcagagtacgcgaagacatccgaccaacttccatcaagtagctagctctcatgctctgaccagagggtgcgagttaaataattttagagatatatccgatatatctacacgctggcaagacacgacactatccctaaattcatgggatagattcgtagtatcaaagaagaaagaaaatctgcttaagtttcccattttgattattgtaattatagaaggtaaatagatttcttattttattttttattgattttgggaaaccaatttgatgtaactaatccctataagtagtggactcatctcactattcagggagataaaattcattcaagaaaaatactcacgagagaattatagattcaagagtgaaatactcagatcattgcaagagctttcgagagatataaaggcattcttgttcatcttctcacaagtcaatacaactaaagaggagtaggctattaccatcaataagaggccgaacctatataattatagtgttttccttactttatattatctatatttgttattttaattccttaaattgctttaatttgactcactatcgttggctaaaagtgaggttaacattttggtgctttca

SEQ ID NO: 14465 - DNA, 6027 bp, Cannabis sativa
atagtatagactaaaaccgtcgcctataccctattttaggcgacaattttaaaccgtcgggaagtccacattagcgacgaattttaattgttgcctattttgcccgttttacgacggtcgtataggcaacggttatagaaactgacagaaatactttaaacgactgtttaaaaacgtcgagaaaaaccatttttgttataaattagccctagcttccctctgttagccaaacactctcagccaagcttgatgatacaaattatcttgtgtggagaatgcaaatgaaaaatattctgatagccaatggtgttgaagggatgtcgatgagtcgatttcatgtccgatgcagcctactacaaaattaacttttctcatcagtttatagctaccttttataatatttccaatcggttcctaaaatcattgacaatgtgggtataaaaataatgcgagactttgaatgatgattataattgttggaaaaagtcactacggtttacaactgttagaaaaagttgatcaaataacagtttacatgttagaaaaaatctttttaaatgtctgtttataaccattggaaagacctttgtcagatagtaactatcgagaaacgtcactttaaatgatggtttataactgttaaaaaaagttgttcaaaatgaagagagaaatgataaaaatatgatttcattacacatggaaaggagcaacaactcattacagagtacaatcagttaaaattaacaaaagctatcgataaatacaactgtacaaagataacgaaatcctaactaacatgtacagtaagcttaactaacaccccccataatctgagttgggacaaagagaccaaactcagtttggatcaaagcagttgaaatcgaggtgtagacaaagctttagtaagaatatctgcaacttggtcttgagctagagtatgtttgacaagaggttggttatggagaatcctttcttgaataaaatacaagtcaagctttatgtgcatggttctattgtgaagaactggattgggtgacatcaaaatagtgctttgattgtcacaccagattgtagggataggttgttgagaaagtccaactttagtgagcaaagattgtagccaaatgatttcagtacaagactacgatactcaacttcagtgctcgatctggaaacatatttttgcttcttagaactccaggagaccaaattcaagccaaggaacacacgaaagcctgaggttgaccttcgatcatctgggtccgaggcccaatcagcatcacaaaagcttgtcaatgttaaagaagaacaaggcttgagatgtagtccatgatcaagtgtgcccttgagatatctcaaattttttttgacaactttaaggtgagactcaagagggttgtgcatgaactgagagaatttgttcactgcataagaaatctcaagtcttgttatgacatcatattgtagagcacctacaatactcctataacgatgtggattagcaacagagtcacttccaaagcttgacaatttttccagtcataggatttggaagtgagttggccaattctatctttgctcgacaaaagagatccataatatattttctttgatagagataagtccatcatccaaatgtttcacttgtatgccaatgaaatagtctagggtccaagatctttgagggaaaataaggcacttagattggtgataatgagagagacctcagtagaagagctgccagtgatgattatatcatctacataaaccaaaataaaggttgtatgagatgaagtaatcctaaggaaagagactaatcagatttggcagagacaaaaccaaaacttttaagggtaattcttagtttcccaaactaggccctgagagcttgctttagaccatataatgcctttttaagttgacaatcataggtagatttttatccacaaaactaggagctaggtttagtcatgaatacttcctcagttaattaaatcaccatttagaaaggtattgttgacatctaattgccttatttaccattttttgataaagcaattgtcaatatgacttttattgttgttggcttgatgtctgggctaaaggtttcagtaaaatcatatccatactgctgcaagaaaccttttagcaacaagcctaactttgtattttaagatagaaccatctttttcctccttaactctataaacccattagtacccaataggttttctaccagctggaaaaggcacaagaacataagtgttatttctcttaagtgcaatgatttcaccattcattgcattgttccagtgaggggactttaagagcagcaacaagtgttaggggttccttggagaccataaacactttttggtttataagtatacaaaccttagctcttctaaccatgtgatgattgttgacatgagcttgaagtgggacaacaataatattagctaatgaagtagttatttcagttgaaggagttgatgtatcatgagcactaggctgttgtgggactgggctgtgacagccaaatgatgatgcacctgatgctattggaggaggcactggatgcatcagttgaggaggaagatgagtgagtagttgatattttttcagaggagttggtggtctcagatgtggcttggcgagtattgggaatgagagaggaagtttcagcagaagcacaatgacaagggacaaattggttagtggaaatagttcaaagggaaaagtaaattcatcaaacaattcatccccttgaaatatatatattctatcagaaattcaaagacatttatagcctttctgtttcaaactgtagccaagaaatgtgtactttttcagagttgaattctaatttgtgtttattataaggcctggtatttggaaaacaagcacattcgaagacttttaaagtggagtaatcaggctatttgttaaagagtttatgaagaggggtatcattggcaatcacaggagttggaagcctgtttattatatagcaggaggctcaaacaacctcatcccaataggatagaggcattgaagcctgagcaagtaaagttaaagtagactcaattaggtgtcgtgtttcctttcagctacaccattttgttggtgagtagctggacaggaaacacgatgagtgatataagataggcttttagagcttgaatttcacccctaatcagattgaacagagataatgggcttattatactctttttctacttgtgttctaataggcctgtacttctcttgagtggagcagaccatggatatcgaacatgatgctcttcgatctcaacacacttggggttttggttcctcccccctcaggttgtaaaattattgattgtaaatgggtgtatcgcctcaaacttaaagttgatggttctgtgaatcgatataaagcttgtcttgcaaaaagcttttatcacggacctagttttggattttcatgaaacttttagtctaattattaagcctaccaccattcgtttggtcttgtctttagttcaataacttgatattcagaatgcatttttttataaacttaacccagattgtcaatttatgaccaacctcaagggtttgtcgactcaacatgccctcccatgtttgcaagctctccaaatctctctatagtttaaatatatgttcactaatctaatttaagctataaaaacactaaataaatattaccaaaaacataccatttgtgatcaaaatttcacattaatattttcctatttttcataaccacaatccaataggcaattgcgatataatttgcagtggagagatccattgatggcacgatcgacgtcgtttcatggtcaatattttcttacgtgcatgagacactagtattaaaggttgaaaagcctgttattgcatattaatgaatgaaactcgtgttatcatgcaatgaaattatcgttaaagagtcgagaagtacttttcgttgagttgatgaaatctttattaatctggcggtttatactcgcgagtaatcttcacgtgcaacttcttggagtggagtaaattattgatgtaagggaacggtaacactctcccgtaactaactctgttcgacatctaatcagtaatttcccgccaaaatttaaaaaagaaaaataccaaaagaatttcgacgcaatttccatttcgttcggtttcgaattctctctatatataagcttcattcttccctcccatttcacaacaacttctttttcaattctctctctctctctctgccatttttagatcagaaatcaggaatagccagcatgagaggtcccaaatcagctgcaattgctcacaagaagcctgacactgcgtaaactcttaagcttcctctgccttttactttcacaatcgtcctttctctcagctctctgttttgcttttgctgcgtttatgtttctctctcggatcgtttaatctgatgtagcctagcttttgttggattgaagagtttctggtccgtgcgtgatttttaaattgttacggcttttgtttctgttttgaattttgaaggatgctgaataaacggaacgcagtgaaggagaagaaggcaagcaagaagaactctgatgctccgaagcgtcctgccggtgccttcttcattttcatgtaattttctctctttagattctgctttttcgattaagtgagttgtgtggaaatgctttttcatcctttcgtttccttgtgttctgatcgagtatgtaacagggaggagttcaggaagtcttacaaagaaaactatcctgatgtgaaggcttgctcagcagtaagatccgactcaactcagctttactttttcttttcgtttttatttttatattttatataagaaaatggacgaaaatttgagcaagaaatcgaatgaaaagttgagaacggaattaaatatttgtatagatatagcgatgtttccttagatgaagttaatttattcattcattcatcaaatgtttatttgcaggtaggaaaagctggcggtgagaagtggaaattgatgtctactgctgtaagatttcttctattctcttagattattagcaatttgttcataagatttggttgagattaatgcgtaaggtattctgccttaaagtttattgatagagttaacggacaatcttgatagcagtttgtatacaatgtcagctatgtattttagagataccgtgactaaaaaatcacaaaatcatattgcattgatcgttttattttaggagaagtgtccgtacgttgaaatggctctgaagaggaaagtagagtatgagaaagctgtggaagcatataagatcaagcttgtaaaaaattttcctactcttcactgcttaacatacagattccaaagtttctatatatattcattcatatagatcaattaataagttaaaatgtgctatttctgatccttattctatcgccgttttgtgttcaaattatcagagtgataatggtgaggacgaaaagactgaagaatctgagaaatcgatctcatatgtccacgaagaatcgggagagaacgatagttcttagttattactttctcaggtaatcacattgtatagaatgctaaaaacaaaaccgaattctacttagaaattctgtactaataattgattcatagaagatacttcaattgttggcttaatatttattgcttgatgcaattttcttgcagacaaacaggtagaggctttatgaactcaataattagcatgaattggagtgacgttgtggaaggttcactgtcgtttgcctacatttaggtattagtaaagaaatgtggcgacatcattgttctcttatctttttttttttctttctttctttgtaaatgctttctgaaccatgcttagccctgttgtcaaatgctctgctctgagcatttattgcatattattagactggaacgatatatggaaattgtagttaaacaaaatgttgtgcccagctgagaagtatgaagttgttgataatagaattctacta

SEQ ID NO: 14466 - DNA, 2779 bp, Cannabis sativa
atcaatttctcttgctttctaagctctgaaattgtttagtttctacaacatttgatcaataaagtttcaagcctcaagggttttcttctctcctggattacttgtgattgaaccacttaagtcacctatgtcctttttattgtggatctcttttatgcattcttaatctttgttaattgttctttgtttaacttgtttcttgtttagtgttcgagacaccacatacacctttagccatttgtcattaatcaccaaaataatgtgctcagcattatttcacaggtttataattcaatttactaacatcaactacaattgtataaaacaaaagtccaagacactaacacatttaacacacatagcaaaccccatttcctaacaccaaatttaccctcatttgcaaaacattttggtcaacaactacaaatttatatatatctaactgaatttgttcttgatcaaaaccttggcatcttcaactagtctcttaacaacttcaccagctggtaaaatctccttaattagacctacaccttggccagcatacatggccatactttctatgtcacctgttgctgtcgaattcggaacagtgcctccaagccgacgaatctccctctcctacaagatcaagaaaaagtgaaaccaaaacaacatgagctcatcataaaaattattactatagcaatttctagtcttattattacctttccatgtattgttgatctacctaaaacaggttggtttgcttcattttcatgaggaagaatagatttccattcattgaaaaaaggcgtttcaagaacacgctgcggtgcattaggccaccttgctcgcccaaatatatcggtgtactcggtcctatcaaattcaactaatttcttcttgtaaatgggatgagcattactttcctcagttgcaacaaatctaagaaaaaattagcaataaggtcatgacttgaaatgtaagatccaatgctatagaaactattgctaaccaaaccaatgcaaatgaatttacgtgtttacaatacacctcaaccaactaagctatacctatttattatttacaatacacttaaattttactttaataaaagccgaataatttattttttttatttttttattttagaccccgaaaagagtggaccctaagcacgggcctagcccgcctatgcctaaggcctatgcctaaggctatgtctagggccaaacctgcgtgttcacaatgtcatgacgattttctctagtattggttatcattcatttgtaaatatgataaaatgaattggtgagtttatatgaaaaagatatataccttgtgcctaaacagactccttgagctccaagggccaaagcagcaacataaccactagcatctacaatgcctccagcagcaataacaggtatatctctctctccaaccagatcaactactcttggcaaaagtgggaacagaccctcctagatgtgtatttcaattactaattaattattattacttttatcatgttgaaaattaaataaattatattaacatacctaaaaaactacaattagtcccacaagtttttattattattaatcactatgaatattttaaaaattaaaaaaaaaaaaaaaagttgctctataaagaactcatgttcaaaattttgttcattcatgtaattttttgtgcatttgtaatagtacctgaccaatcacatgaccacctgcttcacggccttgaacaataatggcatcaacacccaaatctttagctgtatttgcttcttcataactcccaacctaaaatacacaatttataatttattataagaaaaatcaatcaaaataaacagagggatagcatggttcattctatttgttaattcaataactcacaatttaattgataaatataataaaacaaaataataacagatgaattaatgatacaaagatgtataatagtaagcacagactcacttgaggaacaatcttgacccctgccttatgtgctttatctacaagttgttgtgaacattcaccccaataaacctgcaaaactccaactttctcctctaaaattgcttttatattctcttcatggggaaaagccagaacaacaccaactccaaagggtttgtcagttaatgttcgagtctttcttattaattccctcaggtaatttgggtcttcctaaagtgaaccaaccaaaaaaaaaagagtgaactttgttattacaaaatatataaaagattaaagaaagatagtattactaacccaatcaggagctctaagaaaaccaagtccaccagcattagcaacagcagcaactagctcaggaccagaaatatcaggtcccaatggtgcttgaactattccataatcaaaacccaaaactcctttccaacccatattctttctaagctctctttttactgccaaactatattatatatatatgtcagtctatgtatagctgatgatgccaatttgtattgtatttctgttgttttcttatttaactttgacttttcatagaccacgtaagagaagtctttgaatctcatttaaacttttctttttttaagatataaatcttataaaaattaaatcatgtttcctttgttgacacgactctcaaaactcaattaaaggaaaaaaagaaaatacacgtggcatcgtcattcaagagaaatactaaaaggcaccagtggtgcctagcaccttcctacgtgtcaatatcgttattggtccaactaagtatcgggtcccatataatttaatgt

SEQ ID NO: 14467 - DNA, 3223 bp, Cannabis sativa
atgtttctgacttttcaactactaaagaaagagccttcaaatcacttgaatatgtccccaaatattttaacaggtcttggcaacgcccacaggtatatggcacattccaataatctagaaattgaaaataccagaataattgaaatgtagataagaaaggaaatgtacctggagagtcaaagcactggtgtgttttgtaaccaaaaagttggtcagattaacaaaatatgctaatgctgaattgaacagcagataccatatgatcttgacatcatctcgtgcaagagctagtgttataccaactacattgtcctccatgataagtgttgcaggaagtagaaagataacagctattggagccatatacaggaggaggttcattgagtttaacttttccctataataaaatacaattcatttcagaacacaattttaacattgtaaaacaaagatgattcttttgaaggaaacctatatataaagtactagtaaaagagacaatgattcaatacccttcagaagaaagcaaaattccttgaagaaccgatttgagtgctctggcagctgtagctgctatacaaattatgaaaccaaatagatggaaactcggttcaccctatagccacaaaaacaaggagagagcaatgttaaaaggtcatgtatataaaaacatatgaacatcaacacaaccaaacatttcctataactgtaaactaatataactcggacagtgactcttgaccaaaatccatacatgtttcaataataacaaaagctgaaaaactggccaggaaattttcaaaaggaaaataacgaaactcagatgatatttaggacccttcatagaacccggaaagtctcagttttgaggcaatacaaattgtgcaaaaggaggaagcagtgtcggtaaaagatactaatttcagaaaagggcaaatttatctaattaatcgcaagaaaaacacaaacccaatgaggcaaaagaattgcactaggatccactgaaaaacttatcagacactcaggctcttaatgataaacctctaaacttctaaattttgcttttctctcctccaatatcctaaaacaaattaagcaaatagtgaaatctatcaaatacaagaatcccattcaaccgcatgaaagtgagaaaaagaataacataaaagtaatccaatttaaatagctaaaatctataaccgttactacaataataattagtaaaactgataaatttgcattaaaatagctacactagagaagatccaaagtcacatttgactcaaattctcaataaattaatgaatacgaatgagaatgaagaaaagctcataccccacttgcgattatgactccggtaacaacaggaacgagagtcagataggtgagccaagcctccctcctaaaggtcataaggtaagcgaagacggctgtgaagaaaggcgtggtagctccaatagcctggttgaaagagacgggcaaatacctaagcgaaatgttcccaaacacaacagaaatgcagaagataaagctgagcgccgcgatcttcatcaattggacccaagatcttatggtctgcatagggaccatcttcatccacgctatggcgatgtagctgagcagagaacaagcggtcatgtggcacatggtaaggaagatcggatacttaaagccatagttgctaagcaagtacttgttgagcaagagtaccccaatgttggaggagtaccatgaggtaaccagaccgatcgtaaacaaacggctcttccccttcatttggcaaggtgggtcttgatcgaacggatgatattccaacacaaagacagatgggtcaaatgttttcaggttctggttgggttgttctagaagggcatggatccgctagggtttgactgagagcaaacgattctgaacattggccaaaccaaacagagaacgccgatgggtatcacagagaaatacaaggcggtctaccatggatctgagaattgaattccatggcctaaaaataaaaagccaaaaaattctcggcttaaattgtattgttattaccgtcctcctccctcctctcactttttattttctcgggaaaataaggaattttagagagagaaaacaaaaatggtggtgggtcttgtcacattaacgagctagatcagagctttgaggacaaccgacgaggattttggctctctgcaagtgaagaaaaggaggagaaaataaagaagagtttaaaactatacaaaggtaaacgcgtaatatcatatagccattatttttatttttatttttatttttattattcttattttgataatgaatttattattttccgtattttgtcgttttggttttactattttcccatgtgttatctcccttcaattctaatgttttagagatgtatagtacaagaaaagtatacaaaggaaaatgactttgactattacattcttactattttatacaaatgtttgtttctaaaagattaacaatgaatttggtatttcatcaaaaacacaaagaatttggcaaataaaaggtattacttcgaccaaatttaccaaatttataacgtaaatatattatattctttttttttttttttcatttttttccttccttgtgtgtaaaactttattggaaggatttggggctttttagaagtttaaacgtgaatcttgttgttgttgttgattaatttacaatgataaacttgctatattatgatctgtggttaccttttaaatcccaaacgttataagcacacattagcacaaaataaaactaaaatgtataattaaaaaataaaaagtggacgacaaaagcgtgtgcgtgaattgttgatctattattacatatttatttaagaaataaaagagaaaagaatatccgaattaaaggaagatcggatgtgattttttttttttcattgatattaccaaatggcattttaacattatagttatttattaagaaatataaaataaaggaaaaggtatgggctgggatgggattctaccatgatttcatgacttggaattgaaattgggaaataggtagctgcaaagctgggtgtggttctcgtcaacgaagaatactcaacgcgtttgtttgtttaataaaatagtgatatgtttggcagcaatgcaatgcaacgcaaattgaaaaacataaatggccgccactccaaacactgcctaaacatttattcaattgaata

SEQ ID NO: 14468 - DNA, 11517 bp, Cannabis sativa
taataggaatgatccaagttctaagaagtgtttgttcggttgaagagaaatagtggaaagtattttcattcaatttttttaattttattacattctaaagtagtgaaatatgtcttcctataattttagttgaatcactattcctctaagggatgaaaacaatacaaaataaatgagtttgaattaaaaatttaattcaaatacattttcatattttgaattaaactatgtgttcatatttttaagttttatagtttattgtaatgtaaggttttatcttatgaatttcatgttacccttgataacaaaacaaagaaaaaagtaacaccaaagaaagtaatatgacaggtgcaattccaaatacccttttctttttgctataaaaaatgatacactaatgaggagaatatgctcctcatttgctacactttttaatttttcctctttgaaagggaataaatacaaagagatgccttgctaaatgaaattccagaagcaaatacatgaaagcttaaacccatgtgcttttacataacccccttgcctacaaaaaccgcccttgttttggttgaatatgtttatctttgctaatataagcactgatgtgtaactttgtagctcccaaaattaaatggacggcaaagatgtcaatttgttaaactactaccatcatcatatcccatttcaacatgttgatggagcaaccactgctgctttggttttgctttcagtttcagccacggttcctgcctagtgcgtcaatccattgtgagaaaattttgacaaattttcattggatctcttcaaaaacatcttcgtcgtcttgaaccagtgataagttccttggctgcagaaaacctacttctccacttccttcgaacattttcgatcttactatctgcatgtcacaagaattttatcacaaacataagtgtgaacaatctatagaaaaacatataaactagctagaaagaagaaatgttagaaaatagctgttattgaatcggtcacattttccactagccaaatttttcattactaagttttctaaggcggaaaaagaattcatgcttagcagtcgtgagtaccctatacagtgatttaacattttatgaggaaagatgacactaaattatacatatcaaaaagaacaaacatgcacttatttcataattcttcactaacattttcaacaagttactttttctataacaccaaagaaaatgaagacaaggataatggaactgctgacatgaagcggttcacaggcccatgtgatgttatatcacattagattcaactaaaaatccaccaagaggatgataatagaacgcaaagttgcccataccttttctatttcatcaagaagatgggggttctcgcgcaagtactgcaatgctttgtccctgccttgtcctaatctataagaaaaaaaaaaggccagtagtttaatatgttgacaaacaactcaacttttcagatacctgtaacataaaatgctgagcataataatagaaaaaaaaaccactcataagtcaagtgcagataattgtcatcattcgaacaaaaatacttggggtgtgcttaattcttttaccacatatcaaattagaaagcaagccccaaacagactgaaattcaaggacaaacctctggtcctcgtagctataccaggagcccttctttgctataacctccatcatttcagcacaatccaaaacacaaccctgcatgagaaaatatttgggtggactacgttattatctttattaacctcttgtggctgcgggaaatatagatatgctctgttactgtacttaccagtttacctactccctctccgaatataatttcaaattcagcctgcttgtatggccttgaaacctgttagaagtacttaggaacttagaacaaagataactctgacaaaaaaatgtcaactgccacctgatttgtatgttggcaaacaattacaactaagagcttatacttgatcaatatcttcccagggatagatatacttaagtaatttacttaagtgtcttaactggctttttggatctcaagagtcttttaaactattgatacccgtgttaagagttatgaggttgcatcttacaaccaatggagtaatccattttcttataaatggtccaatgttcttatgtattttctatgtgaagcactatcctctaatagtctaatataatgaaatccttcttaaacttgcagaacagtcatctcatctgtataaattcattctaccaaaaaatatacagacataacattttgtttccagtaacccaacaaaaaaaacacattttgtttccagcaaaaaagaaaagtatatttgaccaaagtacaaaatattatgacagcagataattaccttactcttttgtaccctcacgcgaacccgaaccccaatctcttcatctcctttagcctaattacataaattgataatgagttgacatgataaactaaaaacaccacaaagcctgactaaattatatgtatacagatatgtagattatgtcaagcagctctcccaacccacacaaatagataggacatatagaacaacagaaaaggaaaaggataaaactagagaatataaatgctatagtacttacagattttatcttcccggttgaacgtatttcaagacgaactgaagcaaagaactttaatgcaattcctccacttgttacttctggatttccataatatacaccaatctagcaaattcataaggttctaagttaaagtagtacgtaaagctaggaagtaactaacatcagttaaacaaaaagaattctcaactctgttggacccagtccctaacagtaatttatattgccaaagatattataacaatacgatcattaattattttatatatatatttaaatttttttaaaaaaacattctaatactgaaacaatcctaaccttatatcttatttgatttaaaaatataagggtacagccagctttagaggcatttcctgacattttacgcaaagcttggctcattaaacgtgcttgcaaccccatttgctgcataccaatctcaccctacaacagataaggccacaaggaatgagtcaaatgttggcagcctccacctctgaaaaaaaaaatatgaacaagaaaaagaagctcacttcaatctcagctcgtggagtgagagctgagacagaatcaacacaaattagatctattgcaccagatctgcacattctatctgcaactgaattggagaagacagaaaaaaaaattaggcaagcataaaactctcaaatttaatcaagatatatcaagtattataagacaataaataatttacacaggtaaactgatagcaccagagacgtgcaagttttatctttttattagccagcacattttttctaactgtattgttttactgtcttaactctaggaatataaaatctgctacagttcgtttctttggtcaatacgtttcttgatgacatggacaagttccacacctataaatagtcatcttctattgcttgtagtgctgatttttacagatcttatacatacacataaggttttttgctgatacttcatagagttcttcatggctggtgaaagttacagtatcattttcttttcttttttcggaagggaaaatgcaggtatcttccaagaattaagacatggacgaggatttaaattttcagtgggagaatgcatttcaatgtcattttaagtatgctttatttttctagttgctaggtagacgaaccctagtccttcccctaggtcttattttctccttctttttcttctttaattacacatttcttacaatattatattttccttcgggaaaaaaaaaaaagatatcttactctcaagtgccatttcaccatgatcaggctgacaaacaattaagttttcgacatcaacccccaatgctttcgaatatgctggatcaaaagcatgctctgcatcaaccagcatggcatttcctcctagcctctgcatagataccaataaaagctaaatttggatctcattaccaatccatcatttcatttaagattcatatggattttccatacctgcacctcagcaatagcatggagcgccaaagtagtctttccactactttctggtccaaaaatctgaaaaccatgcataagataaagattcaagatctggcaaaaactactttttttttctaaatattaaatgctaaacacgtttttcagagaacatcattcatgaagatatactgctctagtcaatctataatttgataacagaaaacatattatatgaattaatgtattaaaacatgcgaaactacctccacaattcttcctcttgggagaccaccacctaaggcaaggtccaatgtcaaacagccactgggaaatgtttcactgcagtagatagaatgttatgtaatcttattttcatctaaattatatatttgaatggtgtaaggaccatggatgcagctttcagatatagaagcatatgaagaaataaaggaaaacaaacgctgacatcaggagaaaaacacgtacaccaaagcaccaccagcactgcctaatcttgtaacacttccttttccaaaagaattatttatgtcattcattgctgcttccagtgctttttgctggaaataaacatggttagactcatctaatttaaagcaagcgcgttatttagcatccaaattccaagagggaatacaaaagggaaaaagaaaaagaaaagaaaagaaagaaattgcaggttgcagcagttaagctgtatcaattaataaacaaacaaaagagcacttcaaatcagaacatgttcaaagacataaataacaaagcttggttagactatacaaatctagtatcattgtgctaaatcgaatgcaacctgtttactgttaggtgatctcaacggagctcaaaatttgacaaaaggatacgaaatgtcccactaattaaggctacgtatcaactaaaactgcttgaagctatcaagtggaagatacaaaaatggattgttcttaagcttctcattcatttgatagagctataaatttctagagaaacaaacaagtcactaagaccgcgccagccccagggtccctatcaaacccaaaacttcaaccatttagggattatctaacagcagtattataatctaacactctctcttcacctttactaatgttatctcacacatttctagcatacatttgctagtaattagcaagtacacactgcattaaattactaacttatataaaccaggaaatcaaaatcaaacattcacaaaaaaaaaaaaaaaaatcaaagagctccatataacaaagataaattcacacacaatcattattcagtaaagatacaaaacagacaggtgaaaaaggaaagaaacaacacaacacaagagttaacataaagctaaactgaacaagaagaaatcttacgcggtcgacgaaacgggggtcgaactcgccggagagagcgccattaactttagcatcgaactcgcaacgaactctcctgattggtttaacggcagaagtgaaggtcgggcgtggagaagaagaagaagaataagggaagaatctgagtgaagatgaagttgaagaaacaattctaagatgaggtagaaagtttggaggaggaagtactgactccattactactcctttctaagcttaaaatagaaaaaggggagagctgagcagtggcgggagtagagcaggcgcgactatattgccctttccccacctccgcattccattatatacttctttatatattattcaatattttggatatgccagccattttacacttgaagttaaagttgaatgatcatgatttagtatatattaaagtatgagaaagaagcataatttagtatataaataattattaaattaataaaattaaataaatttagacaaaaatctttaaatttatcaatcttaatagttcactggaatttttaaggataaaaaaaattcagtaggcataatttgttacgtgtcaaagtttagtagaataaaatcttaattagcttaaaaaaaaaaaaaatatagtgttatggtcagtctcttactataattttttagtcaatttttgtgtttgaaaatacatgttagagtatctcttttttatttcattgtggtattcgttatagttacaatattatttttgtaaaattttcaaaaattttaaataatttacattattttttatagttcgatgagcatacttttagtatatgttaaagtttgagaagcataatttagtacataaataattactaaattagtaaaattgaaataatttagacaaaaattcttaaatctaacaatcttaataatttacgagaattttgaacgatcaaaaaaattcagtaagcatgatttgttacgtgtcaaagtttagtagaaaaaaatcttaattagcgtaaaaaaataaatactagtgttatggtcaacctcttactacaattttttagtcaatttttatgcttgaaaatacatgttagagtatctctttttcattttacagtggtattcgttatagttacaatattatttttgtaaaaattttaaataatttacattattaaaaataagtttgcagttttttaaacatgcatggtagactagaaaactagggacttcgtttttggtgctataaactatgaaaaaatatttaaaaaaaattatttcgatatgtgatgtgattttaaacatggagattgactcagaagttgtaatagataaacataaatatgtgtggattgaattacattagttacttttacatgtcaatcatcattcaatcagtacaaatgcgaattttaaattttttaatccaatccaatccgcattaaattaaattagttattttatattttacttttattttgtttttcaagaacattctgatttctgcgttcaatatatgaaaaagaaaagattgtatgagttcaatatattttttttattataattagggttattatttttatttttaatttaattattctatttattaatgaaaatattagctttctacaaattttatatatattatttcaaattttattttatttgtattggcaattaatttatttaatgtgtacatttttatcacatcgacaatccaatatgtcgcttaatatctaaaaatgaatagaaaaggtaaactattaacagaatacgagttttagggaattttgctgctaaaatttaaattttaaaaattaataactaatgaaatgaaaatattaaaaattttaccaaaactattcactatactagtataaaaattgaaaaaaaaaaaaaaaaactattaaaaaatcaaggattgatgaaggcgtcaccttgtagggagacgactaacgtccctactggcgggatggaacctcgaccatgccttcttcagatggttctgaaatggaacctcccagtttggttatctcaaagtcaatatgtcgctatcagttctttaggcaaatatagtggcttaggtatggtgatttgtaatcacctgggaacaactgtagcgtttgcgagctggtatgtggatggttgctttcctcttgatgttgttgaagctttggttatttgcaaggcgttagtccaatgcatctctattaagtatgaaaatatcatagttgaatctaattgctttaattttgtgcttaaactaaaaaacaatacttctattatcacctctttgactcttgttttagatgataatggtgacattgacaataggctccatgtgattaattttatgcactataatagatcttgtaattgaattgctcatctttggccaaacttgttttatctaatgttaaaagcatgatttagtagctagggaatcctatttgtattcaaaacttattaaaagtgggtgttgttcttgaataaatttttgccaccaccattgtagagcttctattaatttgggtgtttggaggttaagaactttttcctaaaaaagaaattaagtatttttattatcctaaaaatcttgttactctgaaactctgttccaaaacttaaccaataaaactttgaaaaaacatttcttgtaaaattcctagctttttatttttgttgatcgtgtatatatatatctgattttttagaagcatttttatattacattttttgagctggtgattcaattttaagactctgatacacacaccacttaataccctatatggtcacttgttagctcaaatggttgattttagtatgtgctcagccaaacaaattaaattgaataatgagaccaatatattaaatttgaagactaaactaataatgtgaaatactaaaatttataaaataattttatttaattttactctacgacaataataatctcacaatataaatttataatcccacaggccacagtataatttatgatctaaccatataagatcatgtgactaataaaaatatttaaaaattcattttactaataaaagttttcttattttgccaaaagactcactgaaatgagatattttgaaaatgaaacaaccaaaatgagatttgggttatttccaggggcttaaaaataaaatataaaatttaagggcgaagggctctctcctctccgcgtttattctcattctccataaccagtcctggaatccagccgcacctccctacgccggccaagggactcgtacgcagtcaaaacgttcgactcgccactcgttgacgctccgaactagttttccggtgcggtgattcatttctttttcttgttatacttacttaagaagtctaagataatgtatatttaacaattttggtttgaacagaaaatgagaaacatagttcgattagctgttcggaccttgaatgatgtctcgccgcctcgatttttcgtgagaactctctcttcaaattcaatcttcggtatgttttcgttattatgtaatgtactgtgtgatgtgtatttatagcatttaacttgaatttgctataacttcaatggtttgccgctgggtggttcctttgcactatagttctaaagaggtttaatgtttggttgccgcttgcggacctaacttgaaatatgctagagtttatagtctcactaagatctgtacatagatcaaagggtaattatcaattataatttgatcttggtgaaaattatgaacaaacctcacaactgcctagtcttgttgtgactttcacaggtgggagaatgggtgataatgaaagtagtaactcaatggaatcttcttccgatttccagcagaggattttaggtggaaattatgggaaaagttcaacaacaaattctttattcgaaaagctcgatagcattgggaagggtcgcgatagctttgtctcaaataagaatgctgagagtaattacggtgtattggatggattagacgaacatttcaacactatacaggatggaatggatgggaagctacagaacgcagccacatattttgagtttgatcctgaagaaatattgcaagacgagtattctttcaggccagacgtgaatttcagaagggggatgacttatgacgttaaggtaaacataatgtaggaaactagtcaatacattgttttaaatcactaaatattgaaattgacatcttttcctgtcaattattttgtattacacaatacatacacttaggatctcaattatcctgagtctgatgtcttctctaaacagtattgcgtttaatgcaggatcttgatttaactaagccaggagttcgtaaacctcccccgagggctgagtttaaagtaacgacggcagaagttctgaaaaaagctgattttagggtaagtatatcttgatttagttttacttgtcactctttgttattgtgaaacctacacaaatactacatgtcatgagaaaagccttcagtgaatgcctttctattagtgaggttatggtctaatttaaaggtgagagatctaaatgcttcttttttgtaaattcctttcttcttctgttctcaaattcgttctggtgctgcctttccttgcttcaatatttaaaagttacgtggatagaaaattcaaaccatttttagaataagaggtagctcatcctgcccaagacaatgccagagatcatattttctttaccattgatgataatttgtgttgggcggagtggtgcatcatcagaagtctgtgtacttgattgctattttttctaaagattataagagtatcaaagaatgcatttgattcctgctctgttggatttccagtaaatcattgttcatgatagagaagtaaacaatgcagaattttctttatatattagatttagtattgtaagtgattcatttttcttactattccttgagattttgagttaagaagatggtactgggcatttgaaaaatcaattaacatcctaatttcccaaggttagaaaagggcaacaacattcacattcacattcacatgagctaaatgttgttggcactaatttctctatggttatcttaactcaatagatgttatcatcgtgtattggtaggcatggtctaaatgttgttttagcctttctaatcaatatggttcttttcaaatgttgctgagtgattattcccgttggacttaaattgatagtgctaacttctggctacttttatgtattatagttgttgttggcactaatttagagaaatcatattatattgggttgttttgaccgtgaatgtatttgcttggacagaatatacgatttcttgcaaatttcttaacggatgctggaattatcatcaaaaggagccaggtgaaatagaattattcttcaatcaattaaatttgatgaacttcttgtgtatgatgtaaatattcctcattctttgctccttcatcattttttttttgcagactggcatcagtgccaaggcccagaggaaggttgctagggagatcaaaacagccagagcctttggtctaatgcctttcacaacaatggggacaaaacaatttgtttttggaaaaactatggagggtctcgatgaagactatgagtatgaaaattatgatgtgattgctgatgcagaataaacaaatggctctataaatgcctaaagctgcttgtctgagggttggaattgtaacacaccttctccatatttgccttgccctaaaagaacactgaaactggaaccgaaaagatctcgattaacttcaaaagtatttctcctttttttgaaacccctatggatgttgtgagcttggtttgtgaaattattagccttacacatgtacaagtgcatttttgctagttttattttgttttatttacctttagtataggtactaatttaaaataatggcgtaccggaactccatttgtaagagaggttttcagcaatggcctttagttggtactcatggcaatgacaatctctacatggccatttatcttctgctttttgtttttatattatttttttttttttaaaa

SEQ ID NO: 14469 - DNA, 6037 bp, Cannabis sativa
atatgaatttctcccaattgtgtcattttccttttaggataaaacaaagtacagtcattttaaaaaatatgtttacaattttagagttcatatgttagagcaatctattggtggttaatgtttgttggttgggtgagtaacattagagtcacaaaaaataattaaaaatgaaatataataagaatgagaattgaaaaagtcaattactatgaagtttagagaaccaagttggcagtattatacttcattgtttcagttgattgaaaaatattctccaactaacccattacacaatacacaatataagaagttatgagccatgaaatggcaatccaatagaggaagtaaaaactataattttaggagggacccaaatgattagtcttaattgatattataaagtcaaatttgattatttttgtgatgtgtttggaaaagaaaaaagagcttggcaaataaacaaattgcattaatcatatttaatttttttaacaatattgatttgcaaattgcaatttaaatgtttgtaaatttacaataaattaccaaatgtaacccaccaaatattaaagcatgataatttacataattacatttgtatatctagttttaaaactctagtgattgagtcaatatacttgcaaacatttctacaattggtgaacaacttcaacaacaaatgtccccatgaatcctactatcttaatcctaggcatccacatcactcaactcataatattaaaattatttgttacatctaagcaatgatatttattaattacaagactttttttttggtttggtttcatggttttggcctatctatataactttccttgcgaatttatatgaaatattatccttttttaaaaaatataaatttttagttctatacaatcatggaggcatggtggtgtttggtagattagaaaaaatttgcttaagaaatgaggaatgacctttggaaaatccaaacaatagttattaaccccaataaaattttaaaaaaaccttgaaaagtaaataaaaatttatcatcacaaatgtccaaaatagaggtgcatcatagtcccatgctcccgtccctagatgatcaatataatttttcattttacttttcaacaagctcaaattcttccagccatgcaggccagcaggtacatataaatgtaataatcattaatcatttccaggttactttagtaaatatgataaaaaataagtcgccgaattagaattattaatgatttgttacagccaatttaattaaataatttaaagcaaaacgttataatattgattatggataaataaataaataacaattattattattatttgggtttttgaaaaagccacatttttttttcttttctttctatctcaactgctcttcttcttgtttcatttcccccgcgttttctctcttcctcgccgggaaaactcgccggcggcgctgaccaacggccgtagtttccgtactaagacgcaccgttttatgtgatcgagttcagattagacttaagagtagtatggggaattgtaacgcttgtgtgagagctgatattatagtagaagagaagagcaaccacggctcgaaccggaacaggaagaagaagaagaataagaatcgggaaactagaccaaaccctttttcagatgactcgattctgtcaccggctccgatccgggtcttgaaggacgtggctcctttgagtcaccggactcggatcggagataagtacgtactgggtcgggaactcggccgaggggagttcggtatcacgtacctctgtaccgaccgagagacgaaggacgctctggcttgcaagtccatttccaaaagaaagctcagaacagcggtaaagtagcggtaaagtaaaaaaaaagtaaaaaaaaaaaaagaaaagaaagaaaaagaaatatatatattacaagaaagaaaatccatcgaaatatgttcttattgaaatccatggatgtggatggcttttataatatatgtatctatgtatatatataggttgatatagaggatgtgaggagagaggtatcgataatgtcgacgttgccagagcaccccaacatcgtgaagttgaaggcgacttacgaggaccatgagaacgttcacctggttatggagctttgtgagggaggcgagctttttgatcggattgtggctagagggcactacagtgagcgagcggcagctacggtagccaagaccatagccgaggtggtgaggatgtgtcatgctaatggggttatgcatagagatttaaagcctgagaacttcttgtttgctaacaagaaagaacattcacctctcaaggccattgattttggtctttcagtgttcttcaagcctggtatattagagattttaatttttattttattttccgcatattattatgtttgtgtttgagattttaaaatgggtttttccttgattcttgttttttattcttactcaattaaagaaatattgatatgattttcaggggatagattttcggagattgtggggagtccgtactacatggcgccggaggttttgaaacggaattatggaccagaagttgatatttggagcgccggagtgattctttacatcttgttatgcggagttcctccgttttgggcaggtaccattttttaatcttctcaatgatttttgcattaattgttcatttactacaactttgttttcattttccacagtgattttattctatttataatatgggtatctttttcttaacaaatttatttatgtatatactgtacgtacagagactgaacagggggtagctctagcaatattaagaggggtaattgatttcaaaagggagccatggcctcagatttcagagagtgctaaaagcctcgttaggcagatgctacagcctgatccgaaaaagcgtttgactgctcaacaggtgcttggtatgttcttgtaattttcttttggttaataaattattgaatttaactagtcttaatttcatcaaggtatctcttacgatgtttgtgtgagagtgttttgttttattgttgatagtaaaagctgtctaaaggacagacatagaggatcttcccagtgctctaactgttattgttccctatatctgtggactattgtttatgtctaatatggaacgatatgactccccaataccaataattagcttgccaacctgtctagaatgaccattttttttttctttcaaaacatgtaaaatgactaaagatcaagagttcaaatggtgtataggagtgtatgtactgaatgattgttccatatggctatgtaaatttatgagctggtaaatttatttcattttgatattggttactgcagaacattcctggattcaaaatgcaaagagaacttcaaatgttcctttaggagatattgtgaggacaaggcttaaacagttctctgtcatgaatagatttaagaagaaagccttaagggtaagcatcttttgccatctaaagcaccggttactggtcaatgacaaaatctatgaatatgtgtgtgatttgggtttgtttcaaacaattgatgtaggtgattgccgagcatttatctgttgaagaggtagaagtaattaaggatatgtttgcattgatggactctgacaaagatggaaaggtaacatttgaggagctaaaaacaggactgcggaaggttggttcacaattgggtgagccggagattaagatgctcatggaagtggtaagccttttaccattataagttcataatggaagttccttaaatttatgtcaatatgcagtgctttataatctcaaatatcatcagtaattccacattcattgtttctttctaacatctgttcaattttggacctttatgcatctctacaattctcaatttgagccatagttagaggccaagtattcatggtttcttttcattgcttaaaattgtcttttcatgtcttattgactactttgtttctgtgaaaattcaccttagaagcagaagcaaattgactcaaggatccttcattattcggtcatataattatatctacatgttaaaattactgataaaatcttgttgtctgtttaggctgatgttgatggaaatggagtattggactacggagagtttgtagcagtgacaattcacctgcagaagatggagaatgatgagcatttcaaaagggcatttatgttttttgacaaagatggcagtggatatatcgaattaaacgagttaagggaagcattagcagatgaattaggcgaaactgatagcatggtactaaatgaaataatgcgtgaagttgacacagataaggtttggcctttaacccaatctcttacaacaaactactcctcattgagctgtatccatcttttccacagtcacttaatgtactcttttctaattgttatttttttcaggatggacgtatcagttacgatgaatttgttgctatgatgaaaactggaactgattggagaaaagcgtctcgccagtattcaagagaaagatttaaaagtttgagtctaaatctaatgaaagatggttctctacagcttcatgatgggatcagtggggaagctattgcagtatgaaccatacaattttcatgatttcattgtgtttgcagctaaagagtgtattcctttcattttttttttccattgatgcacctgaagagtatagtatcattatcatcatcatgtaaggaaatttcaagctttgggttcaataacacatcaacacctaagctttgctaaatgcttgtgggctacattggcttgtcttctttcaacatggggctgcattgcaatgaagcttgcattagaggcctgcaaaacggctagaattgttagcacttagcatatctttttgcaacaatttctgttctgtcacatttacttgtacatttctctgtatctctttgatttatttattttttttttgtttgaattgattttagttgtattctggcttatgctttcaattcttacttatattataattttgtaactatttttagatggaatactaatttgttttatgttgtgtatactctttctttccacatcaaaaagtaattttattgaacccaccaaccacacagcgtcttcatttctcatctctttgggtctaggcctacaaccatttgacgagcatctgagcctaggcccattttgacgaacatggtgggctgttatgtgtcttcgacgtctcacgtctgccatgttcatcggattatatccaataaatttggacccaaccgatcaaatttaattatttatgaaatattaaattttgtcatctaatccaatccaatcgaattgaatcatccaatcagatccaataaatgtattacattggatcggttccaaccattagatgcattaactagtttttaacaaatcatgagactatgttagtaaatgttctcattttaaaacttgtagtaaaataatctttttagattattcattatttatattatctttttcacataaaaaaacaataattttttaaaaaaaattttaaaattaaaagcaaattacttaaagattatggtatatctacattagttttgttgaaatctttcttatttgaaagttatgtcaattttttttaattttctatgagttgttgtgggttgttggtatatagattttattgtacagtataattctgttttgttgtatagtatattattattcttagatgatatttattttttgttttacgtagtatataattttgttagcataatacaaatattttaatatatgtatataattttattggcatgctacatataattaattattatatttatatatttattttgaacaatattgaattagtttctattttactatatatcatggtatataattttattgtcatggtatatatattttaattgtagtaaataatttggttagtatagttaagtaatatatatttttattattattattgttagtatatatatttttgtgaatagtatatgtattttttgtt

SEQ ID NO: 14470 - DNA, 5450 bp, Cannabis sativa
tcactatatttttgacgaggaacgagacctatgacaagaatattttcttccaaaacaattttatgacttttcttattatttggttattttacttttcctttcccttcacaaatattttcatttgctctacccaagcatattgttagttaatgaggcccataataaatataaataggaaatgagagcatggtaacggatacaggtgattccccaaaggaggtcgtctgtgttcctttgaactcttttgcctatttcttttctctgctacactttcttactctacagtctccggcggacctaaatcctaacccatttccgcttccacttcaatcaatggcttcccacaaccatttggatgacgtaagtccttctatcctttacctacttctcttgtgttttaacattaaaatttcacgtttttagggtttttcttgttccccattgtgatatttaggacgatgattttggaggggatttccctggacctcaaaccaccaggcgttcaggttagttttccctttcttgtaaccataatctcgtcttttttttttcttttttttttaatatatattgatttataaaatttgtagttgtttatgtgataattcgttgttgtgcatttattttcttaattttatttgtaaatttaggaagcaagagaaactttggggatcttgaggacgatgaagacgatttttttggctccaagaaggtatgtcagtatagcaatctgtttggcaatatacaaatctcaatcggtgttctctttcaatttgtttgaagtgagttattcttctgcatatttctgttcgtatttataggactgggttttgctgttactttaacattgttgtagaagttggaaacaaacaatattaaaaccacaagcctatctcattcctttttttatttctttgtatactgccgtactgatattaagagggcttgaagtcgattaatatggggaatgttcttttgtttcaacgtgattgtaatatagttgagacttgagtgatgacaatagaggatggaaaatcttacttgtgttaagggatttgagtaatgcatgtttttaaaacatgctaatgagagatagttgaattctggatgtgcacatgggagtgaatatgctcatatgcttttcttcttctttttttttttcgcgtgcaggctaactcaacagttgaagagactgcccctggtgttgcaacaggaatgattttggctcttcgtgaaaggtattagactttttagaaattctggatggccatacatacaagtgataaaacaattgctaggtactttgtggtttatttctttgaatctgatgtttatacacgttcttttatcttctatgtgcagtcttcaaacttgtaaagatacacttgcaacataccaagtatgtattagtatttggaataatctttgctggtcagttcgatttgcctggattaggatttaattatttgtaattccttaatttgcagacggaacttgaagctgctaaaactgagattcaaaagtggcattcctcctttcagaatgagtcctttatacctatggggactactcctggttcgtggcatattattgtgtacttcacatatacattctccaaaacttacaaatgttgattccaaggtttttttttcttttggtagaacctagacaagtgatcaattaccttcagacattgaagaattctgaggagtcattgagggaacaggtgtaattctagaatcctctctctctctctctatatatatatatatgtgtgtgtgtgtatattttccattctgtttaacaaaagatttaacattttcatgaacaattccttacattaatatttttcttgaattatcagttagaaaaagcaaaaaagaaggaaggtgcatttatagtgacttttgcaaaacgagagcaagagatagcagagctgaaggtgagcttttctcttttattgaaaatgatatctgcacttgatatgatacgctgcatattcacttgatagaacttagaatgtgttttgactctttatctatctatttactggtaagaattttctatttaaagcaaaagaatgaatgtggttatttccttaagtagcaagaacattaattatgcatatgctagacagagtgggtgaaactagatattctctaaaaacagtttgtagcatattagagaagaatgagacttgaagtttactctaatttaggaattacgaataggaatatttgattcagcttggttgttgaatggtatgttacttgctcaaaagacattgttctgtgtttgtttaatggcaattgaataaacagtctgcagttcgagatttgaaatcacagctcaagccaccatcaatgcaagtaagttttaattctgtaggaaaatcacacagttaatttcatgtgtttaccattttagttttgaagtttttaaaaccttctagaattatggcagactcactagtaatttattgtggtggttaatttttataggcaaggagactattactagatccagcaatccatgaagagttcacacgtttaaaggtatacagttctagttgcatgccttgacttggacttccggtgatatttaaactgttatattccttaaatctgcttctaaataattctgaatgtacttgtgtaacataatggtgctagaatttggttgaggagaaagacaaaaaggtgaaggaattgcaggataatattgcggctgtccaatttactccccagagcaagatggggaagatgctgatggctaaatgccgaactttgcaagaggaaaatgaagagattggaaatcaagctgctgagggaaaggtgctgtgattgattttccattgtatatgtaatgagtattttttgttatactctctcaaccttttgaccccttcattgctatttttttcgtgtcacaaaagatgttgagaagatttatgcatatattcattttcaggctttcaataaatagagtttactctatttactctgtcgtgttagatgtattatgtatacatatgaacattcctacatatctctacttgatgtacttattaggtaaagaaacttctttagctagtggatggtaaggttgagaaagattatgagttattgggtatcgataatacaattttctgttgtgtaaggaatgttgtttttgtattctaacaacaaatttgctgattaccgtgtgagttttagtgcagtcatttgattaattttattcatatcatattattggtctgcagatgcatgaattagcaatgaagcttgctttgcaaaaatcccagaatgcagaactgagaagccaatttgaaggtcagagataatacaactttcttattataattttaaaaatctatcagtgagttggcaagatcaaacacattttgaaaccttgcatgatcttatttgtctaacaggactgtacactcagatggacgggttatctaatgatgtggaaagatcaaatgaaatggtattatgcttcttttcaacttcttttttttgtttctttttcaattctaacatttgctaatttggttttgcaatagctcatctaattcttaactagttatttattgtatgaacattgtagattatgatttggtttcagttcagactaataatatttccatggcaggtggttgtattggaagagaagctagaagagaaagacgtagagatccaaaggctgaaacaagagctgctgctgcagcagaaaagttcgatagaggagaaaactactgattcaccaacttctaataaaaaaactagcactgaaatgagtccgggccaagatgacaactgaaatgaaacttttgattcgatcaaattttgtagaatattattcttttatctccttgtttgtacatttaacatttattttaaatttcatagcactcttttcttttttacttttcaataagtgattcttaatgtgatcaaatctataacaccataaggtaggtataggatagaatgcctcatctcttttgagctggtggtattggtaatggtagatcatgtgccgtgcagttactgttcatccacatagtttagatatgggcattgggcagctgtccggaaatctaccccacattttatatactttgattgaaatttaaaattttgcatttcattttaattttttttaacacattttattttaatatttgatatattggtttcagtgataaattattagggtttttacactacatactgaaatttcaaaaaaaaaaaaaaaaaaattcttttttttactgtggggtaatttttttaaaaaaattattgtgtaagtttcatactgtgtactgtgttaaatttttactgttgttttacggttgttttttagttgttatactgttgtttataactgttctattttgttgttttacggttattttaggttgttttaaattactcccctcatttcaaaaattcactgaaattttcatgtcttctctctttccctctcattggttctcaccaaacaacaccatcgaaaccaccgtccaacctccgagaccactagccacgaccctccctcttgcctcgtcccacccactacccattttgggtatggggacccacaaacaaacggagagagtatcacgagctatttctaagttttgagcacacccaaaaaccctaaaccccacagaacaaatgtcaagggtaagttttttattattttcatttttttatgtgttgattgatttaagaatttggttaatttcttaggaataaaattagtgaatgttatggtatataaaatgtgtgattggatttgtgaatgatttgattagcgatccctttggttaaatctggtatcgtctgcaaaattttgtttttttagggagaagaaagggttcaactgagcccgatagtgaccgatataggcctaatatatgtccaatagaaacatgttaatataaagaatttgaagttgaaaataatcacccgatagtggtacgataagtatctaatagggttcataacttgttatgaaacgatagattgtaatatagttagtgtttgatattggtttgataggtatgcgatgacttcttatgtgttatgtagtatactatagtgtgatacatgtacgatagttgttcgatatcagatgttaatcaatttttttgatagtatttttcattcccatatctgacggggtacaatagtgtacaatgtgtggcccaatttttaataatttttcttaaatttgtgtttgatagtagtacgatattagtacaatgtatgcttgatgtttgtatgtaaaatgcttattttttttttctcagaactcaagaccaatgcttttatgttccaccacctgtaagggcccgtttggcacaatttttagaaaagctaaaagctgcttttcaaaaaagctgtgacaaaatgatgtttggtaaacagttaaaaaac

SEQ ID NO: 14471 - DNA, 4494 bp, Cannabis sativa
ccacacaacttgatgcaaataatagcaaaatcagcattgttaatctggacttgggatattacaataaaccaatatacaaataaatacaatatataaggagttgacatgcatgcccagcaatgtagtatgactttcccaatgagcataaaggccagttttaaatcagtgaaaattctaatagatactaaaactataaagatatttgaacaacctcacagcttgagttatttcccttttcaagtccttgtctagaggaagtcttccttttagtactcctcttatcttttctctatgatcatcaattctgaagagagagagagagagaagaaaaacgctatcagttgcaaaacaggacagaagaaaatgagctcatcataaaaagcacataaagaaactgactgacatctttctatgctttcgtttttgactctccagttctgacttcttcaaagacaattttactctttcatcagaatcaccaaccatgatatctttttcttgagtaagagccttaatcttctgctctatagaatataattcagtttgcttctgagttatatttgattcaaagtctctttcagcaataagattctttttcctttccatctctgttctctaacggaagaaaagaggaaacaaaaactcagcacagattatttgttcaaataaacgagaaaatgaatcctaccaataatcactaagaatagtcattctcaccatgtttttttctctttcattaatgtgagaaatatcaacatttgaaatttgaagttctaatgaattacgctcattttccttgtcttcaatacgtttccgaaggccactctgcataaatcacaaatattggaacactaagaattaagaataagtaaaaagagcatgtgaccttacaaagttagatagcacacagccaaaacacaaacctttaaatctactttagcctgcctttgaacatcagcagtagtccactgatcatttgccaccatgtagcgatcccaggctgtctttagctcaatttcatttgatttctgaaatataagtttttaggaaaatgttcttattgagagaaagatgtcttgacttagaatatttagagagtttcaacatttatttgaaacataatatttcaatttaaactaataggttgttaagaatcgaaaacatgtagcagctacacagaagttttcgaaattaaacaaaatctcacagtaatagaaatgaaaaaacttcatttaaaaaaaaatcaccttcttatcctgcaaatccttttcaagatctggtagccttaatattattctttttgtgaagcttaaagcatcgtcattgctaaagggagaacttggaagaggacctagattatgcgatgtgaaaatgtttcgtatagcagaatctcgttcatttttcaaagacaagttaacctgaaaagagagtttaagcttaaacaaggcaaattcactaaaaaataaatacaaaactaaattcaaaaggcttacttcagcttcagtttgaagcttgctgatctctttgaaacagtcatcagttgtctttcttagaaaggaacttttagtttcttggtcagtcaattctctttccaacttgctaattttagattctagttctgcaactttctcttcaaacttagtcttccattcctttaattcttcatcagtgtctgctcgataaatcacgtcataatgaaaagattcttaaagattccaaaagaaaacactaaaatgtgtaatggaaattacaaaagttgaacaatgatggcaataacaataataaaaaaataaaccaagcataatataacgaaaaatacgagaaaaatcttaaaacttctgctaaatgtatgaaccttcattctcctcttcaagagctgcatactgcttctgttgttccttaaacaaagtgcttctttcagcagtcttagttgatatttgatcttgcaacttcctcaggtctttcagcgttacttcagcatggtgaattttagcatccacgtcctggatacttgtttcgaactcctgtatctgactttttaaagattctgttctactctgatcatgagcaatgccttcacgaagctatagacaataaaaaagcccatatgagaaaaagtaaaaaatcagttgttctcagccaagattctgggagataattaaggggaaaaccaaaccccagcatgaagctttctctgtgatttctaggatatcattcaatagaagtgctaattgtagaatgctctcttctcgggcttatcataaaacacttagagctagcaaattcatttctttacttctgagtctctaagcatccatggctgaatggcgaaagtgcccacccacgtaaattagttttgctagaagaaaactattttcatgtctaaaatatatatgtacgtattgctacgagaccgtatgccctttagagacttcatgtataagaaaaaatgactcaatcggcttaatttttactctgtgagaactagttgagaagtccaaatttcaaaaggatcatatgaaaaaagtgaaagattactaaaagctataaatatctcaaattatcaatacaaaatggaaaatggaaaaaaggaccttatatgcagcatctttcagtgtttgtagattctccaatttcagcttgtaggtctttatctcctgattttgatccttgtgaagtttctttaagacctccaatgcttttgtatatcttattaacagtgtattgagacatatttgaaacaccaaaatcaacatgtggaacaaaagcgtaagcactaaatagtgaaaaaaaaaaacaaaagaagtttgacaaatatattaatgttttgttcataaaaggatgatacaaagtttaaatgtaaacttattatattactccatgttaaatagtttagagggcatttatgcggaaaaaaaaattgttctctcatccttccatttttggagggataaattttgttcgattagaagggagacctcatccctccacccctcatttccctcccactttccttctttgccaaactatggatttttgctttccttctgctctttccctcctactcatctccattcttccaaaatacagaaactacttaaacccctaaactgatgcagactactaacaacagctactcgtacaagccatagaacaaatatcagaatatgggtatgtgtgcgatttcaaaaaatgggacaataaaatagggatgtatccaacctaaaaataacagaataaaacataatgtcataacttatacaaataataaataataacttaaggaaagaattttctaggtctaggaaagacaactaatgagaatcttgctatgatacaagattctttattttttaaataaataaataatctggtattaaaactagattcttacaacaataatcaaattttctatttaggagatgagtccacagaatgacacgcatatagggataattgtacctggtagcagagaatatgtcatcaaattttttctttagagtagacgggtcttgcaaaggccagttagcttcatcttgatgtacaaatataacattttccagaattgccttggatacacccattagagcagggatttctcgatccatatcagcacatctatagctgaggcaaactttctgcagttcagaaacaaagataagaaataaaaaactgttatcgatactaagtacatatacatatatatataaatgcaatattgcaaattatttgaaaataaatttgaatgttatatttatacattgattctacatctgcaaatactaaaagtcgcatgttaagaaagtgtaaacaatctaattcatatacttaatgaaaaaaagtcatttccataatgaaataaaaagcacataatccatttttttaagtagtttacagttacagcttgctctaaggccatcaacaccttataaggcccactattcagattaaagattaacaaagtatctcacaatctaggagtaagatttttgttgagcttttacccaagacaagtgtagttcaaatggttaggcatgtggtacgctttaacaaggttgaaggttcaagtccctcctctcgggtatctacaaagcaattgatgtagatttccgatcccaaaacattataggattaggaagggagcctagcctagtattaaaataaaaataaggcctaacttggacatacacaaatctcataagtcacatctcagcgtttagaataagcaaattcagccaacaagtacaaagaggcctaaaagtctccctatgctcttaaaagtaattccaaagtattactccgtataaccttctgttctaagaagttggtttttatcttcttggtgctactatgagtgaaaaagaatatcctttgagaccaataattgacatagcttacaggctgtaactatatttacactataacaagcaaaataacacacccaatctcacactcaaatatagcattccatgccttcatttttcattacacata

SEQ ID NO: 14472 - DNA, 10108 bp, Cannabis sativa
  modified_base (7050)..(7050): a, c, t, g, unknown or other
  modified_base (10037)..(10075): a, c, t, g, unknown or other
tactaataaatcaaaaaaatgtaaaaatatacattaatattatatattttaaattaatgaaatatatatttttttaaaaaaaatgtattgaatttttaatatttttttacatgaaatacggttttttgatgtatttctatgttgcactattgttatttatttattctttttatgttgttttgatgttgttttcttgttaatttcatgtagtttcttttttttaattttttttttttaaaaaaagtaacttttcttatatattaatatcaaaaaattaataaaaaaaatataaaaaaaattaattaaattttgctattgaatatgggagtaacacataatctaaaataaatatctatatgtacatatattttttgagactctacctaagtattatcttattatgtatacatagttattattataattattatgtcatttcaaaagtcacatcattattatttttaattgagatttagtataattagttaaaaataataaactaaatataaaagtaaatgaaaaattggacaaatgaggacttgaaatagtttattcgaaacacgcacatgcattaatgaagattgtaaaggtcacatagttatatttttaattaataattactaatggatgataaaagtaaactaaaataaagacctaaaactaaatgaaaattttgaaaaaatacataagtatttgttcaaaacatgcatgggttaatgaagaaatatcacataattattatttttaattaatataattagtaataaataataacaaataacctataattaaatgaaaaattgaaagaaattaaaaaaaatgagaatttaaatcaaacagtaaaatctattataacctcatttgctttgggcttacaaaataataaaatcaatccgttgctctctcacttatattcacattttgttggttatttctacaattaataaacatacatcaaatttttacatttattgtaaatgatttataccaaatatggtcatgcattctcttttgcaaaaatatcatcttttttatcttcatcatgatgatcaatgccaacaatagcacttaaagttttacactaaaaataatagaagtgatattgtgaacaaagacaagaaccttggctaaatgaaatgataagtggagtgataagtgaaatgctataaaaaaaataaaagttgtaattgattttttttattgtcattattaatgttataaaaactaaaaataaaacaatatacactcattagttttaaaacttaaaattaaaaaataataaattataattaatatacaacttgttttttttgttagaaactctaaataaataagaaaaatagaaaaaaaaaataaaataaaagaaagctcatacaagataccatgtcacctaccttaacaacacaatttatataaatatatagatatagatgatactttgattttaaaaaataaaaatgatataatatacttctcatccaataaaaaatacatattattatttttctagttataccttattaaactaattaataaataataaataaaacataaatttgacccaaaaataaaaaatttggcgaaacaccatttaaggagacacactttgattttccccatttattttaaatcaagtatttattaaaaataaatttacctctttccaatctatctattaatttaatttaaaactatttaaacactaattttaatttaataattattaattaaaatataatttaaatatatttatgaatttaacccacaaaatgttataattaagaaataaaacctaatctctcttttcgtctcaatttacccttaccttagtaaaaattttcaaacatgacatagtaagtttactaatttcattaatttagtaatcaagatgatattatcgtaggtattatgggcactatggacctatgaaattaagctcccaatatgttaatctaaaatttaacaactaaatttattaacttatcaatttctcaagactccactatagactcaaaatttcattcttattacatagaatatgttgtatatttccaacatacatataccataaattatctattattttgataagaacaatcaatgatcttctatagattgtctacatcgagtggggataaaataactgtttaaccactcaatgaattttatagattatacacattgctctttgtaatgatatatcagtaaagtaatataattactggaatgggtactctgccattaactcgtttagccaagctcaaagaaaattattgtttcacttctaaataatcatagaagctatagttgtccatatttatgattaactctcccactcaattgaactactgagttcccaatatataaatataagctagatcgacgagtaagttggtagaaataaatgaatcaaagaactcaatcaataaaattagcttaaatcttaatcatctcaagattgagatcaaattgatcaagatcaactaagtgatattggcaaagaaaatatataggagtaagtattacacccaatatttgagaaattaaaaaagtaaaccctaatactctgaccaagccttaagagagcaaagtaaggttaagacgtcctatttgagggctgttgcatatctaagaaactcatgaaacactagccaaccgttggtgtcgggacccacaccaaagggtgccaaacgtagggtttcatgggcctgtgcgaggatttttatccaagagacctcaatccgtgaaagaaactaataaggacaggactcattaaggcataagaaggccaatacttgaacataaagtgaagattgcacaaggaatccatccgaattggtttggccgactagtgccatcttttggcacaaaaagatggcacaggtcaccattctcaaagtgatgaaagagacttgttcaaatatgttccttcaacaccaagaagcgtaaaacaattgaaagaaacaattcttaagtccttttttctaagctaggcgacctgtgctatcttttttcataaggagatggcacaagttggccaaggagaacaagaaagagattcatgaccaaatgtatttttcatacatcaagacatcaaaaaaagtgagaaaattgaccaagttatgggaaaccactatggccaacgcctgccatctttaagacccaaaagatggcacatgcttcctccatcaattggccaagagaaaattggtctgaggtgttttttgaacatcaagatgattaaactaagcaagatataccatcaaaggtctcccaacagtcatgaccaatctgttccatttttggtaccaaaagatggttcaattctccatttagggttttagacatcgacatgagattttgggacaccgaaacgaagaaaatatgaatcaccattaaaaaataagtcaaaacataccacaaggtgtgaaaaagaagacatggctaacctatgcaatcttttggcacaaagacatggcacaactcttatgcaaatggcatagctcgtcttggagcagaaattcacttacctcccttcaataaaatggccataactctcttaattcttatccaaattactttgtttaaattatgttgcaagggaaatttagagacaaatctatgcttgcctcatgctcagataaaaattctgaaagtttttcgcctcaacattttgccacaagacatgttggctaactttgcttgagaatttgtactttcaactatgtgggggccacaaggaagccattttatgagttgtaccaccttcattgtggcaaggatctcccaaaaagacttgaatatgagctgcgaaaattccctattgtcacatctcgccatattcatcattgttcaaggaagagccattttgacatgtttacaacttaaagtgtaaaagggaaactacccaaacccattatagttcctataattgtgggatttttccttcatatttatttatttgtatttatttctttttatttgtaatgtaatgcaagatttttgtaagattctacgaattgtggggagtcacaacctaacactagacctatatgtacatgttgataaacctaggggaatgatccttcttttgatctctcttttggttgcaccaagaattcactatatgaattctttcaagtcaccactaacattatgaagcaaagaccctatcaatctttggagaaaagacttcatcaataactagacaccattctatatccttcaagtccttcttacagttgcccccaagaacgttggttctatcatcattattattagaattatgaattatttgtctcccttcaaccattgttcataagttttaacctagattacacctaaaaattatttttgtaatattatatacactcttgagaatattactctagtgtgtctgatgaaaataataaaatattatgctgatgtagccccactaccatcgtgatgtggagtaaactactataaatcccggcatctattttttactttcacaattttgttttgacaaatattagttcaacattgtgctcttaattttaccatcttcttagactatttgataaaaaattgcgtcaacagtttaatgctttcattaagagctctacgttgaaggattttgttgttttcattaaaaaactcattgattcttcatttccacaacaatgatgggacctagaaaatttttttacatggagataagccaagagccatgtgacaaatttcaaattatgaaattatttgatgagtgaccccaatccacgtttggtgaaccaaaactctttctgggggaacctcacccaacacagagggcaccaatccatgcaattatagaaaagttaaagaaccaaaagtgccaaagcttaaggaaattcatccttgcaaagatgacgatagggtcgaacttggtcccattgaagaacttaaagatgtcatattaaaccaagtcaaacaaaaaaatgatgctcatggcaatacgaatctgtcaaggaagggtgaacaaccacctatacccgagactgaagtacgtgccaaacacactcatgccacctatactccattgcataggtatggcccacatggcagccaaaagttgcctccaaggacaccccttagaggtatttgcgtggacaaagaataaaaaagaacaccctctaaaagagaaagagaggacgtccaatggctagtaatgccaaatacgaaccaatgaggaatcaaaaaggacccaatccacataatgttaatccttagcatgcatccaaaggtcatatagaatatcttcctaggaaacataatatgccctcccttggaataaaaacctccttataggagtttgtgccaatattgatggtccacttccgcaaaataatacaaaccatgcatgcgataataaaaaatacaccacacatggtgttcatgtccaatctccattaccaccttaccttctaagggatgtatgggtcaatgttgtggaaataagggagaatcctcatcaagaaaggaaacaacctactcaagagatgagttacccttcaaggtcacaagctaccacaatgaattcccagcagggggcatgaggaaattcttaacaatctgtcctcgaagatagtgatagcatcgattcactaaatcgttcaatgattttttatgacaatactcaaccttgattttatctagaatattccaccaatcgtcaacactataaggaagcacgaagggaagatatgtacagggggcatccataaagaaaatacccctattcaactagccctccttatgttggtaactatgccaacgttcctcgttttaaagacgccactcaaaatatttgtatccaagctaaaaatcttcacctccctgtaggaattgattaaggtataccaaatgataatcctcacatgaaaattcttgaggactaacttcaaatattcttgaacacaaaaaaaattaaaggttatgaatttgatgaaaaggtggagcctttttcacctcatatcttggcattaccatatcctcaagattttgaaatgccaatgcaacaaagtatgatggaagcattggccctcgggtacacataagtaacttcaatacattgatgcaagcatatcaagtggtaggggacattaaatgaatcctatttcctgctaccatatatggagttgcatcgttatggtgaaaaaaattgaaaagacattccatcacttcgtggggcaaaccttcaagtgattttaagatacaattttatactgcaaagaccaaaaagttaaagtgctattccctggcaatgtcaaacaataaacaggcaaaagtttgaggacatactttaaatgctaaaatgctacgaccactaaggctagagatatcagtgatagtggaagacttaaggcactagaggcaggaattacatatgtatccaatttttggaatagtctacatgaaaaaacagctcgaatcattgatgagtttataataagagctaagaaatacatcaacagagaagagacaaagatagaaaataacatttctctctcatgttgagcaacagaagccgtagctcctacttgagataggaataacccctccaacacaaatgcttccaatcataccaacaaaaagaataatgacaaatgccttaaataaagctcattaatttaataagaaattgtatttttttttaatatatttcattgtatttactttaatatatataaatttatttaattaaaattactaatttagataaactaaatataaattttaatttaatatttattaaaatatatttcttagcttaatgtgaaaataaattgaaatttactttctaaacatagtatatatatttcaaataaatattatgaaaattatataattaaagttgatctaaaattaactaagaattaattttcaatttaaatttaattttctataaatatattaatcataattcgaaatcaattgtattttaaataaaatacatttttgaaatagtattaaaataaaataaaaataaatcttgaaaaaaattgttctaatttatgttgatctaaaatnaattaataaattaattttcaacatatatacaattttctattttattaaattttacaataattattcaatatttaagtatcttgaattaaatcaacttaaatataaaatttttatatatagaaaaaatacaaaattgtttacttagaaatttattaatataaaatttatttcataaactaagtgttagtttttctaattataatatattttaatctatttattttagttaatcattaatgaaaattacttaaatttaagttgatctaaaattaattgagatttaattttaaacacaatttatttttaaaattccaacatttttttaattaaaaaatattattcgaaaataaaatgataattaaaataaaatgaaatgtatattttgaaaattattctaatttaattttatctgtcattaataaatttctaacttaaatatagttttctatttaattaaatgtattaaaatagaattaaataattaagtatcttaaaataaatcaacttaattactaattctatgtttaatattcaattaaaaatattctaatttatgttggtataaaattaaagaataattaatttttaacttaattatatttttctatttaattaaatattagaaaaatacaaattagtttactagaaattacttatctagaatttatttaattaaactaagtgtgtttttaaaaattaattttaacataatctaataaaaattaatttaatttattttaaaattaataatgttcctaatcaatttttaattaagttaaacaaatataattagcctaatacaattatttaaataagataagtgagccttcatagttaggtagttcatgtgagagagggctaggttcagtatgtcgtacccactactttggccccctaactctcacagaaggcccaaaagagaagaatttaacctttaaataaataattgttattaattgaaaaagcggaatactaattgggcctaaataaaactatcatggtgatcattttattttgaggaaatagactctataccttttttatattgtagtttttatttttaccctttttcttaaaacttatcatttttacctctttttttaaacactttaccgattttacccctgtcaccttaatatactctccatgtgactctcttatgtcagagtattttaggtacagtacatataaaaagaggtatgttttaattaaatataaaattagaggtagatttggttaattgatatataaaagaggtattaaatataccccttttatttttgacaacctagtctaaatatctaaaattaaattggctcctatatggatctaagacaaatacaaaaacataaaggctcacataaatattgatttcgacggaccctatcatgttactaggttttgacacagatgaaaaaaaatacaaaatttctaataacaaattatttatttgatttattgacaattaactatgattaattaggatcatttgatccatcaacaacttaatcatagccatctaagtaaaaaagatattaggtttgttaaaaaaaaattaaatttaaataaaaaaacaaacaaaattaaggatggctggttaaaggatttattcattttataaaaaaaaataaataataaacccattttaaaaaaatagggtcgttgctgtttacaaagttttcgccaattaaatatttttagagcttaagtaagtaataattgcatgaataatgaaataactaacaagagatttttacgtggttcaggcgttaattatccttagtccacgagtctattttattaggctcaacggtcggtgactgtatataaaaatacaaatacaatagactttttctcctttccaccgtgttcctcttgaagaatagaaagcttagtaggaatattctagagttaatagcagggttacagaaatgtgtttgtttaggatgatgaagattaagtcttccatccgaaggtctcgatccccccttttgtgccttttacgaggtatttataggccaactctcttgcatgggctgtcttggatgggtctccgtagggatgtaacctcactgttgattggtaagtggcatatttctcatgtggcttttaagggtgttagatcgtactggctgcacttgctgggcctcggacgcgtgtcacctcagggttgttcttatttgaattccccatattcctagtcgttggattatttagctctgtacacaaggacacgcatgctctacacgattgtgtatcgtgggggacaacgtttgacatcgtacatgaaatagtctggtcactgggtccctggcacacgtgggctgagcctttgcgggccaagggcgtaccctagactagtgtatccctgaaatgctttggcctaatggaggatttctacattcatttccagaacaaatagtctaagcttctggaaatggaatgagactctagttcacagatacccttcgggtggccaacagtcagggagacttctttcacggaggcctttcccgcaggttagtgcctttattctcccaaagcactaagtgagttgtttagggggcttaattactccttgggcctctttaattaacatccatgtgcttacaaaaatgtggataacatttacccccaagcttcagggacttaccatggtccgggagcttgcagtatattcttctgaaagtttttccgcacgtgggacttatgataggttctttaatgcactacgtcatcagccgccaatttgaagtgtcattattcgggaggcataattttctctatcttcttgtcaggattttaaatgctgacatctgggttttgcacgagtgatgggcacgtgtttcatgggatgctcaaaacagcgatgattggattactttccattttccaagcgtattctacgattcatgtaatgatataagctgactgttgggaagtgagatatgttaggctttatgccttaaataaaacgcatttcaatnnnnnnnnnnnnnnnnnnnnnnnnnnnnnnnnnnnnnnntttaatgttgcatggttcaaatgatttatttca

SEQ ID NO: 14473 - DNA, 3932 bp, Cannabis sativa
agcgcggtaatgtttcctagttattatataaattggattaaattaaaaaatggtgggggaaagtaaggcttgaaacagattcattgataagcgattgctagctcgatgatatgtcttctttttttggttaagtagtggaagaatgtaagctattgcttctttcaatttttttaaattgtcatttattaaacgttccgtaaataaaattgcttcgtatgactgcagtttgtattcagatcgtaattttaatttaaaaaatactcttaactgaaattttatttattttaatagttaaagcaatttgattaaaaaaattagcatttccttttagaagaataaattaaaaattaaaaaaatctcaaacaaagactagtcataaataataggatgatattttggtggaaatttttatgctaacatattatattatttagaataaatacatatgtatgctattctatatgtataagttcttccgttgtggtcctccttaaaaatttgacatatgcatgacataacataactatgtctattggtaagcatcgcagaaagcaaaaggtcaaaaaataaataaaaagagaaataattttaattttttaataaataataatcatcatttggattcttaatacttgtttttcaatctgtgcatacgaacccgattcccgtgtgactgtggtggtggcatggttgttagctttaattatcttgagaacatgactttatatacataatttaattgatggaatgatagaccagattttatgtggaatgaccttcctcgtttcgtttggtgtttgctgtttttgttttttcacacttatacgagtgtgtacagttttctttatttctatatttcataagagcctgtattcgtttcaaaataattgataaaagcacaaagaaataagtaaaataataatatgctgggctgtcgtagtagactatgattttatttcgctaaatttttacttttatttatagttagcattagggtcggtaagcgagttaggcgtgtgcctcgacctccgactgtttaaggcccgaaattgtaaaaaaaaaaaaaaattgttaatatataaataaaatattaaataaaaaaaaatataacagccaaaaagtcaagggatcaattcttaatctttacagaatttttaaaagatttaccatcacactaaattattaatttataataattaaactatatatacaaggttccaaaatttaattttgtcttaaacctcatacaacggtttggataactattatatgaagatattttttttaataaaaaataccttttaaagtgtttgaatatcattaaaaaaaatcttctagaagtaaattaagaattatataaattattttaatttttaaaataatttctcaaaaattattttggggaagttacaaatcctaacttcttcaaaagattttgaaattaaaaaaatatatatatatcttatatctaaacatctgtagaagggcattttttaattctaaaaatttaaaaaaaaaaaaaaaaaacttatagaaactaagtcatgtcatatattatggcctcttccatacaaattaactataacagaacattaggttaattcttttttaattggccctttaagaatataaataagttaattcaagcgaatcaacattatttcaagctacttttgttaatcttataatttcaaagttcattaggactacgcgctcatacgtatacaacgaccatatatacattacttattttaagcacgagcaacaatatgtgcatataaagctactatgcaaacacacacacaaacatatacatacatacatatatatttatataagtagagtttggatggagattgagaaagaaaacataccggttcttttgggtctcccatcatcgtctacttcttgggcttcctcttttttctgaggcggcaaaccagtctcgaaaaaaccatattccattatttgatcaactggctcggtcatagtacttcccattctgagactatttctctcttcctttctctctgtatacaatatatatatatatataactgtaacgttaattatatactgtatctgtaaaaggaaagctagtgtttggaggagagaatgagtccaaactttgtcaagtgtacgtatatgaagtgtgcacttaacacagaatgtgatattaattggtctctattatatatagtactcaatatatatataagattagtatacaaatggatgcactatttatattattatttttttaatcatattaatattattataagatcattatgcaaactttgaaagtcgatgctacgtggcgtgaaataattggagtgaaaaattattctccttatcatgaaaggaaagatatatgatgcaagagaattgttttgttagttgccaagtagtagtggagttgataatttatatgacaatttattaattaaagcatatgaaaagtatctattttcgtgagcagaattaggaattagtatcctcatttccaagttcatatgtattcaaaccttcactaacaatgaggatataagctccaacacatcccttgactctgaattaattaatacatattttttaaattagtttttttttttttttgaataatgtacatttaaaatagttttattgaaccaaaaccatcacaaatttgacagagaaattaatataataattttcacaagtaaaagtaatatttgaaataaaatacgtgcatataaatgaaattatattatgtatacagtgacatttagtaatacttttgtttttaaattttttaattacaaaaataaaagtacaatttttgtttttaaaattttgattttaaaaaacaaaaatgcgttctataatcatttttattttttaattttaaaaatagaaaataaaagtgtaatctgtcaattttatttttatttgttgattttatttaagttggattcggctctgaagccgggatcgggggctgggtccggagtcagggtcagggttcgtctgagttccaaggtcaaggttggagtcagagaccaaaatattaattaagaaaaaaaattgtttaaaacaatttagaaagttttttttttcaaaatttttaaattttgattctcaattaaaaaattgaaaagtgaaaacaattttatagaacatggtttcagaaaatatttcacttttttaattttaagaaaaatttgcggttaaatccccgtatattttaattgttatacacttaaccctttttttagtggtaatacctccttatgttcaattctgtttgcaactttgatgtttctattaaatttggctgttaagtgccgattcaatctatcactgtatacacgtagtatatttttcttggcccaaataaatttattaatttaaatattttaaaaaattattttaaaataaaaaataaataataataatatttttttgtcttttctttttactgatcggattatatttttaaataaataataaaaaatactcgcaacaaatccctcatgaaatccctctctctcatcagctctcaacagagagaatgattcaactaaaaaataacagaaacaaagaataacccaaacccatcatctttatcctcaaattcaacacattttttctaaatcaagcttctaaagtgcccaaatcaccattatcaattccttgaacctgtttaacatcatcactcacaatttccttagcctccttctccatgtcatcaccaccatcatcatcatcaacttttttctcaatcgagatggaggcagacccacaagacttagatgaaggtgcgaaactcaaactcgctttgttaggattttgcgaaggggagatcggaagggggcagaagggagattgcttgtgctagaggttgatcgtcggtgccaaaatgacattgacggtgttggaaggagatggta

SEQ ID NO: 14474 - DNA, 5193 bp, Cannabis sativa
ttgctatttatggtataagttttatactttaaacttatataaaattaattataaattaataaaattatatatatttttttgtcaattattgaaaggatcgcgaaatgcgcggttacgttacctagttatacattataatcatgctctcattaagtcattatgccttatggaagaattatataccccttatattgtatcagaaagaaaagggtgttctatttttaggtgtaattccaccacgtaagaaaaagcatccacctactaatttggtctggtgaattttttccccttgaactttgacatgtagcaaatcatgccccataaatttttaaggttgttaaaaatgtcccatgaactattgagattgttgaatttaaaaatttttgtccacttttagtaaaacagaatttaacatggatgaaagttcaaagagcatgatttagtatatgtcaaagttcgaagggcatgatttaatagatatcaaagtctggagatcatagtttagtacataaacaattactgaaatagtaaaattaaatgaaattaaacaaaaatccttaaatctaacaatctgaatagttcaaggaaaatttttaaccgccaaaaaaattcaggaaacataatttagtacatgttaaagtttaaagggaaaaaaattctaattagccttttttttttttttaatttagatgtttacttcttttaagctttcctagagagaacctttatattacattaataaaaattatcaaatttaaaggatataccattagtcctttaacatttttttaaaaaaataaagagccatgatatgatactactttataattcaaaaaagaaaatctgggaaccaatatttattgaaagagatatattgcaatataaatttttgaagacctgaattttattccatacaatttttatgctcgtgtttacattaaccccaaccaaacgggccttaatggaaaaacattaacaaaatttgagggtgtacaataatttactgcaattacaatatatacaattaacaaaataatggctctagttaacaatactttctcttgtataatcggaagaaggaaaagaaagattagtttctagatgaaagggaatattatatattccacgtagaagagattccatatgaatctatagaaacctgctattgcctcctgcacaattactcaatattataagaaaattaagtttattgctttctaagtaataataacagaagggccaagattatagtaccttagtgtaatttgcttgctccaaaacccaggcctgcaagtatacaagaaaattatttcaagaaagaattcgacaataaatagatgttttacttttcgagtcatgttgatttgacaaacctggaaaactaaggacagtgccaagattgtgtgaatgggcaacattaagttacgcttgaaagcctatgagcaagaaatgataaaagggtaggcttcaatatttgattgatgtaaaatttatggaagaagcaaggattaagaatgttttacctgaggcatgtaaattgcagccgctatagcaccgatataattaagcaaaagaagcccagagccaaggtatgctatgtttcgaactccaagttttgttgcaaaggttgatatttgaaatctgtgaaaaagatagtttcacatgataagcagaagggacaagtggagaatctggatttcaagatgtaggtgtaagatttattgagattgggtgattaaattgaataaaacttggcattttacatagcagcatgatcaaccaaatatttgggaattctctttgtgggtgcatgtattttttccgcgggaaggtagaaagtgatgaatttcctgaaacttacttgcggtcgccctccacgtctggaagatcttttgtgatggcgatgaccaaagcaaacaatgtcacaaaggtagtgatgaaagcaacagctgaactgcaggtcaaacaataattttatttcaactgttgtttggaattagtgatgaacataagtttatcttaagaaccaaataagtaattactgcagattatgaggatgaccaactgaaatcatatacgagtttatttaggttttctccatttgttcattatcaaatgtctatgaactgggagaaaataagccctatattatgaccagtagattcagagtttagaatcttatatacaattcaaagtgttattctttttacatgccaaatagatttgccaagatactatgaaaaactcactatatagaaaacatttaaccaacctccactcaaatgtaagtccaagggcagctctggtggcataatatacaccgaaattcagaaggaaccctcgtacctgcataagttgctttggttagcttttcaaccaaatttcaactctttttttttgttaggggttatgcattcaaaggatgggggagaaaaattataataccgtagctattataagaaatgctgcaacaggaaatctcttcattctaaatggaggaacagagtagatggtgccaaggacaagaccaagacagtagagtgaagtgatgaatggcccgaagttgaatccgacagtcaataaaccagctactgcaaaaagtatcaccaagtaccatgctgattgaactgaaaggtcaccagcagctataggcaaataaggtttgtttaccctgtaaatgaaacatacataggtaaagagcaagtcagggatgtttgccagcagattaatttccatgaataattgataactcgatataaaaattcgcatgccaacagaaattttctttctagtttgcaggttgaatacttaaaaaattgagccaatttggatatcgaaaaattattattttattttcttacaatattgacattagcaacaacaaccaaaagaccaagagaccttctctagctatacataagtgactatgtccttttgcacaaaaactagaactgacttctctatgagtctacaaggtgcatagtcatatacaccaaatatggctatacaaatcaactgtgagtttataaaggcaaatctgaacctggtttaagcctcaagaaacaggaactcttatacaaattcaaaggtggtttgctagaattgttttagaataattgactaagtgatataataacatgtgttaaatttgtacagcgtacttgtcaataccgatatcgtaaatctgattgatgccaacaatataaccattcccacatattaaagcaagtaggccagagaatgcctttagcagtagagaccacttgatcaaatttgggttctcaatcaatgctcttgcaaccaaagcactgcaatataagaagaagagaaaagaaatatttttatgattaagctatatcaatctcaggattctcagcatgggtttgaaagaacattgtgttgtccaacaatatttttttgctattcccagatgtgacattgacttacattgatcctagagtggttccccgtattgtatggggccttaggaatctccagcaagcatctctaaagtctgaaactttgttaagtactggatttgatccagcagctccagcttcagcacatgcctgaaaacatctacctttactttactaatcacacatactaacaaaactacaccaagttcaaaacaggtaaggggaaatatcaacccaaaaaacatgaaaattggcctcagattactccagtgtttcagtacttattcaatattataaacactcaaatttcttgctttgacatacttaaccattcaaagttccaagataaccagttaatgttcacatcaaagcaaaatttaatagacaaaagctcaattccacaaattttcataatttaaagacataaaaaaagcattattaaaattctctaagccgagctaaaaatacccagagtgagatttcttagaaaacaatatataatccttattatggtaaaaccaaagcgacccaccaatcaaaatgcaaggctaatataaagttatgaaaaaaatgaagctttacccggatggaatttctccattggtgggtgtttaataaagattttgagcccctggtcgggccgtagaagctaagtgtttgatgaaagtttttggtggagaattttgaagggaagttggagaagtgggttgtgagcttggtagaagtatatgaggccctgtaacgagggaatatagttggtcctccaagggagagtgagagctccatgagaaaagaagagagagaatgagaatggccagagagagagagagagagagagagagaggttgatttgattatatggttgtgcttctacaaaagtttaagcggttaacccaccaaatgctgcctgaatccatgcataccagatcatctctcatttcatttcttttctttcccaaaattaactcaacttaaatgggagaggtaaaaattgtggtatatttagcacaaaaaataattttgtggtaaatttatactaaattttagttttgtgttctaatttataattataaaattttgatgtaaaatttagagaaaattacactctatattctttttatattgtccttttttatttttatcctcttttttaaagtctattatttttacttcttttttaaacattgtaccaattttgccactgtcactttaacattgtaccaatcaatggaggtatatacacatacagatattttatttcatacatataaagtctaacatatttaagatattcaaactccactaagcatgcattgataatcaattaaaaacaaaaagttagtaaatgtatacataccctatccctttggttattagaaaatagtcgacgacataggatacacatgtcaattattgcgtgtaccctatggcaacggttatttcttaataatcgacgggatagggttacataaaaaccttcgagaataaaattcctccaaccgactctaaatgatatagtctaattctatacttatagtttttataaaaaaaactgcctctaaatatcaatttttaataagtgggtatttttacacttttaactccccttattataaaattagtgaaaaaaaaagtctctaaaaagctattttgtagtagtggtgtttggatataccattaaaaaaaaattatgagtatttaggaaatatataaattattttaattttaaaaataatttttcaaaaattcttttggttgaagctacaaattctag

SEQ ID NO: 14475 - DNA, 6599 bp, Cannabis sativa
  modified_base (6573)..(6574): a, c, t, g, unknown or other
tggtattttgacaagttttgctcttagtttgttgtatttgtgatagtttaattatttagagatagtccaaaccgcataaaccacaaaaatcgcaccgcaccgcactagtttttgcggtgcggtttttgtgggtttttaatttcgcggtgcgggtgcggtttgagaaatttgaaaaaccgcatgtgcgggttggtttgaaaaactagtcaaaaaccgcaccacccgcaccgcgaacacccctaattggaatggtctttccttacaatcaaacaaaggaatgaaataaaaattgtttctattccatttcattacctccaaccaaacgccacctaaggtttgtgttgctctaataatttctctggtgatttaggtttctgtaaaaatacaaaaaaaaaaacttttttataatataaaaataaaaaaacaaaaatttgtttttaaaattaaaaaataaaaattatcataattttatatttattttttaaattaaaaaataaaaataagttagaagacgtagtttttattttaaaattaaaatacaaaagtaacttctttctttttttctttttttttaacaaaattttaaaaatataaacgccacctaaaattagctaaaccaatcacaataaaaagtcgtttgaagctgcgtatgtctctgttctaactgtttttcataatcggtccctccaaaacctctgtttccacttccagcttccccgccgccaaacatattagctaaaccaggaaaatgggcatctttgaattctgaaaatggaacgatatgcagtcagaaataattcaaattacatctaagatagcggcctattcgaagtcgggtcaaatcaataatgctcgaaaactgtttgataaaatgtcacacagagactccatcgcttggaatgccatgcttgctggctattctcaattgggtcttcatcaagaagctctttctcttttctggagaatgagaattatgaacaccaagcctgatcacttcactttcacttccactttcagtgcttgtgctgctgctggtgcttgcaaactacgatatgggactaaacttcatgctttggtacttgttttgggttaccaatcttatgtgcctatcaataatgcgatgatcgatatgtatgggaagtgtctgagtccttctagtgctgccagtgtatttgatgaaatgagtatcaagaacgatacatcttggtgttcgctcttgtttgcgcatactaagtcttttcagtttgacatcgcgtgtaaagtgttcttagctatgccaaggagagtggggatagcttggaacataatgatagcgggttatgcacgaaatggggaggttgaacgttgtttggcattgttgaaagatatgttggagagttcatgttggcggccggatcaatggacttttagctctcttatgagtgcttgtacagaatcaatatcactatgtttgtacggattcatggtacatagcttaatcattaaaagcggttggagttcagcagtggagacaaggaactcgcttttgagtttctatgctgagttaggttgtagaagtgatgctatgaaggtttttgattctagtggaaagttaagtcaagtgtcatggaatgccataattgatgcaaatatgaaattgggtgaaacgaaagacgcttttctcgcatttcatcaagctcctgagaagaatattgtttcgtggacatctatgatctcggggtatgcaagaaacggcgatggtgaacaggctattagcttctttgttgagatgatgagaaatgggttcaagccagatgattatgcaattggagctgtgcttcatgcttgttcaagctttgcagtgttagagcatggtagagtgattcatggatgcatatttcgtaatggcttccatggctatgtctatgttggcaatggcttagtaaacatgtatgctaaatgtggggatttagaaggtgctaatctagcatttggcgagatacgagataaagatctggtttcttggaatgccatgttgtttgcatttggtttacacggaaaacctaaccgcgctctaaagctatatagagaaatggttgcaactggactaaaaccagataaagtgaccttcattggcttattgatgacttgcagccattcgggtctcatagaggaaagtcaggagttttatgaaactatgaaatcagtttataaactttcccctgaaatggatcatgtagcatgcattgtagacatgcttggtagaggtggttatatagaagaagcaaaagaattcgccaccacagtttcaaccgagttaagctcgtgtgaggcgcttctgggagcatgctctgcacatcaacacattacattagggacatacttgggaaaagctttgaaggacttagatcctcataaagaaattagctatgtgatgctatcaaatttgtattgtggtagtgggcaatggaatgaagctgagatagttaggcaggcaatgctagatcaaggagtaaagaaaatgcctggttgtagttggattgaactaagaaataaggtaacaacttttgttgctggtgaccattttttcccatttaaggtagaggttcataagattctgaactcccttgaatttgaaatgaagaatccttgtttagttggtttcgaaaattgaatcgaaaagaaagtatctttatacctctagcatagcttatgcaatgctgctaccaatgatcacagaaggtcaaggattattaaaatgaaggaataagttaaatttggttaatagctctatcccctaacttgagtggagcttgcattgagaatcaaaatattgatcatctttttagtgatgcattcattcatggacttgtttgctttaatttgtatgagaagaatgtggctttgtgtatatatgctgatttaataatagttctagagttgaggaattcaaattataatggcatatcttttaccttgtgttagcattatacttgttatatttagacttgaaattcataagttcaaccactttttattgcatttcttttaaaaaaaaaattataattttttgtgttgttagagaatatttagaggaacatctaagtttggtaaaaattggtttgattgagaccaactaaaaggtttaacttaacaaattagacaaaaattgatgattatggaaaagaagtagaacaaataaatacaaaatattagacctataaacaactttgggtggtttgtttaaggcttcatatgacttatttgtacatgtaacaagtattgtattgactaattgctcaaaatgtttaaaatgcctagaaaggaaaaagcttcactcatcgtatatttcaaaaagttttgtatattattggtatatatttcaaaatgttttgtatattattgccctgaaaattcacatgtttgggctgcctattctatattctaggcccaagttcaagcccaagcccaacctaatatcatcacatgatttcacattttcaattctctaatctcatcctctctctctctctcaggtctcaacagccaccgccatagctgccggtgctaacttccgccaccgccgtctactggagaagcttgctgtaggtattttccaagaatttttctcataaatacatgaatttttccaagaatctgaatttcataaattctctagttttattttgagttatgactgaaaagtgaatttggaaatttacagtgtaaatcttaatttcattttcttgacagtatagaaatattccttaaaatggttccaagattatagcaccagtctcagtattatgagcaggttgctaaataatttgaacatttgaattatgattgaaaagatgaatttggaaatttacagtgtaaatctgagtttcatattcttgacagtatagaaatgttccttaagggaaaattgttccaggattatagcaccagtcttagtattataaggagtttgctaaaaagtatgaacatttgagttacgactgaaaagtgattttgcaaatttacagtgtaaatctgaatttgattttcttgacagtttagaaatgttccttaatagaaaatggttccaagattatagcaccagtctcagtattatgagcaagttgctttaaagtttgaacatttgagttatgactgaaaagtgattttgcaaatttacagtgtaaatctgaacttgattttcttgacagtttagaaatgttccttactagaaaatggttccaagattatagcaccagtctcagtattatgagcaagttgcttaaaagtttgaacatttgagttatgactgaaaagtgattttgcaaatttacagtgtaaatctgaacttcattttcttgacagtatagaaatgttcctagagagactggttagttatttagagataaaatattgtgtaccaacgcagagtaaagactcgcgaaagtgaggcagaggaaatatggggagcagagctttagtttttggtaagggaatcaaagttctgagcctcccatttaatgggaaagctcttcttcttcctaagaagaacaatttggatttggtcagaagaaactgctcaactccgacgagtgggtcctcccttgaacctccagatgtctcgcgtttggctcaaacagccagaatttccctcactcctcaagaggtatgtttggtttttattcatctgaagagatttgttattctagttcacaaatcaattcaaaatctgcatttcccttatcaggtagaagactttggtcccaaaattcgtcaagtagtggattggtatgaatcttctttggagtatcaagttatatagcttgctggggtttataatttgtgtgtgaattatggaatgaatggtttggtgactgacaggtttggacaacttcaagctgttgatcttcatagtgttgagcctgcaattagagcaggttcttattcaactctctcttgttccttgatataaagcctactttgtatggatttttgaacttgtttggctggaaattaattaggcatcttaatttgtgtggtaattccttagcattgttctactgaaaatgatgtcaagttttgaatgtagctagttagtaatgggcagctttcaaagtgttaaatttttatggtaaggtttcattacaagtatttgaagtaaaattggttatgttgtgaatgatatgcagatactgagggtgacaatttgcgcgatgatattcccgaaacatttgagaacaggtaatgaagaaggtgttctagtctttattgtgaatttatgctgtgttagagtacaaaattacaaggctttggccttaattttttttattatatatttatgggtgaaatggcttgttcttaacagggaagcactaattggtgcagttccaaattttgaagatccatatattaaagttcccaaagtgttgaacaaggaataagctcctttggttgttggcttctttcttctttggcttatcactcattttattctttatttatgatacttttttggtaaattgtaatctaattttgtttaagaaattaattgtagtaatgaaccataattccataacaaatttctaaatgtgtgtcttaaaaacctgttgaaaaattatcaaaattgcattaaaaaaattgaattgtgaaatatttacaaataatacataaagacaacactcaaataacggtttgatacttaatatttttatcacataattttataataaatttattcaggaaaaagtaatctatgtaaaatggttttgaataatcttgtaaactccaaatttgtattatttgcaactagtagtgctaaatccaaaacgttcaaattacattgtatactcactttattttatttcttttaatttttatttttatttttatattctttaaaatatatttacttttatagatgatgttcccatttgacctgtaaattatatattagatttaaataaagcgtgaaggtatattagataacccactcaaaaaaataagtatattttaataaaatataatatgagagtatttttaattaatagatacaaaaaagatatatttttcaactaatctcatatgtttatgagtcaaaaaactacataggcgaaattttttaaaaaatattacaaaaatatattaatattgaaaaaaaatattttctctttaaatttttttaatttacaaaaacacatctttaataaaaataatatttttttttgttattttataatttatttataattatcataagtttgttcggattattttatagtttatttatagttgttgtgagattaatttcttattattttttagttttttattttgaacaaagtgtatttttgcaattaaaaactttaagttatagaattgtaaataaaacataaaaaaaatgagtaatttataaagttctcctatttattattattttgaaagggaacactttacattgatatatttaaggctaataaggatttttgctccgtaaactttgacatgtacgaaatcatgccccttgaacttttttgaccgaaaaaaattctccctgaactattgagattatcgaatttaaggacttttgtctaattnnattcaattttactaatttagtgatt

SEQ ID NO: 14476 - DNA, 6192 bp, Cannabis sativa
  modified_base (643)..(646): a, c, t, g, unknown or other
aaaatatgaatataataactaaagtaaataaaaaaagaagaattatagtgtattttttgaagttttatggaagcaatatatgacattatggcaataaattattttaattttatattttttataaattattatttgttatttaggaattgctacgagtgttggattttatcaattcttaataaaattcatttttttttttgaaaaaataaaaagaagaaaagagtactaaatagtattagtaccaagagcatgagaaacaatttattaagctattaaataagcaagcatgttaatttaaataaatgcatttaattattataatatccattgactgatgtatttataccacgatacttcaaacaagtcaatttttattttaaaagaaaaaaatttattattaataattataaagattgcatatgcacttcattaattaatatttgggaaatctatatttataaaatcatagcatgtgagtgaataaatattagatgtgagggtgtaatccaagtaataataaaaggatcatccatagttgtgtacaatgaataatagttataatttttttagcaagaatagttataataaattaataacgaaactaacaacatgttttctactatagattttttttttttttttnnnnaaaaaaagaaaaagaaaaaaccaaatacataatacctaaataattaagttgattcttcatggcatgcgatatttaatttggcatttatgtgagaatatcactaattaaataattctattttgtttttattaagtaaaaacaaatgatgacaattgacaagtatatcaactaaaataatttataatttgtgcagatatttaaaacgaattttttttaatatttataattgttatacatataatttaataaaaaaaaataacaataaaaatattttattttacgattttattatagtcgtacccgtttttaattagtaaatgccaattaagctcattaagtgacagtttaaaaacacatgacaatataatttttagcttatttaatacaaagtctaataatatatcgttacgtatttctaaattaatatttaatggcaaaaaaaaaatacaacggtaataaaattgtaaaataatatatacttttactattattttttttaattagagttatatgtatacaaattataaatattaaaagaatttcaccctaaatatccttattttactcctaatattttaatttgctacggcttcaagattcaaaactccctatgtattcaacaaatgaagatataataaataacatattcatcatctaaaaattaagtaatgataattctattattcaaacaattaaaataaaaactatcatagcaaaccaaccatatttttgacaataatgatcgatctagaaattaaacaagaggccaataatccaaaattctaaaatctaaaaatgaagagtaatatctatgtcatcaacacattcaagagcaaaagaaacaaagctaaaagcctaaaagaagcctcaccaatttcatgcactgccaattttttttttattataagaaactattttattttttttaatattaataaatgcacacttgttgttgtgttatgttgtttataattaaacctcatctaccaacctaagtttaatgtttttcttccaatattatttcaaataataataaataaataaataaataaataatcatatcatactaagtactactgacactgaacactccgtttttttttcttttttcaaacggaacttgtttattttatttatatttataattatttttttccccgggaaataatttctgaaattcccacgctatttttctttccaattcaggtcttaaaataaattaaaaaattaaaaatattaatttcttttttcgtgaaaaaataaaaaatgaaaaattccaaccctttcatttttatatatctaagcagaacagagcaatagaaaaccttcaaacacaaacacaaaaacccaaacgaaaaaaacctttcatccccctctctctctcctctttctctctctagaaaagagaaactctcactcatcgatcaattcggttgattctctgatcagttttccggcgatggaaagagaatgaaggagtatttctgctactattataagcttgggcgatcatgtcagtttcgtactcggactgcttctccgacctactttgcggtgaggattctggaattgtattggaggatcagtattcgtcggagtccttatccgacttggaatcatctccagcttgcagtgaggaatcgatcgctagttttatagaggatgagagaaactttgttcctggattcgattacctcgctcgattccgctctcatcctcttgacgcttccgctagagctcactccgtcgcatggattctcaaggtactaaaactctacagtataaagctatagctagctaattaaaactccgccttaattctctctttgccttttttgagattgcgaaatgtctaattgtaatcgcccttgaaatttcttcaaaattacaataatgccacaagtactccatgaatgatcgtatatatatgcgtatagatctgatctattcctactgtttcattcaacggcggtaatgttaacggcgatgttttgaagaaactgttaattggttatcggatctatgcaagagctccagatcgatgttgatggagcgtaacggaattccgttgcgttttttttatgctgtacatatttgttttttagtggtaggagcgctaatattacgaataggtcactgacagtgacggtttcgtatgatgtgtcgtttttttgtaggtttattcttattacggttttcagccactgacggtgtatctcgccgttaactactttgatcggttcttgtattctcgccgcctgccggtgagttgattcactttcccgccgatcatcctaattttaacaagatgaagctattaaaagataatgattgcgaatgtaatattaattattataatataaaaatctgattattagttttttatttctattattatataattattattttagcttttttttatctatacgaggaaagtaattatatttgacttttcaaatctgaaaaagtagcacactattttacctataattacttaattacgcttccagacagagcctgaaattactttaatgtcgtgcaaacgtacaaataagagaaaaatacgtagtcctttatgctgagatagtaaaacgcagagccattactgtcgtatggactatcaattacatctcccttgacttttttaataactacagtataaagtacattatagtatttgggtatttaatatgcctgtaatttattataactttttactcgccacgtttcaaacacaatacccctgcattgtgaaaatcgaaaacccaaataaattttttgatcggatgagtttttacttgcagaatacgggtgggtggccattgcaactattatctgttgcttgcttatcattggctgcaaaaatggaggaaccacttgttccatctctattggatctacaggtaatgattaacatgacccccccatttaaataattgggaaagatagtttaatttttgattaattaaattgtatatattactaatgttgtatataataataggtcgagggttccaagtacattttcgaacccagaacaattcgaaggatggaacttcttgttctgaatgttttggattggaggctaagatcaataacaccatttagtttcaccggtttctttgcatgcaaacttgattcaactggaactttaactgggtttctgatttcacgtgccacagaaataatactatccaatatccaaggtacgtacaatacaatgatattaatacatacgtatatttccatgcaaatacatgaacatatattattatactcgtaaaaacccaaaagcattatacaatactgtttttgtttaatctttgtagaagccagctttcttgaatataggccatcatgcattgctgcagcggcgatgctttcggcagccaatgaaatccctagtttttctatggtaaaagcggaacatgctgaatcatggtgtgatggactaagcaaagtaagtagtggtgttaattatattgtcattgacttgatgtgaataaattaattttggtaaaaaagaaaaaaaaaatatcattttcatttatttatttattttggcaggagaaaatcatcgggtgctacgagttattaatgaaagatattttgattgagagtactagtagttgccgtaaaccaaaaataattccacaacttcgtgttacggctcgatctaatagagtgagatcaggtacagaagattcatcctcctcctcctcctcatcatcatcatcatcctcgtcatcatcttataaaaggaggaaattaaataactgcttatgggtagatgatgacaaaggaaactcctagtgagaggtaaaaggaaaatggtggcccaagttgtctagaaaaacctcaatattttttttggagggttttgaaaaattgagagattaatattgactttgggtgatgggtgagtgagtgtagagtatatatatatagtgtatgaaaataaaaaaaaaaataataaaaaaagaaatatatatttatatatatatataatgtatgtatgagagtttggtgagtttttagatttgttaattttttttgaggtgggcaaagccatttcatttcatttaatggctttgcagattcccaagggaaggggatttgttttttgttaatattaattttggtgtgttagaaaaaaaaaaacaaaagaaaaaaaaaagtgagggagagaaaagacagagacagatctgttttaatagtggagtcatggagtgtgaaagttaagtggggtgattgaattcaaagacagcattgattattgaatgaaaaggggtggtggagttagtgggaccaatgagtactatatatatataaatatatagacatttatgggtttgatgataaagaggaagataggtttttaattttgatcatcaaatcaaaaggtgttttggtataatggattaattgaactttgaagtttgagctgagcagctgctgtttcatgggatttcatttcaagtcaaatatttatatggccatggtctccatcattgcttcaagtttgatctacctctttcaaagaaacattataataatttttacttgtagaattttgagtggtacgtgtgcttcgcaaagggtgtgtggcacacacgtgtgtatgcgtgcttttttggcgggaactgcctcttctatattggccttaaattaattacgttattttttttttctttctttcttttaactatactgaaggaattactctttcaaagactggtgttcacgtggtggtggtcacacgtgttttcaccatttaattttgaattttttgaatttttatttgattttcctttcgggagggaaaaaattatataagaaaatctcgcttgtgttttttttttggtttatatgaaaagaaaaaggcatatacaaaggtctttggggccttcgtttcgtgcgagttgtaatgaactgatgaatatatatatattaattatatcaataataagaaaataatatatgtaaaagtggtatctctattttgcattgcatgtcacgtgattgacaatagagacttttttgtagctttgcgctttgttttattacccttattattttccacttttgaattgtatagaatgaatatataataaagaaatgaggggtatatatatataggaatagcttttatgaaaagggtatggaattatatggggatgggaacaaacaaaggggtaaagtctagttagatacactattggaataatataagttggtatgaattaatgaagctatatagagtactgtgtgttgggccagagagtaattaaaggagagtttctaatcaggttcaattgtagtatagtatagtcagcaccaacagcatcggtcactctgcacttgtatatatatatatatatatattaatatatataagtaataataatattattagtggtgacaatgaaaattaattctatgaatacgactccttctcgtgactatattcttctttaatatggctcctctccacccacacatatgatatcatgaaatattatgaaattttcttccacgtgtat

SEQ ID NO: 14477 - DNA, 13093 bp, Cannabis sativa
  modified_base (4091)..(4102): a, c, t, g, unknown or other
gcagcctcgacacttctgcaagacttgccgccggtactggactagaggaggagccttgagaagcgtgccggttggcggagggtgcaggaggaataaaagaaccaaaggatcatcaaacagatctaaatcgccctctaccgcccccacaaccgaccgcccgggttctactgcggctgtcatcacttctaatggcagcggcagtggtgcagatatgttaggcaatttgggtccacagcagactctaccccacttgccttttctgccaaatcttcatcatcatctaggagagtacggatctggaagtgatattggcttgaatttcgggggaattcctccgcggttggggaacacaggcgatggtgatgataatattcatgaatttcagcttaatggaaacggtgatcatcagcaatggagactgccgcagcatcaagttcaccaattccctttcatggcatctaactcggaacaaccaactaggttgtcgtacccgttcgaacagttccaatctaagccattggagacacaagaggtgaaggtagaggtgaataataataatattcataaccaatctggtctgaataatctgtccagaaattttttgggaagtcttggattaaatgaccatcagttcttaggtggtggtggtggtggtggtagtagtggcagtggtggtaatattaatgcatggaccgacctctctactttcacttcttctaccaaccatctcttatagtaacttaattttacttattattacatgtgcctcaatctttgatcttatcccgctagctagctatatatatatagcaaattaatatatatcgtttactaaacaagaaaaaaaaagttcccattgtcaaaacccaccctgctctttaacattttgtattacaagtttcaattgttaattaaactgagcaaggggaaactggaaggaaaattgattagaatatatatatatatatatatatttatatggtcacgtcttcttgatatgctagatgggtataagaaaagaaatgccacactcaaaagtaaagtggtttctagctagttagacacttcatatagtcttgaaatgattttctgtttctgtttctctctctctctctctttagatctctttttctattttctttcggtgtgtgtggtggctcaggagtataggacttaattattatatatgttcatatttataattatatattgtatctgacacgaattgagctaaatttgttatatatatatctatgatcatcagtcaatatataaatatttttgatcaaatatatgtgttgggtttattaatttattacttcattattgatggattttcgtccaccattttttttggttgccttcaaaacataacgagtgttgacgtttcagtggtattgatcagttggagatcactttttccaaatccgaagagtatattaatggaccacaaaaacgtatatatatatgtacgacgtacacacacattgagacttcagtaagttaataataatgatatatattattatgtcaagtactttacatttgagatctaaaaaaatgctatctattattgaagaattaatggttgttctgttattcttctgaagatacaatgatcaactcaacatacacatatctcagaataatgattattagaatatacgtagtacgtgttctctctctataaatatatatatatatattttatgattagaaataatatcattcgctttctaaataattattactaccattgagatgtcgttgagaattaattaatttgggtttcatgaggtcacgtacgaacacatttttatatatatatatatagcatatatcatatatatggtataggacttaaaacatgaggttagttagttatgatattttggcatcgcaaggaaaatttacgtacgttcttagtactctgtggttttcttttcttgttttactcacacacacatgtgatatacatctaagtttgtgccaccacagtatgctttttgtgatgatttttgtgtgtagaagacagacagatttttcaaaataaaacttgcctttatatttaaaagatgtacttatttgttttctagtatttatttgtatgtgtggtaaaaatgattacgcaattataataaaaacaactaaacgtacacagaaaatatgtaaaactctagtcatgaagaagggatggatggatatgagagaataaaaggagcaacaaaacgacaaaatttctctcaaaacaatgcataaagtccaagtagctaggattcctgcaattttcagttgaaagcaaaatgaaagaaaaagaagagagactccatccataaaaaaaaatgtattcgaatatgtaattaccttctagtttctttgatcattttgttttcctcaattttaatcatacttaaatcatggctttatattaacgagtgacactaacaataatcataatcagtgtgtagtgtctacatataattaaatatataatatatatatagcatgggttgattaattttccttttcactactcattcaaaagaaaggaatctggggttttgaatttgcttttgcggtaaccaaagctgactgctgttcttctaacatggaataaagctagaaaattaataattacccttaaaaaagaaaaggttccgtttcactttttcttacaattatgcaatttatatatttataagagcaattttttttttcttttggtcggttagtcatggtgtgtgatgggataatcatctttaaaaaatgtcatgggatataatgatgcgaaaataaaaataaatagaaaacaaattacaaaaaaagtatagctaaaaatcccatgcaaacaataagatatttataaatgtataaatataggtatatatattttttttcaaaaaaataaattgcattacattcccataacatgttaaggattcatataattagtttataaacaaatatgcagtacaatacaatctactaagagtacccatgaagaaaggagtgtggaacttcgaggagacaggattaggaaactactatcttaggggaccatgacaagaaacaaatatttgcatatacatatatacatttgtataaatttacacatttttgaccttacataggttctaataagtcaccaactatataggaccttgggccatcatgtaatggtttagatatatatttatttgtggctaagttataataagtagttgatgcccacatgtataggcgtggagatgttctctcggtttccatatggcagcctttttcttttgtgaagtccttattagtttctgatgtacatttatatttatatatttcactttttctatatgacagattccaaatctatgcctcttttagttttcaggcctcagtttacctccacatgtgggatatagattcttcgctttgcttttttttttggtctggagaaaggaaaatgtaagaaaaatatagaaaaaaaatttctcatgttcttccataacaaacatatattttttttttaataattgcgacaaaagttcctataaacttaaggctgatgcagattagtcttcaatcttaaaaattggcggtaatagtctccaatatcacgttttttgtaagtcctttgatccctctctttaattgatcctttaaacccaaataaaatgtcacatgttaattttttattgatccaaataataattaaaacaaattaaaaataaaataaaaaactaaaaaatatattttaaaatcataaatttactttatattatcttttcttttcttttttatttttttcttattcgtcttcgtacacccagctatgagagctccaccggagtactatcacgaaatctcaggacactacaacaagcccatgacctccattttagcttgcgttgatcgaagctcgcacgacgtgcacaaccgagaaggatagagggagaatgatggacatccaaggggattgacggtgcatggtcgaggtttagatttcaagttttctaaggttcatttcaagcttggaggactgagaatggtcggtgtcggccctgaccatggttgtttaatgtgagagagagagagagagnnnnnnnnnnnnagagagagagagagagagatcaaggatagtgcgagacctgggttttgggtttgagactgggggttcgaatttttggtctatttggtcttttttctgctatgcttattagccttttttctaagctttgagctaacatagagcaatgttagctatgataataaggctcttatcattaacgacaaagagatattgtattttctggctctaaaacactacccaagaattactcatataaaaataattaaagttttaatttttcttttgggtttcattaatctttacaattttttattagtacccttttgatgattagctttgaaaatgtgttttacgtatataattttgaaaatgcagatgagagagagagaggggtacagtgtaacttgataaaagttaaattttctattttgttttaaaataatttttttaataaaatagaaaataaaaaggggtgggtttttggtggccaaatgtagggtggggtggttggggtcggctaggaatggttgttggagttaggatgtgcttgggttggggatcagtgttagaattttatgccctaaataaaactcattttaatataatctgatttactaattaatttcagaaatcattttatgatgcatagttcacatgattactttcatgattatatgtttaatgtataaattctattaaatctagaacatatagttattcacttatgtggcttgataatttatttttgggattcttcatgagctttctcggatgaattttaacttagcccgagcctccttagccctttggacaacccttttcttaacttcccccgacttctgttgcaatttaacttgtttgttatactctcgagataggacaaaatacttcttttctttctcttggacttcaagctttgctggagtatagatccttatatatatctccgtaatccctcttggtcttggtggcttttttctcccatgctatggctttatccaaagagtcggttaccctctgcttaatgatggcctccatcctagtattagcttcagctagagctttggcagtctcctctcttctttgtttagcatttgcacgtttcgcccttaggacctcgagttcataagctagttgggtgaccatggagcagttactctccaccattaagctcacttgtgaaaagaaaatggcgaatgaatcaatcgactaagaaatatacaacttttatctcaagtataaataacttacaacattgacttgggtcctcagagaatctgccaaaaaaataggatccccactcgttatcatggcaaacgtattagccccatgtttgcagctcgtggtgacactctgatccagcaagtttgccaagaacagagccaagtatatgttccaaccctacggtgaagcctctctgtcatttcaaccctatttataaagtcaggaaagggtttgtccaacttgtcataatcagcaaactcgacattttgtctacaacaaaactactagccaattttctcatctcatcatatttgctgctacgcctcttctgataaaattactccataacctccagatatgtctcgccttcctttgtcattgagataggcttgatgggaagatttaaatgtggaggatgcaatggaggcaaagccatgttctccctagacagttgtgtggcggtagcagaaataactttaggcgctgggggtggcaaaggtggatcctagttgtctttggaagatgtagtacaccttctaggtggtcttccaccatcaaaagaatcaaatcctttctggtatgggcttctgcagcctgcctcctcgaagctaccagctgtaagaccttttccttggtctttatcctcgcctttttatttgctctgccatctgatgagcgagactgctttttattgatcacgaccgacccatcgcaatcagaactgtcccctccagtgttctataaaagaacatgctgcaaaggttccatgatcagaatggttcagtcagatcgataacggaagtggacaagtcttatgttcttggagccttagaaacagcctttggattcgaagccagaggtgttggctgctaagatccactcctagaagtttggcctttcttgcccttgtccttgccttccctaaaaatatctctaaccactgcagatctgaatatgatattgtccaaggacccattgagtatacccatctacaaggtagccagttgatctgcaaagaacaaaaaaaatatatattacacaaggcaatgtcaaaagatatgatttttgcaacaaattatcaaacaacacattagaaaagatccaaaccgtcaactttagaataattgacttttccctgatgcaatgtcttctcaacctcagttagtctcatgctggaagaagcctgggaagcaaatcatactaagcacgtccattctaaaatgatggtgtactagtggaatgaagtggttgggactccttaaaatataatctaccttatttatgaatctattgtaaggatatctactttggtctaagttccatcaagtatggatcaaatcaaccttggtcaatattatctaagtcaactaaagtaggagccctgattatatgaaagggtgtctcaccactaccaaaagtgctcacttccatagcaccctcattttgcactacctccttaaatctgatagtgagttcctcagccttactcaaatttttaggaattgtctcctccaatttgccagccatttctcgtcggcctttactgccttttaggcctccttagtagttatgattgtaatagcctctttaacatcttctggatcccctcgaagagattcttgaatattttccttcacagaaagatcttccatatcgtgatatggaacgatgaggcctaatttttataacttctcagtgggcacgagtccttctacttgtaattccttggaaaaaaggatttgtagaaagctacactctcttccaactctggagtcaagggcgaccgaggaagggagtctgacagatgtaaaaaatgtatcagaatacaacaaataggaggaggaacaaaatcctaaagttcaaggaagggaatgacacttaattacagtattgaaatccaaactgagggtgggaaccctcctcaacgagaagcccgaggtttagaagtagtaatctctaaaattatgcatgtctttcgtggagctggtaggacaaggaacactcctaaagtagcgttccagcctgtaaaaacctactttctccttgtagcctctcatgggttgagacttgatcttttagaaatataagatcacctctggcgcagacataggcttattgtgctaagcacagtaagcgtaccactccgaaaatatacggtatgcctaggaaatgaactaaaaagttgctacttcggcaatagcatagaagttagcaaagtaacaccttaggggaaatatgcacccattttgacatgagcccagatccaaacgaaaaggcctccttttgcgcacttactaggcatttccctatgaacagagagcctgttctagaacatccctggaacactttcgagcccccgttgtgtctcgtacttcctcaaatttttgtagatcctaaacttgttcatggttggtccatctccaatggaatatcatctaggatcaaatttggagcttttattgctccataatctcctcctatgagttagcttcatttcgacgagtctgtctaggcatgatttctgtacaaaagaagaaaattcaagcaatcagccaccctaaccacctaacatagaaagggagctgggggtcctcccccgtgaactacttggagagatcctaactagactaactatccagaaacaagaactcctaagagtcattcattctaaatatgaagtcatgaacgataaagaacaaaagcataatagagattaatgtaaagcccaaaactagaaggattttggatgtggggaaaattctgctagcatgtttgctacaaaatgcttgatttcaagaaattctaaattcaaaaaataaaatggtttgtagtgcctaaatctatctatgatgacaatcacacaaataaaaaactctaatcgcatccttattcagaacatgccaaacttataacagcaaacccaaaaacacagtttagagatgaagaaaccacgtacctagtatcgaaagcagagatgtcagggtaatcatcgctgggtctggttgaggaagttcaattagcaaatcaatttctgtgatgaaatccaagtttgcaatttctcctactgtaaaagtcttgattggtgggggcttatgatgtgggaattctcatgcctttatcctcaacaacagacgaaggtaaaagtctatggcatgttccaggttgaagaagacgactgggttctaaattcagatttcaaccttaagggatgcaaagaagattataaactttgaagggtaaaaatttgaaaacaagagaaaagtggtaacttgatttcacaaaaggtatttatacatagaaagagcaatccacgcaaaagaagacagatggtctgtgatcgaatctccagattcataagtttcatgcaacggccaaggagttccacaatccacacatatctccacaatcaatgttccccaagatcgaggcataaattaatgatgaagatgctacttttcaatatttgcaccaaaaaatgaatagctattgaaatgtagttgtttttggaaagcgactcctcaatagttgcaccgctcgaccactatgagattgacacgtggatgtattacgatcaaagacaaaattcaccttccgtgatcgagtaacacctagaaattcatgaatttatccctcaacctccacatgtccatattgaaggagtgaagcaagcttccaccatacgcaacattttgaaagcttggtggtaaatgttattcacacttccagtagtggacacatggaatccaggtcagcatccaaggcccatgagtgggtccctcaaggaagataaagtaggccaagcccatttaaacgagtccttccagaaacgtatcccagctctgtgatcatagagccatccaccattggagaatcgttcccagaaacaagtttgggaccatgagaccataggggtgagacaacttgttcatgaaagactcttccattttccctttttagtcttgcgcacaaataaggaaatcatagctaccaaatctcgactaagaatcgtattagattaaatgggaaaacttattgaaatgaatatcaagcaattaattcacagttgattgcccacaattaaagcacatggtaattgtgggcaattaatcgtgaattaattgcttaatttctattttaggaagttttaccatttagcatgatacaatcttttgtcgtgatttgggaagtaatttttttcttatctgtgcgcaagaataaaaaggaaatctggactagtcttcatggaacacactgtctaatccttctggcattatggtacagttcctccttccagactggactattactaacaaaaggtacgttattcgatcacggagctgaagtacgttcctagaaggtcttacgaaagtgggtctggcccaccttatcttcattagggacctactgttagacctttgatgttgatttggattccacgtttcctttgtgggaaatttggataacaggagcttttctggattgttaatgatttagttaaattggtataaatgaagaactagtctactttgttgagctcatatcatacacttgcagaatagaacaatatgttcatgttcattgttcaggatcacattcatttgagaaagagaaagtgaaagagaaagagaaacactcactcgatttgatttgagattgagagaggatctaaaaagtaagcacagaggccactagagcagatcagagcacccaactcaatcaatttaaggcttttaaattcaatttagggtagaaaaggaatttaggaatttgaattcaatttagagtcactatccacatgcagttccaaaacagtattacacatcaccgataacatggaaagtcaattgacgagttgttaaggttgctggtaggcattttcaaattcaagaaaagagaaccatagccaacatgaaataagaagatacaaccagagagaaattaaagagtatcaaaactattataagaattgcccaaacagaaactaaaaataatgtaaatatacttacagatttgaaggacagacagtgccgaagagggagggacgtcggggctgaaatagagagagagtggaagtgaactagtgctgaaagttagggatttcaagtttcccaatttactattgccagtgctttaaaaaaaatacttttaccagtagtgttggtgaaaagtgttggtataagttgtaacaggaacttggtgaaaaaccattgccaatacattttaacactggtgaaaattttaataataaaaatttatatttttttgataaatttattttaaaatttttccattaaaatataaatcataatatttattttaataattttaaataaatatattccaaaattattttattttgttaatattatgtgaaaaattaaaatattattcattcttataatactaataatataaaagattacaaaatttaaaaaaaatccaaaaaaataatatttatataaaactatgatttttttaccaacgcagttcgtgtaatgcgctggtaaaagtgattagtgtattacactattacgttggcaaaatagtaacttttactaatacaattttacgctggtaaaaaagtgtcaaggggaagagttttatatagcttattatgccagcacaaatatgagacgctgctggtaaaagtatgattttttttactagtacagttcacaagatgcgtcgataatgtcagtacattaacaaattgcgctgaccaaagtaatattttttatagtgtatagacaattaatttggcagttggctaataaaaatagataaaaattattagatgttaacgagaatgcaaattttagaaattttgttgttaaaatttaaattttagaagttaattgctaaaaaagtaaaagtgttaggaattatgcaataatttactctggtataaacacatgtattcagtgacgatcttagattttacttttttatttttgaaacatcttagatttttattttgtgggggcttatttatcataaaaaatatttataattacattataattactcttattaaatttatctaattttatgggggcttttctattgttttggtctataattattaaattaaaaaatttacatctaattttttaaaaaataatatttttattagtgatcgatggctataatccttattaatgggtccatccttcatgtatcaatcactaggatattattaaactaagccaccaaagtacatggaaaatggaaaaagaaataataataatttaaaaaattcatgattatcaacaagagatgggaccattaattaagcactaactagctaccaatagctacttggagtgtaaataaaatacatcataataatgaaaataaaaaagacaattaaattataaatttaggggatgatatatatatcgatgatgatgatgatattgaggtttgaccgaagaccaaaaaaccaaaatggtctcgttaagtaataatattatagatagtggagtagtctttttcttgtacatgtaatgttatgtgattttcatcaaaaatgtaatgttatgtgatgaattaataatgatgaacgtgttgtgacacaagaggaccatgcagaatcccattatcgatacgcagttcaaattttataaatttcattgggactcaaaaacgtacgcaaatgtccctactttaactttttttttttgactgatatgtttcaactttattgttaaagttgattagcccttggatttctggtgggattttgatgcacattattttgtctctttaatcaattataaagataataatgtatcaatgcggcaataagtttcgtcctacaactacattggccagaacacattgcaagaccatgaaggaattattatgatgccaattggtaacaatgacaaataataataataataataataaaaattaattaaaggagaaatttgtgacaaaagtcaaccaaataattttatttgatgcacattaatctttaacattttcaaatagtaacaataatacttaagttctacttttttattagtcatttcacttaaaaaaaatggtcaatctcagcgagtttgtgtgtgttcgctgggatacacctacaaattaaaaaaaaaaatttcaaacataacaataacggcggtgatagtgtatttcctgctattattgagattttttttttaaactgaatattttacaaataaaggccgatcagagagggcctgccgtgattggtcccttattaaaataaaattttatactgagatttatcaatcacggcggccgcaaagggccctccaagattggtgccttatttttgaaagtttagggccgagatttgtaccaatcacacgttgggccaatataggcatgccgagattgctcgcctaaaattttaaaaccttaacaattaaccagccaactcgcccagccattcttcttcttccccaattttttttcggtcacttctctaaacttctgaaaatggcagccactattgagtctgaaaattcctcaaccaattcttggttttcttttgctctctttcatcacaatcacactaagaagcaaatattgaatttaaatatatactattgatttatatattttaatatctttaccctaatagtttttaatttattttagtaaaactagcttgtatttaaaggtttcaggtttgaatttgtttgagacactacaaaaaactgctacttttagtgacaacttttagttacaacatacttttttcgtgactaaatgtgacttttagtcacaacaaaatattacttgtgacta

SEQ ID NO: 14478 - DNA, 7658 bp, Cannabis sativa
cctttttgtaaaacttttacccataacacagttctagtgctgttatgatgtttatttttagtattttattttagtgaagtttttaatattatctcatattttaattattaattattttattagtactaaactagttcataaaattacacacgtggtgtccctataggatagggcattacacttatcatctttcatgcagtctgccattccatggccataaccatcgcaagctttacattttataggaagtcagtcataatccacaccctgatcaaccaattgcccattctcattgagaaattgaatgattcgaggtggagaatcagcaaactccatttccactaatactcttggaaatctcaccattgatctctcttttgtaactttatccaccattatcggtttcctaattgtgctaactacaacactcaagttcttgttctctcaatattacaaccatagatcttgtaatctgatccacaaaggaattgatcttaccaatctaagcgcatccagatcagttgaccaaggcccaacaatcactggcttacgatcaaattgaataactccttcctcaagtacaagatccctagtcacatcatcatagaatttcacaatcgtgaaactagtattcatcctaacaatttgagttattcccactttcccccaaactcttttaatgaagcctggggattcgccccaagcaccatacaaacaacaacagaactccagttagttgtttgaatcttaacttcctcaacatcggcttttggaattttcttctaatcctgtagtttaggctccataaatgctagtttaggttcatcatacgagatcttaccaccagtaaatttcttccactgttgttgagaattggcctgaaaatcctcttgttcgacctcctcagcctaggtcttagagttctctctcctcgcttcgcaaaaccgcttccctcataatcgagtgttgtttcatgtttcttgtagacgatatcccctgatttatcgcttcagctataagatcaagttctttagcaaatcgatcttcatcacagtcactaccatggattgaagggagttctgatattaactggctttcgaacaatttgcttcttcactgtggaagagagagaaaaaagtcatgcacacattttttagttctctcttcattattttattattgctaaaatgtatggtatatattgtagttctttctctccttcattatcctattatcctacaagagcttgtagatgtatagtaaagtcactcaattcatatgtgcatttttttttttcattatttgtttttccttcatcgcaatctctttttaatgtcttttgtttgtttaattattggttttaatgtgtcaaacagacatgaaatgacaatgagcaaagaactaacatcaatggctttcctttttagacaactaaatacataaaacagtgtcagccaaaagtagctctcctactgagctaggaaaagcttgtattaaaaccgaaaaataaagatactaatacacgagaaaaccaagtccaattaggaaaactattatcatagaatatgcagcagatgatattgtgatcgatgttggaattcgtcccttatccttccttattaccatcccttctattatggggtagcttatagccaagatatagatagacaataaaacttgtagaaacatcttgtccaaatttccaacaaggatagctctagtgattcccacaataagagaaactgtgtttaagataacaataacaaccaacggaacaagaaacatagctgatgttctgaaatcgaattttccatttcggtatagttcaactgtttcatcatcatcaactttgtttgtgggcaagaaactggcttctctcataccaattctcttcatgaaagcatccaagctcccatagagatgagatgtgattgattttatcatccataaccttagctcgtttatcactgaccgaagtgagccaccagtaatgaagacctcataagaaaattgaacaaatgaggaggcaaagatgaaaagaaatacgatgaaaaatgagtttgaagcctgttagagaagagtgaatttattgttagggaaattctgtagtgatttagatattactatttcaaaaatgattggtgtatttgatattacctcagggtacataggaatgccacttagcaagcagagttgaggaacagtagcaaagcaccacaaaggtaagaagtagagtgggaataatgagagatatccatagctcattttctcaagaaaggacatttttgagggaccataaacaaaagggcaaaactttgagataccgacttcgaccaaccctgaactccatcttatcccttgagtcaacagatcattcaaatttgttacaccagagcccaaaaactgtggtgttgatgagctcaagtagactgaagtccagcctttggattgtaaagtgaagccggtcaagtaatcttctgctactgaataatgcagaaacccaatctgtggatcccattgcaaagagaagaaattaataagttgtaaatatttttgatggaataagttgttgtaaattattatgaataagaagatttaaaaatgaaatgaaccaaggttagcttacatcttgaccccattttgtttcacttccataggtgcaagaagccaagaatttggactcttatagcaatgtattagaagagtctctaatcttggctgtattaggcttcttttgattaaaaagagatttaatgaactcattggacgacccaaaataccttttcagttccattggatcagcacctgtttattaaaacacacaacaagtttacgatactattttttggtaagacatacatatgttgctagataacaaatggtaatgttgtcatataataaagaagtaatttatcaacgccttaccttcttgcacataatttccatataaggacaccctttttatgaaaaaacctgtaccagacaatacaggtccatccaatccatccataccttgccatcgcaactaaaaaatgccaaagggaattagggccaattaacaataattgagctagctaatacaataacatgttttttctttgcttaccgaatatgtcaatcttaactgactgtcatagatatcattcctagaaatgttgtggaatctctgagggaactgaacaaaagctagggaagaagatatttttggatcaaggtgaaaacacattgcttgtcttgctgatgttggatcattgcaatacatgtcacagtcaagagcaagtatgtacggggaattgctaatcacaccggagactcgaagctgtggaaaaggataaaaacacaaattgtgatacagaatatgatcattcatttaacaggaaaaggataaaagaaaacgtacaagaacattgaacgctccagccttaaaatggtgaggatgagaaggccttttctctctagaaacataagcaagttgaggcaacatagctatttcttcttgttctgtgttgtcaatgggatttccttggataacctgatcataaaagatattagtaagaacaaatttgtctaatcccttccaaaagtgatatgacttatgaagataacgtcacattatttcgttaaaagaaaaaaaccaatatcgttcattgttttttttctaaagaaaatatggttactaagcaagttccaaaactagtagtaagaggaaagtacgtacctcaatgacagattggtgatctttgccagtgaagctactagtatcaacaaaggtctcttttattcctttaatgctttccttaaacacttggtatctttcctgtaacaaaatgttgcttaataccagcatagccattttctatttttcatagtaaaatttaatcaaagaaataaaaaagcttactttaagcttctcttgttctctcgtgaactcatcaaaacttcctgaatggctatcatcatccgctaatgacgagaaataagcatttggacatctgttctggattttaaacctcctgcaaaatggaatccaccactttgcaaacttccaagcctctctcattcctttcaatgttaccgcggaaccaccatcatcagaaagatacacatgaagcttgtcaggagggtagtccagtgccatggcagatataacagtgttcatcacctgcaaagttggctctctctctggatcagctgtgaaaacaaagacatctatagctggaagtttatcatcttctggcaatctctctggaaatacagaacgagaaacgggacgccaccttaaggcttggtctagaagccatataaggaagagaaacagctcagagagaaagagaagaaaccatggaagagatgatgtaattcctctggtctcagtgtcatttttgaggaagaaagaagccctgtaatagaacaagaataatactgctaatatatgaaggaaagattgtaatctgctaaagatgatagaagatttatggacatggcagacgtgaagaggttgatcagagtcctccattaatgggagtctaggtatgttctgtgattatgtactgatcaattatgtttatataaacactagatatttgtccttttcaaaaaaaaaaaaaacactagatatttgtgcatgaagtgattgacttgtcttccttataagtcaatgaagaaggtttcgttttgtccgtatatggaaacattagtcaaacaaagttggtcctacaattccaaagcatagccttgcctcccaagttctcttgaaaaaaagaaaaattgttgatattaatatgtttagacatttatttcgagtataaaattaagacaatattgcaataattctattgtcacagaattaataatatataagacaatttttttatatatataatatcttacagtttatacacaagttatcaacaaaactatgtttaactaatctacaaacatttagagagaatatactatatcatctacaaaattaaaatattatcggtaaggatttttcacctcaaagaaacccaattattcattatattatttttctttttaattgggttaccgtcatttccattttgacccttgtcagtcaagtaaacaaaaaacctattttctcacgtttttctccagcaaaatctacgcaaagtcgattgaatttgaacaagaaaaatcagctattttgaaccactttcgaaaacacacaccaagctcttgtttcatatgaattgaaatcaacatcagtgaaaacttaattatctctggttcaaagattgtacagacgtagaccaactatgggtttcatgtacatcaagcgttcaaaagattaaacaaaaatcaattgccaacagtaattgaattacattaagctaggataggaacatcctcaaagctgggtcttggcagacttggcacacagaatgttctcaatgagactgacattacagctactgtcaggactcagagcatttgctatgaaacttaatttaaagcccctaatctaacttgatggaaacaaattataagcctacaactgataaaatataatacattttataatctaattattcatttctctacaccacacatagttcatttgcaacagcatatatatatttgccattttatatgcatcaatattcatacagaataggcaataaaatttcaaacagagctacaagttcaccttcagcagcaaggtcgcatatgtaaccaacccggacgccccatatgctataaatcatgtcggcgccacgcctacattgtaaggcatttgacagttgacacccacaatgaaggcctgatgaaaaaagaagccagttgaggagaagctaatccttttaaacatttcttgaagctaattatactacatatagcttcagtcaagacaaatttcagtaaaactgcaaaaacaagcacaatagattaaacatattaaaaatgtacaaggctacaatttcttgaaagaaacaacaaatcacaatttttttttctttataaaagtagattctgtaatcacaaggaaaccaaaatggaagtatagcaagaaaacttatgattaaaagtgaaaataaatgataatatcatcttcattctttcacaagagctttcattctagtgcaagtgtattcctcataaatttcaaatttcaatccttaatatggctcatataaaacagaattttgttgggttgttatctctgaaaaaataatcaaaaaatccccattgaacagaacataatgtagccttaaaacaattatgggtctctaagataagctggtgaaaccaatgaagtactgaatgaatacatttaatcagcaacagccataaatgaaaaacaaagaccttcaatataagtccaaccagcattaaattagtaacaagttccactgtaaatatagttgataacaaactaataatttcctaagaaagatgaaaaatgaaagatacatataatatctatatttacagcacaaactaaatgaagaactctaagctaaatgtggaaaaagcctagcatcttacacaatagctactcctgactcttgcctacaagcactttggccttttcattcttctgctctaccatgtaattgtgaaccctttcagctttgagtctcatacccttgatcatctcctcacttgattcaattatctgttttggaagagcaatctccaaataatcaaaccactcttcaagagtcatattctccaaatctgactcctttccagattcaaccaacttctctatagaatcagaactacttcccctttttgacataagatcaatcacttccgcacattctggcaatttttccggtgaattcttctttctccttgtgccgccggccgcacgtgtagccttcttatttactaccttgacttgcccaccttctacttcagaattctctggaattttctcaagtactgaacaagagactgcaatattctcattcttggagctctgagtttgcctagttctcattttccgcagctgccccattttctcttccttatcttgctcctctttcaccttctcctcctcaaccacgctcttcaaaaccctaggtttcctcccccgccttggtttctcaaccacatccaccgcatctgcattctccactcccgaaccacattcctctttccttctccttcgcaaccttacctctcctaccctgatttgccccaccagccttctcctgaaggccacgcctagtgtttcgcctcaagcagctcccatcgtcaacttcaatcttgacggagatggaagtagattctccaatcttgatgcagtctccgtcgctgagatcgacaggaacgtcggggtcgatcaattcgtcgttgagaaaagagccgttggaggagccgaggtcttgaagtagccattttccaaattctgattggatggagaggtgcttggtggagatgcctgagtctttgatggtgaggttgttaccccgaacaacacgaccgactcgaatggttaatccgggacggtattctaaggtttctccggctcgaggacctttggttatttcaagtttgagagcaagaagaagaagaagaaaaactaaaatcagagggaaaccgtttccaacctccaattcgaatcggtttttgaattttgagccaacacaaagagagttctctgtttattttcttatttttta

SEQ ID NO: 14479 - DNA, 8961 bp, Cannabis sativa
  modified_base (4745)..(4760): a, c, t, g, unknown or other
atacttgtgagtagatctaagagcctggtaaaataatttccaatagtttgcactaagaaactgtgaaacatttttttctttaatgcaaaaattgtctgctgcaatcttctctttctcaatccattcagctgcccctggattagattgagccatattcttagcttctttatattgacccttaaacacctggtagtttatccccaaatctcctatttggtttttattgaagttcttaagcaaacgtttaggcctcagggttttaaattatataaaagtcagcccttcacccataatggccttattccaactagcaagaacaactttttttaagtcctcatgctctgcccagagattgaaaaatctaaaaggcttagttcctatatctcgaaccacctcaaaggccattatacacacacagtgattagatgcagccccattgaaacagagcaaaggagttaggatagagatcaagccactcctcattcttgaaagtatgatcaatgcaagagtagattctatcattcactccatggttatttgaccaggtaaatttagaacccacctttttcaactcttccaccagaccaagggaaagtaagttattgaaatcaataatttcagtagtcaatatagagttacctcctactctgtctccatacctgtaaacaacattgaagtctcccaacactatccaaggcttaacaggaaacttgagcctttcaagaccaacccaaagagtctttctctcttccaaagaattaaacccaaaaacaaaagttacacaaaaagcctctacatgccctaccattttgacaaaacagtgcacatacttattattttcttccaacacaatgaccttaacaaatcctttcctccatatcaacaagattctgccttcagtaactctactcgagtagtactcccaactagtaaacctgttggaaatcatctccccaatcttactacctctcatcttagtctctaagagagcccccacaccaacattctttaatctacaaatatcgaagacaacctcttgtttattacttttattgaggcctctaacattccagcacatgatattacatcaattcatggttcataatggagttagaatgagttcctttaactcctacctcctacccttgtaacacctcaaatagatttaaagagctagtgccagacaccactttctccacatcctccttctattttcccttggttctttgagtcctttttggtgtgagccaatccccagacttgctttgactctcatcatctatagtctcgaacacccctgccatgttagttgtagcagcttctttccctactttgttttcaccgtaccctatctcagcttcctatttatacccattctactttgttcaattccttgctacttcctagatcttttttatctccttgaggctttttgtcaaaccccttctttttcaccccctgctccttctcgttcttcctacagttcgcaccatgcccagacccatcacacttcttacattggataggaagccattcatagactacctcttactccatcagtcttccatgctcatttaaaaaggtatcactttaggtggagagtccatgatttctgtttccaccaacacccgcgcaaacttgaccatggacatttcattggtaactttgtcagccatgataggtttccctattgtgctaaccaaagcactcaagcacttgttttcccagtactggagccctaggtcaggtagtctgatccacaagggaactgacttgaaggcgaagagcatccagatcagtagtccaaggccttgttattactggttcatgatcaaattggttcacaccatgctccaggacatggtcttgtgttgattcttcctaaaacttgaccattgtatagcccccattcatcctaacaatttgagcaatctctaacttgccccacattctacgaataaagccttcatagactgaaaatggtagattagctccaaccaccatacatattactgtcgtactccaatttccagcatgaatcttcacttcttccacatcgatctgagcaatcttcatctcctctttgatcaaaggtttttcataggttagattaggttcacaaaaagagatcgtctcctctattaaactgcttccatttgtgttgagaattagtttgaaaatcctccttatctactttatccgtccaagttcgaggagattctgctccagctcaccaactaaatccaagttgccatcaattcgcgaatcactaacctgatcttcatcgacacactgtgtttctccagtgttcaacgcgtaagaaattagatccaatccttcagttaatccattcatagtttgtacctcatcccatgcttcatctttctcatccgatgctatttcaaattcttgcaaaaaacgaactggcttttgaattacctgctttttcttcgctatgggagagagcttcgaggaatcacgcacgcctctaacacttcaagactttttatttgttttacttaccatttttttatttgcaacaaaactctattatcatttataattgttacatgtataactctaatgtaaaataattatagcagcgataatacctttagttactatttcgtttttgttgccctcactaatttagactgttaatgttatgataaaatttattttaatttctaacatttttattattattttgatgttctctttctaattaattaaatagtatgttcttgttgaagcaataggtgtgaaggaaactctaagttggataaagaaaaaaaattagagagacatggttattaaaattgataatttggtggtcgttcaagcactttcaagttctctccaaatgtcctcttttttggtttgttaattagtgattgcaaagatttgttatcttcttttcataatgttcaaatttgttttgtttcacatgttttttctggtttttagactcttgtaatggctgtttaataaaagcatctcatagaaaaaatcttttgaacaacaaatcaagtaaggatttttatttctactctataaaataatatgtatacattattattattgaatatataaacttaaataagttttaaaaattattcataatatctctttaaaaaaatttcctcacattattttatgttaatttaaatatttgtttttattttatttaatttttttttaaatcatgtatgtatttttcttttcttaaagaaaattttatataattttttattttaatttttttgttatcatatttaaattataatatttttttatttaataggtatattttttaagaatataaattggaagaaaaaaattagaaaaatttagtacaattcttaaaataagatgttttaaatactttttactttttaggtgtaaataaaatttttctatttaatatgaagaataataatgtactcacatgtgtcttggcacttacaaacttagttggctcttaacactatatagaatattgctgaggcacccatggtacctaagatcatgatcaaatatcatttataattgacataggcatatagttgaaatggtagaactgaaagaaaacataggcatatagttgaaatgagattaactctccttgctcaagctaatatgcccttgaaattttaagttgaagcttttcaaacagctgtgtatcttatgaataggttacccacacctatcttgaatctaaaaacaccttttgaggcactgtttaaaagaaaacttgattatagtttcttgaaaattttcagttcaacttgttttccatgtattaggccctatcaaacacataagtttcaacttcactctttaaagtgtgttaacttaggatatagtgatcatcataaagattacaaatgcttaagttctaatggtagagtctacatatctaggaatgtcatttttaatgaaaaagagtttcctttcaaaaatggctttctaaacaactattctgcagaaaaaaaaaagctgttttataaacctcccaatggtctcaactgcctaacctacacaaccaaaatgttgtgcaaaacacacttgcaacaccagataaaaacagcaacactgctgcaacagaggcatcccttggaccaacactctccaatcactcacatgaggttagtgatcacattttggaagctgttgaacacactaagactgttagcaatactgatatggaacaggaagatatgcagtaggaagttgaacaagaacttcagcaggaacaacaacctgctcaaattcaatcacatcctatgattacccattcaaaggctgggatatttaagcctgaagtgtatgttggacacacagactagaatctaatggaagacgaaccaagaagagtggagcaagccttgaagtcaaaggtctggaatcgagcaatgcaaactgagatgagtgcacttaaagccaagaaaacttacatgcttgttcccaaattgccttactataacttggtgggaaataaatgggtctacagaataaaaagaaatgctgatggatctgtagaaaagttaaaagctcgtcttgtggaaaaaggttaccatcaaaggcctatgttattgtgttttgatcttctaagtttactttgttgtaattttagatttattcttagaaattatatttgttgtgcttgttatacccaaaaatggacctcgttaatcactctgagaagaataatttcatctccatcaaataataataataataannnnnnnnnnnnnnnnaataataataataataatggtaaaattaaaaatagttttgtaaattaatattttaaaaatatatatgtaaattgttttatattatttatttaaattattaataatttctttttttaaaaaaaaaaaatatatagactaatgtccagtaaggttggactagaaaggggtttctattgtgagatccaatatcatgtctattaatgttggactagaaatgtttttctagtctaattatgttggactagaaaaatattatttttatgtccctggatattatgtccaacacaaaggggactccaaaaacttatctagtcgagctttgatggacttaaaaggggttttttgtagtagtgacaactatccgagttattctcactattgctgtgagcgaaaattgggaagttagacacttggatataaacaacgctttcgtaaatagaacccttgaagaagaagtgtatatggtacaaccaccaggctttgaagacagcagcaaaccagattatgtatgcaagttaaacaagacattgtacggctcaaaacaagctcctcgagcttggtttgatagactaaaataaactctactgagctggaagttcactaattcaaaagcttatacatccttgttttctaaaataactgagcaaactgttatttttgtgctcatcttgttgatgacatttttgtaacaggcaatgacaccagtcagttaaatcagttcattgctgatctgaacagaaactttgctcttaaagatgaagggctgctgcattttttcttgggcaatgaagtgcactgtgacactacaggcgcatgtacctttctcagggaaaatatatcacagacctcttggaaagttcaacatgaccaatgtaaagccttgccccactccaatggtgtctggcaaacctttatccaaaactgatggtgaacaacttcaaaatccaacaatctatagaagcatgattggggctcttcaatatttatgccatgtcaggcccgatattgcttttgtcataaataaactcagccaatttctacaatctccaaccacaagccactggagtggagccaaacgagttctgaggtatctaaaaaggacaatccatcatggtcttcatatctgcccaagtgacagattagcaattgttggatattcagatgcttactgggcttgctgtccagatgatcgtcgatcaattacagggtattgtgtatactatggagaaacattagttgcctggtcttcaaagaaacaagttgttgtctcaagatctagcacagaatcttagtacagagcccttgctcatgttgcctccgagatagcctgggttgaatctctgttaaaagaaattagtttcgaactgccatgtactccaataacctggtgtgataatcaaggagcaagtgcttcggcttcaaatcctatttaccatgctcgaacaaagcatatcgaattagatgtacatttcatctgtgataaactgctgcagaataaacttgaaatcttttatgtgccatcctcaaatcagattggtgattgcttaacaaaaggtctttcacattcttgattcaggttccttattgacaaactcgggatgaagatgtcacccctttgtttgaggggtggtgttaagaacctgaattctactgttgtaccctcatgatagcagctatgcacctcacctcactcaatactctctcttcaacaaattgggaagattcgttctctatggaactgattcttcattgctttttgtgccttttctgttataatgaattattgcatttttatttgtattgccacctgtcaagttttgattgtgtgtttgtactctgctttggctatataatgaaaagtctgtactcagcatcctttgagctcagaaatacaattgtcctctttcttcactctcttatcagatcgagattcatatgttttgagtttgtgggaaactagtggtactcttcattttaatctgtgattatgtatcatgatagctgctaattaattgattcaaaatttgtgtacagtacaccacgtccacacttttgctaatacaagtttatagacgtttttgtttatcttaatataaaccatttattatcagttttctaatccagatgtatattgtattatataatattataaataaaattatggtatatatatatatgatatttttaaacaatattattttaaattttgatttatataaaaatattatatgtttatattcacagacaaattaataccaaacaaatataaaatataaaaatataacatatattcaatatcatatcaatatcatattatataacaaatatagagctttttgtgcttgatgcttagaccccacaagaggctttgaccttatatattgatattaaaaaatatacatatttcatatctatatcactatatatactaagagccgcaagcaataatggaaacctattatagtcgtgtttttgacatgttagttgtctctttgtattagggtgtttgttttccttaggaattttcgtttgtttggctgttgctatatatggtgtccagtagcgagttggtatgagatttggaatcacgttgggctgatattagtctggaaaaggaggacgaaggtggtctcttggattctgagattgtttcagatgtaccaaaagaattggttattgatacaaaatggtgtttggtgggaaaattgttaacaggtagggtctcaattttaatgcctttcagaatatgatgacatatccttggcaactaggaaaataatgtatgtcaaagagttagagcacaaacattatttgttccaattctatcacgaggctgatatacaaaggtagcccttggacctatgacaggaaaataattatttttgagcagtttcctgatgggattaatccacgaatggtagtgctgaatcagctggatatgtgggtgcctgtatgacttgcaatcgagatttatgactgagggaggggtgaaggaggtacggaaatatattagggagtttgttgatttagaccctaataattttattggttttaggggattacctacgtataagggttactattaatgtcaataagtcaattaagagacggatgaaaattcacaagaataattcgaattgattttgggtcaattcgaagtaagagaaattacccactttttattttatctacagtattataggtcattttgaatgattttctgtcaaatttttgagactcctttgcatttgatggcaaagccatatgggttgggatttctagctgttcattcaaatgaatttcacaatattagtgctcaatggttgagatcgggtgcagatacgcgataacagattggggagggtggctgacaaaaattagagggtgggagcctagtagagatcatggtaaaaggattatgattgacaatgcacaagattctgtgaggaaaaataggaggttaaatgaggaaataggtaatcgggggattggattggaattcaatgggttagaaagtcaattttttttaattgtgtttcaatagtggaccctaaacgtaaaaggagtgatatggttgaattgggcgagactaatggagttgatgtaggccaggcgaatgagaaagaagtggatcttgtgagaagaagttggtagtagaagagatggactaggatgacgtgagtttttcaaaagaacaagttattggtgggtactggtgtttaggccggctacaaattacgaatttattataatggaattttcgtggacattggagccaacgggctaaacaattcttaattaacctagtgtcttcaaataaagcaaatattttaattttgtgtgaaccattaggtggaagggatgtagtggatttggtgaagtttatgttaagctgtgtttttgtgttgaagcccaaggacatagtggtgggttggctcttgtgtggaagcacgaaaatgatgtcatttcacaagggttttctaagaaccatattgatgtttttgtgccactcattggtacaaatcagtggcgattaactgaaatctatggagaacttaggcccaagttgaggaggcagacttagggcttgtttcgtactgttagatattagatgtatattagctgtaaaagaattagatatttagtagatatttagtagatatttagtctcctagctttgtatataaatatgtattattct

SEQ ID NO: 14480 - DNA, 8989 bp, Cannabis sativa
  modified_base (4487)..(4490): a, c, t, g, unknown or other
aaaatttataacagtaataaatataccagcgggacccgctgctattaataattaataagcggcgcggtgtcagtccgctggtattaatgatgaatagcgacccttattaccagcggggtattccgccggtaataacttttaccagcggaatctcatatctttaccagcggactgttccgcccctaatgatggtatttgttgtagtgtctccaaactaccttatctccagtgtgttatttctgagactttacgattatacccagcaggtccactccttgtacctcactactcctcgaatgattgtaccatcagtagatacgatgttccacatggcactattttattagttaatgcatgggcaacacatagagatcctaagttatggaaagatgctgatagtttcatccccgaaaggtttgagaatatcaatagtgaaaataatgaaggatacaagctaatgccatttgggcttggaagacgggcttgtcctggaaaaagtttggcccaacgcatgatgggcttgacattggggtctttgatccagtgctttgattggaaaagaattgatgataatgaaattgacatggttgaaggtaaaggacttactatgcctaaagctgtaccattagaagccatgtgtaaaccacgtcccattatggaatttcttctttgacattcccataatatgttttttaaatttgttgaacgcttgaagcttttgtttataataaggtttttattattaagttaataagtacgtatgtattgttattattgtgttgctgaatttataacttttatggttattgtagagtttatttcaatatttgtaatatattgtgtttgcattaataaaaaacttatattggaaaattctgtacacacttaatagtatagatgtcacacacttaattggagtgcttgatatgaataattataaaatataaatcttatacctaagccaaataattaaggtggcatttattttctaaccttctatgtcacgaactatttatacattttatataaggtggcaataagttcaagtttcttggcatatacatacagttttagattaatcaaaaggctttttattgtaaaaaaaaattgtgaaagagaattagagacaacttgcatgtgagaaaaagtataagggtgcagtaattgatagttaaaattaagataatttgtattgtgtgactcttgtgaaggatatgtgagaattgatgtattgtgcttttgattcttagtggaagagcacaagatagtgttaaaaattagagctcaagtgcattgtgcttttccattgaagttcaatactttattctgataataactattggtattgtgctaaggaccgagttaggaactgacaggggaacaattaggagtatttatggtgctgatatgattctttactattttatttaagagcattacatatgttgtttgagttatttctcaaatcacagtataggaatcttaaaatgcatagcactacataatacattttgatagatttaatcgtaccaaacacaatatctattatatttttaaatatatatatatataaatatttacacaaaaattagccttgatgacgtgggcagcaatgtttgacacgtggcaagaaagaaaatatttacggagttgagtagtcccaataagtcatagcagtagacctaggaggggtccctggcccagcgcccaaattgactttagaaactccgaaataggattttggatcctaccaagttatttttaactcaccatccttcaatattctaaatcaagaagacaagaagaattcaatttcgagacctggaaactgaaaaagagacgaaacagcaactcggaagtcaacccaagggcctaggaattttacccaatgccatgttgatattcacaactaataaggtttcaatttttgggtctatcttagtaaaaatgtctttaactttatacatatacattaataagacatgtcacgaacatgttagaagcaccagaatcagaacacttcctgtttggagcaaccaagcaccctgtgcccgggccacctggtgatgcactcggtgccaagtttaacatattgacaacctgaggcgcttccaaccacagtactaaagatgtatccaaaatattttttttgtctccatccaaaatgagaaaataagtgctttcggaaaagaaacagattaacctggatgctaaaattaggacatagtgcccaggttgacctgttgttaatttgggccatttccagtagcattttagaaaaaaaaaaatctgggcatattctctgttttcattagcaattaagatatgggtactttcaggaaacaaacgaagtcatctgggagtcaaaacggacctagcgcctaggttgacatattgtcaacctggccatttccaaacatttctcctgagaagtcttcctaggtatattcttcgttttcaccaacaattgagatacaagtgtttccgggaattaaacggaagcatttagtgggcgaaattgggacctggtgcccaggttgacttgatgcctgcgccgccaagttgacattttgtcaacctaagtcaactccaagtattttcttcaaaaagtgtttagggaacctttttttttaaaaaaaaataatgaagatacaagtgatctcaaggagaaaacgagatccattgggggccaaaacagggccctagcgcccagattgacattggtgattggccttacgcccaagttgacacaaaacctagttatttggatgttttcgctccttaaaacctagtcaagtgcgatcgattttttcgcaaattacctaaaaacgatccaacgaacgtgatttaagctccgaaaatttacgattttcatccaaaatcaattttttccattaaataatgatcaagataatgcctagagtgatttattcatattttttatattattttaatagacctccttccctataaaaggagagctccactagctcattttttacatcctactaagttctcataaggtcaaataatctctctctactttatcttactagaaatctgagccctttcctaagtcaattttcttgaaattctcatgagaaataaaaaatcgaagtagtcgtagctctaccatcacgacatgggaagtaaacaattataaatttcgtgtgtctctctttacactacaagaaaaaaagacttttgcccgtgagttttctcgtcggcataagtatacatatgtcaccggtactatgttgtcggcgagctaatgtaatttgaataaatctaaaatttataatctacataaataattgtacaaaaatatattagtcattcagtgctacagaacattctagaaaaaatatattgattaagtttttagttttctaaatattttataaattatgaaaattggaatatgtttaatcttattcaacacttataaatcaagttcaataatcaagttgagtccctacctctcccaagttgttaaactttgtccaaaaagatgatcgtaagctctcaagttccgagttttaattatttagtccaatcctagatattactttcatctatgaccataaaatgactaaataattatcatcattgcattctatatttaaagccaaatccaattaaatatagcataactatatttaaagtttagagtttcgaaacctcacctaagtagtgcacaataacaatcggtggcaataaaaattggtgtaccaaaaacatcaccgaaaataagagtagtatatatcaaaacgaccatctcaacgagtagatcacactcccaaccatttatcaaaatgttacacggtgtcatcaaaagtcactaaaaaggagtggaacaacaaaaatattactgtaaaaagtagcatgttaggaaaaatgactctgtatagattgttctcctcgacaagttgagtctattggtgaagaacactcgtcaaacgaataccagagatgatcgaaaaatgcgttcaaagtttgaacctagggaatgagaaggtgccatttgaaggttgagatcagtgacaggtgggagtccaatcctccggtgtgtgtggtcgaacggtggtcaaaaaagtttcgtcgaagctctattgatggtagttatagtgattcactatcaaaaaaagactatttttagtgacaattttttagtcacaataaaaaaattgtgattaaatgtgacttttagtcataagaaaaaaattacttgtgactaaatataatttaaatacaagttattatcactaattttgttttagttacgataaatattgtgaataaaaacacatttaatcacaataaattataatttttgtgattaatatttttagccacggactttttagtcataacgtagaaaataataatttataattaattataatttttgtatagaaaaaaattttttgtagtgattccttgaaagctttgaagagagcgaagaaaaaaaaaagaaagagagagannnngagagagagagagagagactgagagagagtgtccgggaaagagaaaaagagaaggggaaaaaaaggttaatgttatggagtgggtcctactccatttttatttcaaaaatataaaactgttcaaccaaataagtttcatgattatctatatgctcggaatttaatatgatctaacattaaacaataatcataaaattagatacataaccaagtcaaaataaatttttattttctttattaataataaaaggtcacaatgaattgaaattttaaattgggcataaactttacacgaaggaaagcaggaaaaactcaataagtggcaaaatacactaattaaggttccttgtatgtcaagtaaatcagtttagtggtaattctgttactatgcgcttgctaagtctatcctagtgctcgagtcgaagacttctttgattcttggtctgaaaggcactaaatataattgcttacgaaagtaaaacccatgatgtttatggtaggtgcatgtgttaaggattcacaatcacaagagcattataattggaattttgcttggaccaaacttcctctgccttgtagtattctacctatgctaaccatctctttttctttgaccaaatacttaaaccattatcattattctcttattacttgattttcacccgtgatttggtttgcaactagttctaatttaaatcactataattttttattaaaatcaagtttagggtaatattttaattactgtgcaaaaaaaaaaaaaaatcgatgtcacctaacattgcagtaaaacatgatgtataattgtgtattcaacaaaagtgacattttctttaaaatataacataaaatatatgcactgattttacaggttatagccaggcttagtactctaaaaaaaaaaccaacagagagttgaacccaactttatataattacacaaaaaaacttatataataatctgattctacgaaaaagattataaaaaagatacattagtatttcattcacacaagaaagaaagaaaaaaaaacaaggccaaacataaaaaatgagcagcttattatattattcatagactatagaaagaaaccttgaaatgatgatgatgaatttcatgatttgtcattgtgattaattcatcaaacctttcttttgtgttctggcctgtgagtaaactcgaaatcgatatgaacaaaagctcgttctacctcggggagttgttcgagcttctcttgcaggttctcaccaatgttatgagcctcaatcagaatcatgtcttctgggaggacaatatcaacctctacaaagtaatgagaaccaaatgtgtaagctctaaccgtgtcgatatgcttaattgctttgtggtgattccatatcagatatgttagctttgctagaaaatctggtggagctgttcttccaatcagtgaccaaacattctcaatcactgttcttgcccatgtgttcattgtgtataatgctatctaaaaatcacattataaaaatggtgaaattcacttctacaacatatgaaacataacacaaaacagaggaaaaagtttctcacaatgagagcaccggtaggatcaatccaccaggcatatcggacggctaggacagctgctgctaaaccaactgaattagtaacaacatcgaagaaatgatcttgtgcataggcttgaactatttcatttttaaatcttctacagtaaagcattaagaaaaacttcactattgtcactgaaaccatgatcccaatcatccatttctcttccacaatattcatttgagttgcagactgtgctcaaaaaagggtattaattagtacattaacaaaaacaataaagttcacaattttgtctaattaaactatgcactaatttgacatacttttgtgaccagatgcctaatggactcaagcaatatttgtaagccaagagttgccattacagatgcaaaaacaatgatgccctgcatatttgatgagttgaattagaacagagttgtgaataaaacaaagttagaagaagaagtggagactataccactggttgcatacgattctttccaatgggatagttataatgatttgggtttttcatggaataggcagtgaaccacagtataaagcctgataagagatccaataatgaatccagagttgaggcaatcacagctagtgatttgctctctattgaagcataaacttttgctgcaaaaagaactaagttagctatgtttgatgcattgactgccaacctctcactctttgctaattgctttacttcatcctgaaaccaaccataaataaaaaacatgacattgtttcagtaacagtatttatttaaaaaaaagactcatcatatgattatgtaactacatgtgtagtacttgtgtccattcctaatgacttgatcatctttattcctaactatatgtttagtttactgttgatataacaaacctcagttaggctctcagggaagcagccattttcagtcatggtctccatctcattgtagccttcaagaagtctttcttgctgtttatagtactctgcaactttgtattgtttccctaaaaataaatgcaaaatatgtacaaatttctttaataattcttggaaatcagattaatgctataagaggtactttattgtttacatatataaatgaatttaaataaaaacagcccttcatttgagatttgagtattttaggcacaagttgattttcttaaggtgatgacataaatcttattatgtcaaaagatgaaatcatatatcacaaatttctgtgtatctatttatagtgaaatgtctacagtaagttactttttgacatatatatatattttctaaaaagggttataaatatatgttcaatatatatatatatatatatatatgtatttatagtaaaaaaaaattaacagtgcaaagtttactattattagcagctgactgatacatttaaatataatttcacaatgtagaaatatgtattataaatgaatagacaaccccatatattaatttgaaaaatgaatgaaaatccacattggtatagatcgtgaaagccatgtcatcaaccagattaaatgtgtgcctactttccaaattgttagaataataattgagcaagaaaaacactaaaaaggaaactcatgaattaatatgatgatggagatgaagtaatctgtacgtatggatatgactaaaccactcaacttgcatcatattaattattcaaaattctccataccattatgatcagccactaaatcatcaaatcaattaataagatatatatgaatttatgaatatacgaagtgattaagccatcgataattaaaagctacatcgtaaagtcttacctaacacaacacaaattattttaaagatgaagccgaacagaaaagacagaacaaattttagtggacacactaagacaccacaaagaaaagaaaaatacaattaatgtaacaaaataaaaacaaagaatatccaaatgcccagaaaaaggtactaattaggatcagactccaaatcacaccatcaaatccagaactaacaaaaatatatatattatatataatacacaaaattacaaaagtagtaaataataataataacaatctgtcactacaagaaaatatttggtggatgatttttcctatgtttgcaatctgtgttcaatttctaaccctaaaaaagtccaaaaaagagaaaatctgaacaaaaatgtacgatatcgcgactaaaactaaaatgattaatttatgaaataaagaagaaatatatgaattacctggttggcaaagtaaacgacgtaaagcgaaggagcaacgtccgtcgttggcatggttggaaccgccatggtctgacggcaattggaagtcgctgagatcgagtctccaagaactgttttccggcgaaaaaccggcgacgtccacaggcggtgatggtgtgagaagtggctctcttctgttgcattcgtccagtaccgtcggcgacggagtgttattaccactcgtattctccataatcaatgctaatcaatatcttctctctatatatatgtgtatatgtatatatatatacacagtcagagtgaaactgaaaaggtgaaagagagaatggaagaagccaaagatatttatttttgagttttacaaaaaagaagctaaagtttttggttacgtgattatcgtgatatatttatttgacaacatatatatataaatatacattgcttgtttctattgggatttgtttttatttttaattatgacaaaacagttggtttatagggaaatattagtgatgaattttaatttattaaataatataaaaataattaattaattatgagacgttacatcagtatatattaaatattttagagaaatttacatgatatactaacttttgtcatttttttacaaaaatattgccagacggtattttttactttttcactgtattttttttataa

SEQ ID NO: 14481 - DNA, 7387 bp, Cannabis sativa
ttttggagcttccaagatgtcgttttgatgcttccaatgtcttaaaaattgaggacaaggtctcttacctttttttgaccatgccagatagaatgcctagagaaaattttttatttgaggacagaaaccagtgcaccatgttgattgtcaacctaggccctaggcctagcaccacctcaacctggatgttgggctcagttcttggccctttgggattctcattttctccccaagttcacttgtatctacattatttctgatgaaaaaaaaattcttggaacattttttttgaaagaatggctagaaatatgccatgttggtaaaatgttaacttgtgtaatgggtctagtttttggccaccagatgactctgtttcattctcaaaaataattgtatcttaatctttgatgaaaacagaaaatatgcccggaagacatttcagaaaaactccttggaaatggcctaggttgacaaagtgtcaacatgggcgttgggcccagcactaggttacctgggcgctgggtcccatatctgacccccaagtggcttcgtttaagcagtgtttcctcactttgtataaagacaaagaaaattcttgagatccttcttcggtatggttgttggaagtgccacaggttgataatatgttaacatgggtgctgggtgcctggggcacctggttctctgggtgcttaaaactgaaagtgctcagaatctgattctgatgcctcaaatatgttcatgagatgtctaattcttatctaagtgaaaattgtgggtcatttttattaagtcaatcccgaaagccaaaaccctaattgggttgtcaacttgggcattgtgtgaaaccctaagtgcctaagttggcttgtagggttctgattttgagtcctttcagtttctaggctttggacttggattcttcatctctttatggtacaaaatattgaaagatagtgagttcgaaacaacttggcgggatccaaacacccattctggagttcttaaagtaaacttaacaaggctagggacccctcctaggttgactgctacgacctaggacactaaactctgggatattttctttttcttgccacgtgtcaaacattgatgtccacgtcattaggactatttctcatgtaaacatcaccagtttcttgacttaaaaccaccaacacatcatcagaatcataaccaacagatgcaactttagcatcgcccctttcattacttttatctctctatagtttttcctttaattcattgcaatcatctctataatgaccctctttcttgaagtagtaacattgcttctcactcctggaacttgatttgtgttttgaccacctttgtcgtttttcccttacaagtagacttgaattcccttattttgagtctctagttttagatcttccttgaacaaacaagccttccccattgctgccagatttctcaatagatttcttctatattcaaggctgccttgaccttaaacattgtctaggtgtcttttccatagagtattgtatgtacaaaatgctcataagcttttggtaaagaactgagtaaatcttgatcttctttttttaattttgactgtaatattattgagatctaatatgatctgattgaattcatcaaaatgcttcctaagttccttggtttcatccatctccattgtatacagtttcttcttcaggtataacttgcaagagatatcttgaatgaattgctgccaatttattccataaccccaatgttgcatctttattagaaacttccctcaaaacatcatctcctaaacttaacaatattgcattatgcgccttgatctgcacctattttagtttcttcttatcatctgcaagagtggacaactcttcactgttaattgctttcgagattccttgatgcaccaagaaagcctttattttgattctccaaaagctaaaatcattggcacctgtaaacttgtcaacctcgaatcgaacataagccattcttgagtcgtttttggttctgttcttgttctatgaacctaaagctctcgtaccacttgttgtaagaatgaggtctataagatgcaaaaacaaagacaaaccaaacaagaatagttatgatagatttacaattggaatcaaacacataaaacaataattaattaactaaataaaagacagaattgaaagtaaaatgaacacaaatacattacaaggttccaacaagatgaatcacttcactttgcccaacatccccagccagaacaaacctaatggttgatatcttcattgattaaatggagagctataaagtggagtgtgttacaaagtgtaactgtacaaactaaattacactataaatctcacttgagagaagtcttctccttggaataacaatctctatttataaccctcctctctcatccactttctctatttattccattttttttatatttgtttgtattttaaagtattagaatatcatttcaatagaataattttttttttaatattttagaaaaaaaaaaactattctattttgaattgcaagatgtgaaaaaatttaaataattttttttatacattttaaatttaattatttttatttttatttttattcttatttctaattctatgttttcattgccaaccaaactccacctgaatgtttttaccatttggatggatggtggtggtgactgatgagttagtgcttttttacgtttaacacgtttattttttttcaccgtttctttaacctttcatttccttatcaaaatccaagcgagaatgagaaacgaattttaacaaggcaatggtaatgacacatggccattgtctttttcctgatggtagcaagaatctagtgggagtggggaccttttagatttaaagttaaagctcacgacagtagattgttgcagttctttgtaaatattgaacgtaaccaaaaaataattggatggaagattgttctttctgccatagaattggaacttgagctgtctgcacaaaaagtgatttagtatataacctcaccaattgcattcccttagttatttgtccacattcttaacgccatctctattaattaatctaagttttaccctaacttttggcaatttgtcactaatatatctatatttatgtatgtatgtaaaatgggaatatttgttcaggataagatggtcccaagagaaagtacacaaatacgtgacttatattacttaagtaaaccatatgatacattgagatttcaatcttcttattgggtaaagtcaaagaataaaacacacttatctaaataacaactaaaaaggtaaatctttaaatttcagggataataaaatatcccaatctatgcattgtaatgagcttaatcagcttgagatgatcaaaagaagctcctcggcagtccatgttaccaaacgaaggtgttttagatggctgaccaacttacctttctccattgatatgagcgttgatttacattcagctgcaaattttccaacaaaagaagattttttaactgaggcctaaacgatttgttctagcatatgttggatgtagaattgaacataagtatatggacatacctgaactcttggtaagatttagtaaagaaaatgatgcaagcactctttcctctacatctttatcgaaatccaaggatgctaccaactgtggcacaagaactgaccatgccatcgtctgcatattttcatttttgatcaaatgtagaaggtggcacatccatgaaactgtaataagactggctctggctaaacaagggattccattcattatacaatccgaaagggcagccagtaatctcttgtggccactcttgaacaagacagcagctgctttcctttgcaacttttctgctgcatcttcctcttctctctaaccagtttaaaaacacagaaaacaaaccattcattaaacatgtaaaactagggaaacactaaagagttgttctgataggcttacattttccggtctctgataagagctccctaaagtcgaacactcgtgaaaacctgcttgttctaagagccaactttcaattgaagcctcacccgtgtaagagaaccgcccacctagtactaggagagctttagctgattgctcttgaaccttttcatgacattcttgacaatccaaagctactagaattgcttcaattgcttcttctctgtagaagctgcatcttgaaagatcaccctgcacaaaactgctactccatgtgggaacaaccaaggtatgaaaatgaatataatttaaattactaaattgggtactcttgaaagttattcatggttgacaaatgtttgaaaattgtaacttttcatatatactgtgcaattgttttttttttttttgaatattattgtcttaaggacaaaaactttaccaggatatctagctgtaataatatcactgcaacaagcgggcgttcttcaagtggagccttttggagatgagcaaaaaatatgtgcatagtgttcaagcctccccaaccttctttcagtctgtctaagattgtatttatctgtgttcttctgcaaagatattcctcaactgattagaattggaaacagatggtagatgattctaaattacattaaaaatatgtcattacctattaaggcagagtaattccatcaataaagtaaaggttgatccacttggattcttgtgatattcaagtacaatgagttctagaacataatcaatgttcaaactgttagctaagtagtttcgacagcttccatcagctcgaatacaacacagtaagaaaacagcagcattgatcctctcaacagcatcccctctttcaaattttgataccaacaagcttaatccgcctaaagacacaacttgtctcgcattatctgagtttctgtcttcatcaaaacctgtaagaagttggtctagtaagtaaaatgcagccactagaggactgcattgtattgtgaagagagtctgtaactggtctccaaactctataacccgaaggactaatggaacccactctattgatatcatctgcttcgcctttggcttcaataggtaaagaagaacagctgcttttagaaacaggctgttgcttcttagatgtctcaagaagatttcaagctgtgcatcagaattcagtactatcaattgatttagctcgttcttcattacaagctctgctaaaaccgatatcactagttctaaaacttcatcatcatcagaagcgaacaacagctcaagcattccctcaataactggtactttggacaatgcagcttcaatgacaggatcgaaatttgaatccaaccaagctttggtaatgacacgaattgcaacttcacactcacttagactttttgaagagcaaatggaagcaatagctttgcttaaattgtttggaagataagtattttcctcctttttcctaacagagttagtctttgataaagaattcccacttagcaagcactctatttgcactgccatagtgttttggcaagaaatgaatctaaacttgtctggtttttgagtctctctccatgtttcagatttctgacttctttcaagttggcatgaagatcttcgactcgagtggtttccctataacattcagaaagcatattctcaaatccagttgatcttaagaaaaacgaaaaacttgtagaggaagacagagaactcacctgaagaaaactgccaatattgctgtagttatccttatctgcacactggttttcctcttcctctaaaccccccaaacccttcaaagctccatttcgattatcatcattcgttgattgacgctcagctaccgatccaaatacagcacgatatcttgtggtgacaatattgaaacagattagcaaaatattcaattgtacaacataagacatacaactatgttatgtttcagtacttacaagttgttaattgaggattgtgtactagaggaatccattgatcttcttgaagatttgttataaggtctttcaggcaaaggaactttaggaacagcaggggatttaagcccaactttaagccattttttgtagtaaaaagcaaactcaattgttcccttatccatatgttcattataaacctgactcaaagctttcattttcgtctccttatttccgtagtcaaaatttcttaaacaatcaagctctttggtataccaaaccttgagatgaagaagatgtgggagaaagaaatgttcccaaagatcaggagccaattgggttctggcaaaaaagggtgactcacagaaagctcgaagcaaatgcctagcagatgttcgatcatgtttctcaagcttataaacaatggccaagtagaactgagcacaagaagagagatgtgaattgggcagtccataactcaaaccattcctcgttttctttgtgttaagagtagcaacagtgctcaaaagctcaaccgcattccttacagtcttcatccttatttccttcttgttattccccttgtcttccattaacttatccacactctcaatacccaattccatgtttgagaaaatctcatcatccgaatccattttcctcctaatcaaacaagaaacacacttctcccgaacattttcccggaaagccacgtccttaatgtaccttcccacatagctactaagtacagaaatcacagctcgggaagcaacatcgtctacaataggttcatcttcatgtctcgaactctcagaaacagaggtcttggaattcgatctttccgagatagaaccgacccttttggacgaaaacaccgaagacccatttcccacaagagatttgtcaccgttataagtactgctactccttcttcttcgtcttcttcttatcattcgatcatggccaccattaccattaccatggcagatatacaggggaagaggcttattgggttcagtctcatcaagtggtgcaactctgtctctgttatgtcgtgttaattggagttgtcttctacttcctctttggaatctctcatcggcaagcaattctgataaggaggaagccataggtgagtagattgaggatggtgtttttggagcacagaaaaggaggaagtgattggaagaagcctcactaacattctgtcaaaaaaaaccaaaagataataacaaaaaagacagctacagaagaagaatgcactactagtgctagtaataatactttttctaaaaaaaataaataaatattattattattgttttataagagacgcacatataaagacaacttctttggattttaaccgcttttggggtatatagtttttttaaaaaatatttttttttttttagcaatatttctaccctcaatttctcgttacaatctcttaatcaattttcg

SEQ ID NO: 14482 - DNA, 9068 bp, Cannabis sativa
  modified_base (27)..(31): a, c, t, g, unknown or other
aaaatagattacattgaaatggagttnnnnntagggcataaaacctaacaaaccacacttcaaggcatggagatcaacccaattctagaggcagagtcatgtaaaaggtacaaccatgaagaagaggttgaaaaagtgcaacaagtattcgaagactgttgtggaagtctatcgactaatgaccttcagagaaagctggatgtaaagaagtgaaaggccaaggccaaaaaagctagaccccatggaaacgatctgaggaaccacctcaacgatcgtgttcgcagaagagaatcttctagcgataaaactcaacgtctcaagcgtaaagttgaggagttgataaagatcactgagaagatctctaggaagcaaagtggtgttgtgtctgatgctgaggaagaggacacagagccttttgtgaaaagaattattgatgcaccattgtcagagcattttaggatgccctagatggaactatatgaaggaagaacggacaccagggaccatctgtccaaatacaatcgcatcatgcaagtcaccaaggcaagtgatgatgttaaatatttgtgttttcattaacattaagcaagtctgtagaggactggtggaaaaggttgtctctgggatcgatcaacaactggaaagatttataggtgatgttctggaaacagtttatagcagcaaaggcttatgacttagaagctagctccctgactagagtcaagcaataacaaggagtaagcctgaagaaatacatccagcggatgatggatgtggctgccaagacaaaagtcactaatgatataaaaatggtagctttcacatcaagactcacaagcagatccttattatggggatatcttcagcgtacaagggcaaacactttaagtgaatttttggtacgagcttagggattcataaacctagaggatgcttatgcccaagcgtatggagtacttccggtaccatctgccgaagcaacaaatgcccaacctttgcaagtggtaaatccctacatctatcctccaccaactgcgcttaccactcttacagtgtgtggaccaaaacttccgtacaggcagctatacaagctagtttctccaggtacagagctacacaaactggataaagtgtcgctcccagacaaacaaaccaaaaagtggaagctccaaaatccaatgtgacctacctaaggagtaagaggagttcgaagggaccaaattggagtgagttcccaaaaaggtgtaagactcaagaattaagatacacagagtatacaagtctcattaatactcgagaaaatgtgtacaaggaaacatgtaatatggtgcattatagaaagcctccgccaatgttcaaaggcagaaagtataggcgagattcgaacaaaaggtgcgaataccatggtgatattggtcacacaaccaatgagtgcaactacttgaaagattaaatagaagagttggtatggaatgggaatttgaccaactgtgtgagaattcatgtcatttacccaagacaagcagtcgcacatggacaactctttgttctagggtagcagggagccataaaccctcctaagggagtgggcaacttccagcttcctagaatacaagatcccaatgcgcaagtccttttgggaacacaaactgctccagcagcaacagtggtagtggcccccaatcctagaaattcgtatcctccaaaaactgcattaccagccctagactgtcatgtatcaactatttcaggtggaccacatattgtcggaagcacgacatgtgcatttcccacatattgaccattggttattgaagctcagatagccaacaaaagagtatcctgaatcttagtggataatggaagctctgtgaacatcatcttcaaaggagccttccatgccattggtctagtagaagacaacttgttaccttatccgatttagttgcaaggtttaaatggagacacgttgatccccatgggaaagatacaactcccaatgactataatcgaagatgtctctggaagtaatggagtctcctctttcaaatacagcacctttgtggtggttgattatcctactgcttaaaacgccatcctaggaataccatttctgatggatttcggagtagtgacatcaatctggcatctatgcttaaaattccccagtgatacttggagcatagggactatcaagggagaacaaagaaacgagcagagttgctataatgtcttaagcaggactgtacttatggttagggaaggaaatttctctacgtcggaacatcttctcagggcacactggggtagtcctagaagatgagcttgatccacagatcagtgtggaacatgtcttagaaccaatggaggagatagaggaggtttgtattgatgatcaagatcctacaaaggtcatccaagtggggaagaacttacccccgatagtaaaagaatagattgtctccatagtcaaagtaaatagtgatgtgttagcctagagtcacgctgatataactggtattagtcccaaggctatttgccatgcattgaacatagatcccaatgttgaactagtttagtaaaagcgaagacctttagaccaagcaagatcagaggtggtaaaaataaaggtggataagttgacaaacatcgacttcctcaaggaagccttgtacccatatggcttgccaaccgagtgttggtcccaaagcctaacagaacatcgaggatctgtatagattttacatatttgaataaggcttatcccatagacttttcccccttcctcgaattgatcaaatggttgatactacttcgggatttatgttgttatcctttattgatgaaaactctggctacaatcaaataataatggatgtggttgactgggaacatactatcttctagacgaaaaaggaatttattgctacaaggtcatgccattcggtttgaagaatgacggggccatatatcagcgaatggtgaacaagatgttcaaaaatgtcctgggtaagaacatggaggtatatgtcgatgacatgttggtgaagtcggagacatctaaaagccattaccaagatctagaagaggcctttaccatcatccgagagtacggaatgaaatccaacccaaaaacgtgtacttttggagtctctttaggaaaaattttggggttcatagtcagctctcgagaaatcgaagcaaacccagaaaaaatcaaagcctttgtagatatgccctctcccaggaagcataaagatttttagaagttgataggaagaatagtagcacttagtaggtttgtctccaaatccacagacaagtgcataccattcttcaatatacttagaggaaataccaagttcgaatggacaatagaatgtgagatggccttccaacaactaaaggaacatttagtgaaggcccctatactatccaagctagttgacagagaaccgttgtttttgtacctgacagtgtccgatcatgacttaagtgccacactcgtgcgagaagaaggaaaggtacaacttccagtatattacgtaagcaagaggctgctgggcatggagtctagatatcaatgcttgaaaagctttcctactacctactaattgcttcctggaagttaagaccatactttcaggcccccgccataagggtactaaccaaccaccctcttcatcaagtgttgcaaaagccggagtcatgagggagactcttgaaatgggcaatggagttgagttagtttgacatacaataccaacctagagtgttgattaaaggtcaggtgttggccgacttcatagtagaatgcactaggattaatgacgaccctaaaactttaaccctggaagggaagtctgtagaatatatgttgatgaaccgttaaatgcaaaaggtgtaggtgtcaaaatcatactgatatccccacaacaactccagctttaaagcacatttcgtttcgaattcaaggcctccaacaatgaagttgagcacgaagccaggattactagtttactgttggcgagggaagttggtgctcaatacatagtactttacaaagactcatagcttctggtcaatcaagtgagtggagagtataagacaaaaggagagaagatggccgattacgtaactaaaactcgggaactattgtaacatttcaaacattactctgtgaggcaaatcactagggataaaaatttcttcactgacatgctggcaaaattggaaacaacacatctagtaactctgagcacagaaagattgggggtcttcgccattgaccatttaacctcctggatggcaccaatactctagtacttggaaacacgtgcactcctgaaggatagagctaactcaaggaaagtctagtaccaggccccaaggtatgtaatcatggatggaaggttataccgaagagggtcatcgatgccatacctccgatgcatagccagaatagaaaataagtgtcatgcatgatgtccatgaagggtttgtagagatcacaaggttaattctagcctaccatgaagaaggcttgcattgaatatgtccgtaggtgtgaacagtgccaacgttattcaaaagttccagagctcccccaacagagatatccctcgaaagcaatcctttgcctttcgcagtatggggaataaatatagtgggatcacttccaacgagcaaaggaggagtcaaatttgccattgtcgatgttgactactttactaagtgggtggaagccaagcccatgaatatagtaccttcccaaaaggccctgcactttgttatcaaatatatagtgtgcagatatggacttccacacaaaatagtttctgacaatggaaagtagtttgatagtgactatttcagtgatttttgtgccaagcatggaataatcaaaagcttttcggttgtggcctgacctcaagcaaatggataggtggaagtcgtcaataaaatcctaaagactactttgaaaaagaagcttcaggcctataaagcacactggcgagaagaactccccagggctcttttggcctatagaacaactgagagaacttttacgggccacactccatactccatgacttatggatgtgaggctgtcatcccagtcaaatccattgtatctatacataggagggatacctatgacctgatttagaaccatgctttactcccaaaatcttttgatttaatcaaggagctctaggaacagtctcaggtgcaactccaaatgtatcaaaacaaaatttctcaaaatttcaacagaaaggttaagagcacaaaatttgagattggtgaccttatttggagaagagtttccctgcttttgaagaactcagagtgggggtcttacgccaaaactaggaaggaccttatgaagtaactgacaaaattagtgatggaacatatcatatggagagactagatggaacaagaattctacgagcttggaacgctaactacctgcaccgatactatcactagactgggggtggtcaagttcctttttacatttttggtttgccattttattaatttccatgtacgcctcagggctggaactctttgaataaaaagataattttcatttcatatttggtcttttaaagttttatcatctaacaaatgatcaatagtctcaactactaatcacttgggggtagcacatatatgttattgtacaaaaattcatattcactttcctccaccaaaaaatagctaggttaaatactcaaatatatgagtaggaagtattgcctgaaaccggaacctcaaggaatcggaagtaagtcaatgccttattgtattttatgagtgtttaacacttaaccaaatgtgagaaaaggaagtgtgacaaaaccgaagccgcagggaacaggaagtaaatcattgccttggtagattaggaattaattattgaacattaaaatagttaatctatgctaatttaaaacaaggacccacgcctaatagttaatccaagttaacttagaacaaaggctcaggcctaatggttaatgcaggttaacaataccataatatccaagttatttaattgattaattcagagcaattaaaaagttaaggatgccgaaaaagggtaagttctcaaaaaaattaattagttcaagttaattaattattcaaagttttaaataaatccttctacaaaagcatttttcctcaaagagcatttaagtctgggtactttaaaagtaaaggttcaagctttcggaactagaacccttttaagactgaaaatgtcaaataattaacaaagtatatgatataaaaggtaaatatctaacgaagtcaacaaaaggtacggagtactaagaaaggcccacggcaagggcataaattgtctccgcatattcaaaaaggggaacccttgttccccaaattaaacaaaaataaaataaagaaagagtcgaaatagttaaggctgagcagagccatccagtactagagcatcttcagtttagccctccgggatcgcagactcggtgggaacaagaaccttagaggccgaaagagtagggttgtccatattctcatctgcaaggatggtggttcaaggattgaccatcctcgattactgaggtttgctcagtgacatgtcttctttctccagcgccagcagctgaggcaaaagttcctccctatcttcagcatctaagagatctaacatgactttgttatgcttcagagggtatatattgtgtgaacaaaagctttctccaaagctttaatataccgagcctcctgctcttgaagacgtcccctcaaagtggagctttcaccctctgggtcggtaattttctattcagactctttgcaagccttggtctctgctgccaatttgttattagcctcctgggctctgttaatggcctccttttcagcaaattctaccttctgctatagctcgagatgaaactgtaccttcttctccagagtaaattcattgatgaacttgtcttcgatgatctaggttttttttatcatactcttgagacaaagtggtgagttttctctccttctccttaacctaaaggttttcttgtcgtacgtcttccttagcctactgcacctcggcttctaattctttaacgcgagagagatccttggaatgaatatctttatatttgtctctacgttccctctccatggccttcttctcccaggatatagacttttccatagactcgaacaccctctaccttatggtagactcaatattggaattggcatcatctaaggccctctctgttccttttctcctttgttaagcattgccgtgtttggccttcaacacctccaaatcatatgccagctgggtgactagggaacaactcctctctgccatcagagcaatctacaaaagagggaacataaataagttaaaataatgtggaaacactaaaatgttatttgagtcagaatagggtcgaacttacaatattggcctgagccctcacgaagtcaatcacgtacatcgagtccctacttgccatcatggcaaattcatcaaaatcaagcttacaacttgtggtagcaccttgttctaatagatatgccaaaaatggtgacaaattagtccctacacgaggatggagtctctctgccagttcagccctattcatgatgggaggggccgtcttattccacttgtcataatcgacaaatttagtgttacgtctggaagagatgctggtagacaacttcctcatctccacctcacagctacgcctttgatagtagaatttatctactgcctccagtctggcttcctccccttccgtcaactgtgcaggtttgataggaagtgtgaaaggcgtaggaggcaacagaggcaactgagtcctttgcctggataattgggtcgaggtggctggaagcacttgaggtgctagggttgtaggggaaggtcttgcttgtccttaaacaaatgagtactttgccttggtggtcttccatcatcagaagaagttacccccttacgagatcaagaatcagtgacctacctcctcgaggctaccagctgttggactttctttttggcctccatctttgccttcttgtttgttccatcattagaaaggccagcccgcttcttagtgagtttgatgggcccatcataatcaaaattatcttccccaaaattcttctaagggagcttggtttagaggctccatgaacatggcaggcttggtaagatccacgatggcagtggatgacgtcttcgtgaccaaagcctttaaaacagcttctaggtttggtacttggggtgctggcttctgggctctacttctggaggcctagttatttctgcaaatattaccaccttgggcgatctccctaaccttgtcaaaacatgcctggacactacccaagaattttttcaaaagccccatctagagagtggccggttgatttgcataaagcacacaaagttgtcattaaaagaaatcataacaaaatgcatgaagtttacaacatataagcatgcaagacttcatgaaggttcaaaccattaatcctagcataattggcttttcccctagcaaacagagcgatgtcttctcgaactaaattggtttcgtattggaagaatctggggaagtatattttgctaagtgcatccactcagacatgatggtgcacgggagggataaagtggttaggactgtggacaatgcagtctaccctatctacgtatctattaaaagaatacttatgacgatctaaattcaagaagtatggatcaaattcacactgagtgaccatctcaaaatcagacacaatgggagccataattatacaaaaatgtgtctcaccactaccgaaagtgctcgctcccagagcacctttattgggcatcacattcttgaagcagatgaaaaaaattcttcagcctcactcaggcttgtaggaaatcattttctccagtcgtcaagccattgttcattagccttcactgcctgtaaagcctctttagtattaataactgcgatggcttccctaacctcttcagggtcccctttcaaagcctc

SEQ ID NO: 14483 - DNA, 5582 bp, Cannabis sativa
  modified_base (40)..(54): a, c, t, g, unknown or other
  modified_base (5545)..(5546): a, c, t, g, unknown or other
ttgaaaaatattttcacttttttacttttaaaaacagaannnnnnnnnnnnnnntgttaccaaacgccacctttattaatagaaattaattaaaataatagcttacaatttaattggaacacaatcaagattaaaattaaaacaatgagctgcctaattttgagtccgtttgataaaaaactaaaaaataaaattaaataaaaaaattgtatcatttaaccttaaaaacacttatattcagatttatctattgatcagaagacacaatatactattgtagcaagtttatttaatctcatagcttgagcagtcaattattgtataaggtacaaaactgcactactaattacaacacctttagtcgcagagaaattgttatttctaactatcaacatcaatttgatagcgaaccatcgaaaaacaaaaaaaaaaccaacaactaaataaaataaaattgtatcacgtagataagactaaaatacttaaaatcatatcacagagacaagactataaaattctcaaaactatatcacagaaacaagactactcacagtagcaaaaatcgaatcataatagtaaaacacaatctcagtcaagtcgcacctatacctaaaagaggttgataggcctaaccaaagataaaagacaacttctattacctataaatttagaaacgaaaaattttaattttttttaatatagttatcatatgtgttttattaattgtaatatatatttataagtaaaacaataaaaaaaaaatagctaagtgaattcataaatatatatatttaataatgattctcattaattctaatatttcacatattttaatatcatatttttatttaaatttatctttttcaactcaacttctgaatttgccacttacaaatttacgaaaatatgataatatatttcaatttattattatttgcataactaaattagctagtaaaaatccatgataattaaagccatcatttgaaaatattggtctttcaaggtttttctttttttggaagttcaagaatttcattttcattttttagcactttctttttaattggaaaattcatggaatatatattaacaacaaatgattattttcaatgtacatgttttaaacacttggattaagaaaattcaattatgaaattaattcatttgggattatcattactaggtgtgtgaattgtgatatagatttgttacttgacattcttcttcagttcttttatatataatatatattattttattataattttttaattaattttcgatcatgaaaatatatattaaaatatatatttttttaaaacggtgcagtataattacaacattatctataaaagttttttaaaaaatttaaatagtttttagtgtcaaaaataacattaaaaattttaaataggcgcagcaaataaaaatattaaaaaaatttatttttaatattgtaaattttaaacataaaaattaattacagattatttttagaataactaataaaaaatgaattaaagattttttgttttctgacaaaaataaaaaggtaaaagaaccttagtgaagtgaggacattgacgtcatattttcgattaagaaggtcatctccacgaaaatcctcagactatccatcaaatcacagaattatctctttctctattcttaaaaaaagaatttgaataaaaaagaattaaagaaaaaataaaagtgtgacaaggaaaacgacttctcccctaccatattcttataataataaataaatgttcataattttaattttttttttctatttgaatcgaattattaattttcataaactcaattgacaaattctctgtagtaatagttgatacacttgttacaaatacaatagttactaaattcacagacaaatcccagttccaccgctgcttcattcagctaaaattctattcaacactctttctcaattcttaaccaacggtaacttttctttttttcttttcttctttttttaaaaatatatataattccatttctgggttttcataattatattttgtctgatcgaacagtctgagttcagtttcacactttgatggtgttttgacacatgggtttttgttgtcatgttctaaattgagttgtaagaatatacaattctattatattacacacatgcatgcatgtattgttcttggaaagtagtgattttttgttttttacttatttggatcagttgagttgtgatttggtgtttttttgggagagaagagatcgaattgtgtgtgttgaagtttttgaagcatgcaccagaaactaataaatggctcctcaaatcacctggaatctgatgcaaatatttctagtactcaaaatttagggatcagtacaaatattggtaataattctcaaccttggtggggtaatggtataggtcatcaccaaaccatttctaaagccttgtttggaggaacaacaaccactatcactatgatgactttgtctccaccaaacactactttaaatgctgatttacccaaccaaaccaccaattcttcttctcaagctaatcaggttactgggtctgggtctaaaaatgaggcagatcataaagacttgctacaatcaggtatagaattactttgaagttttttttttcttacttgggattttccaaaatgagtgcatgtttgtgattaataatagttattttaagtgtgaatttagtgtgttgaagcacatattgcaaccttaattattgtaaattcggtattcagtataaatatatctatgctctaattaagctgtttagtgattatttactctcttcatgtgttataaacatgtctactggcttggctagatggaaaatatggagaggagcagcaagtttcttcggctgcgccgccaccgccgccgccaccaccggtgaatgagtatcttgtgccgcatacccagctggagctttccagccactcaattgtatctttttatcccttatttatgcatgttcatacacacaagaaattaaaagtctgaatttgtgaaaatatgatttggtgtaaacagggttgtggatcatacgcatattctgagccttattttgggggagttatgccatttggagctcatgctttggtatgttacaaatgtctttaattatagtttcttctttggaactgtgataaccttttaggttaaaattaggcttaaagacataaaaatcagtaaatgtttaggcacatggtttgatcaaggagtttgattgtacgatttggctagatgaaaagtattgagaaaaatgtagagcaacattgaatgtgacttatctatcatttgaatgaagtgttcaaagaaagtcttggatttggtaatgagtgactatatcaccataaatttggaatagccgacataaaacatgttgtaacaatttgtgtaggtacagtctcacgggcttggaatggctgcgtcgagaatggccttgccacttgacataacagaggaacctgtgtatgttaatgccaagcaataccatggaattttgaggcgtaggcagtcgcgtgctaaggctgagctcgaaaagaagcttataaaagttcgcaaggtagaattagactaaacaatgcttttgctatgataaaatttcctagtgtttggatcataatttcatattatacagccttatctccacgaatcgcgccatctacatgctatgaggagggcaagagggacgggaggccgttttctgaacacaaaaaagactaataataaaacggctcataacactgcacccgaaatgaacacaaccacttctagtgctgctgctgatgctgcaatttcaacagatccaatcatctcattgagcaccaaacccgtgtcatctgattcgtcttcagatcattatgagtcaaccgagcttagtatgcagaaaatgcaccaaaccaagacatatcatcccaatgtcaatagtaacagctgctaccaaccccatcaagggtttcagttatctgcataccattcgctttcgggtggtgatcataggatcgaggaaggagacttaatctcggggcagcatcgtgaacgaattatgacaaatgggacggctcatagggctcttaccatcaagtaaagttccccaagggaaaagggctcacttcagaatcaccaatgtggctcaggaaaaaaatgacattctttgctttgctggaatccatttgaggttgtggattttcaagttggtgtattctggttgtaaaaagtttttccaggcaaatcattcttggcttttaggcttaaaaatttgttgtttataaggagggaggtaaaggaggagagaacttgattagtctttgttgcttataaatatgtagtcttgtatcaaatttctcttattgcttcccttccaaacttataagtgattaacaatgtgaatttaatggactccaataagataatgagaattaggctgtgtgttccttcctttttgtataaattgttttctcttctttatttatttattttttttgggttattattattcctttttctttgtttgtaaaaaagttgtagctatgggatatcatcttaaaatagataagagttgtcttagatataagtgttcaacctacactctctatttccattagtatgagattttttggaagagtacttttttttggaagagtacttaaaacaaaactatgagggtctaaatctaaatactaatgtaggagtcaaaataaggtagcgacctaacaaggtggaaaaatagtgcccataaagtagtatcaaagccaaaggtttaggagtactgagatagatgactgtatttacgatgtgtgtgataattcctcaatgtgatgacctcgcgattgaagatctatatgatgccttatatcgaaaatctacttaatattgaggtagtcaggtggtgtgtcccgttgatgattactgtggtacaagatagagattaatgttgacctgtgtcgaaagtcctcctgtcaaaagtgatggtcaggctgcgagttttgttggtgatagcggcggcataaggtggtttcgctggagaagaaatcacgagtatctggtccttggtttgaggggaggattgttggggtatcaactaaagtctcacattaaagtatagagaagagttattttggatataagtattttacctactccattaggatatgagtctttctaagaaagtgtccaaaaacaaaatcatgagagtctaaactcaaaacaaataatatcataaaacatgattacaacttgactcaacattctaacttacattttaagtaatgattagaatactgttaaatactttataaaacatgattaattcaaatagagtactacaatactcacacatagtggcataaaaaagaaaaaataaacaacatataaatttttttcatcttatttggaatgatctttttacttatttgaaatagaatagtttttttctttaattgtcttgaaatagaatagtcatttattttgataattttttttttatttttacactttaaaatatatatatatnnataaatatatatttatatatggaagagatttcaatg

SEQ ID NO: 14484 - DNA, 5746 bp, Cannabis sativa
ttcgtgaggagagaacccatgtcgtttttgaggcagagaaaggggaaaggtcccaacccagagcttaaaaataatgatttaaatgaagatagcgagaaggagagagagaacaaggagagaaagctgagagaaatcgagaggaggagaaggaagtggtcgtgtatcgatggttgttgctggtttattggctgtatatgttcgacttggtggtttttgctgtttttgtacaatacaatgccggcttcgttccctcagtacgtgaccgaagcgattaccggtccgttacctgacccacctggcgtgaagttgcggaaagagggtttgagtgccaaacatccggtcgtgtttgttcccggtatcgtcaccggcggcctcgaattgtgggaggggcatcggtgtgctgatgacttgtttaggaagaggttgtggggcggcacgtttggggaattgtataaaaggtaatgcaaaaatttactttttgggtttgatttggtatggagtttcctttttttgctgtgttctgttttgtatgatgtatgtagtgaatttgctgttgtggcttttgatttgttggatgaaattttcaacttttgaatgagtgtgacgtgaggggagtaggagtggtactgaagtgctaaagctgacaatttctgcttttgcaatgtaaagctatgagggtgagaggtttcttaaagcttaagaatctttaggggaaattgttttggtaaagcttaaaatattcattacaattagatctaatgttgttttagttcttctggaaaggatttcttgaatttattacttgctctgcattgcttctgtctgaaggaaagtgctatcccagtagtattttattcacattgtccttgtactattgtgaaaacttatagctgattgtcatgtgataattgaaaatgttatgcaataattttctttttccttatgtaactggtatgtcaaataatcatgattcatgagacattatctaaaattcacgtggaggcttatagaagagttagctcatgtattaagggcttgctcaaaatcttaatgacggttttatgcaaattctagaaacttatgcaccgatgtaactttcttaaaagctctatcctttatggtttttatttctaagataagaataggttagataagatttaagattcagctggacggattatgtataaccaggatccttgttttgaaacttcaataccccctggccagttcagatgctacacttgtgtcttcttctacaaccatagtacttgatttagtctaggatgtaacaacaccttttgaagccattaattcaactaaacttttgtaaaacatgattgtatctaatatatcaattacgttctatccaagggtccatggctagtcatcttatcagctgaattctgttaacaattataggcgtgtgctgaatatttctgattcttactccttaagttggatcaaacaccagctgtcagcttgtggattcctgtctttccagccatgtcattcttacttgttataggtatgcactgctttctttagatgtacgggttaatcgtacccgcccacgtatattttgttgctggacgatgttcatttcataaataaaaggtggtttaaacaagtatttagaatgcatttaggtgctgcatctcatactaagtgtcataattcaaattataatgtttgatcaagcggcacttcctttttgctctttaaatttttctggagaaaatattaaaacagctgggaagaaagggaactacgaaaatgtatcatgtcttttgcacgacttgtccaatgttatattttcttcatgttgtaactttgtcaggttgttttagtttccaaatctctctgtttttcttactgttttccagaagtaattaggtggattgatttctatgggtggattatttttatttttacagaccattatgctgggctgagcatatgtctctggataatgaaactggaatggaccagtcaggcgtaagggtaagacctgtatctggacttgtggcagctgattactttgcaccaggttattttgtctgggcagttttaattgctaacttggctcggattggatatgaagaaaaaaccatgtatatggctgcatatgattggagattatcatttcaaaacactgaggtattgttaagtcagtcattggttttcttgaagattccctcaggaggctcatttgaaagaatgtactgtctttgtttttgttgttctttttttgcagtatgtatctttcagccctaaaatgagctactctgattgatttgattaggtaagggaccaaactttaagcaggataaagagcaatattgaactgatggttactacaaatggtgggaaaaaggttgtagttattcctcattcaatgggtgttctttactttctgcatttcatgaagtgggtcgaggcaccagcaccaatgggaggtgggggtggatcagattggtgtgcaaagcatatcaaagctgtaatgaacattggaggaccattcttaggtgttccaaaagcagtctcagggcttttctccattgaagcaaaggatattgctgttgccaggttttgctcttgacctatgctgtgtaataggatgatattaggccattttctcgttattattatatctttcactcttagaattacagtatagctgaatacagtttgtgcggtaattggtacgctttcagttaataacagtatgccaataaaaatagtttttatgtttaaacagagttgagtttacctggacactttattttttatggttatccttatccatgtcgtgtttgatggattagtatcactttcagtcttaaagttggaaggaagaaaatatcgtaagacccaacagtttttattccatgcaaaatacctagcataaaatttagaataatctattgcatacatctggtagagaagtttaattctaattttgaaataaaaaaagcttttcactccataagccttttggtgtattacatgatactatcatttgtgtggtttctgttacattcattggtaaatctttcatcctttgcattgaaatcaatctactgtacaaattgaaaacattccatcttataacctttttacctctacaaacggatggatttttatatatttattaaacttttaaaaatcaaaattagtttccaagaagcatgtcactttctgttggggcgtttgatgaactgttattctctaataatacagggccttcgcaccaggtgttttagataaggatgtttttggtcttcagactttacaacacatgatgcggatgacccgcacatgggatgcaacaatgtcaatgatacccaaaggaggtgagactatatggggtggccttgatcggtcacctgaaggattttatgattgtactgcaaagaagctgaagaacaacggcacactagcaaacggccaaaatggagcaataaataagggttcaactaagggagtgaattatgggagaatgatatcatttgggaaagatatagctgcagtacattcttctgagattgagaggatcgattatagggtactttctgactttggcacttcattttctaataaattgacagttcttctgttagtaaaaagttccttatgagtctgtgacacagttggttatagacataattgcaattggacctatgttagtttatttttgtacttaaatggttaattgtcagggcgctgaaaagggtaataaccttgtgaacacgacaaaatgtgatgtttggacggagtaccatgaaatgggtgttgggagtgtcaaggctattgcagattacaaagcttacactgttacagaaattttggatctgcttcattttgttgccccaaagttgatggcacgaggaggagctcacttttcttacggaattgcagacgatttgaaggacccaaaatatcaacattacaaatactggtcaaaccctttggaaacagagtgagttctagttttatgaatccctttagtttgattaattgtgtgcttaaaatattggttcagaggtttgatttcatgctgttgtcttaactaaaatcaaacatctaacttgcttatcgcctgccttgctgaagaaatttagactaaactgctatcaaaatttgtgtgcgcattaatttaaggtattgagaagctatcctccaatctggaaaaatataataagttgatcacttatgtgtgttctcttattagactaaggtaaccaatatatctatgagctggtgattgtggacttgtattatccaagtaatgcgacctttagcctcattgttgttaaacctcctgaactgctttttcagattaccaaatgcgccagacatggagatatatacaatgtacggagtaggtattcccacggaaagagcttatgtgtacaagctaactcctccttcagaatgctacattcccttccagatagacacctcggcagagggtggaaatgaggacccatgtttgaaaggtggagttttcttgagcgatggagatgaaactgtccctgttttgagttcgggtttcatgtgcgcaaaaggttggcgggggaagactcggtttaatccttctggcatccgtacatacataagggagtacgatcatgctcctccagccaatcttttagaaggccgaggcactcaaagtggcgctcatgtcgatataatgggaaattttgcactcatagaagacattataagagtagccgctggtgcaactggcgatgagttaggtggagatcgagtgttctctgatattttcaagtggtccgaggcaattgatttacaactctaacatattacacggtgagttttctttattaggtttctatgcataactacctcattgcaaattttgagcctttttttctttctttctttcaagttttcagtaatggctacgttcttacttataccccggaacttcaaaagcaagacacgcatggtgaattagaaatgaaaatggttgctgtgttgattaaagctacagctctcattacatattttagaaagaaaaaaatgaagacagtgaagtgagagagctggtttcagaaacaagttcatcacaaccagtagtattcatctatagttgcagtcttcattttttttttttgttggtgggggatgcacttaattcctcattgatatctgattgaaattcttatattcaattaatttattctcacaggtggttgcatattcctttcttcttatatattttcttggattatataccatattaatttttactgtttaattacctgccttgtctagtataatacgtttttaggcttgatcaaaaacaagaccaagactaagaccaagaccatgtccaagtccaaattctcatttgttaaaacaaaattaaacaaataaagagagttgaatattcagcaaactttgtcctgaggagacaaccttagttaaataaaggtatgaggaatgtcacgttaggtgaaacgtttctatccaaatgtgactaaactttgtctgagtcattggtaatgattaaaataaaccgtaaataaagacctaggcagacactagctaggttgagccccaacttgattattattggcatcttatcatataatatattattatcacatttttgcttaaaaaaagtacatggcttgattttattattaaataatactgaggaaatataaataattggtttttcttttttgtctttttgatacgtataaagagtcaaata

SEQ ID NO: 14485 - DNA, 22015 bp, Cannabis sativa
tatgttgtaataatccaagtaaaagatacaaaagaaaatcataataactataataatccaattaatatatacgatttcttacaaccttcatgataaaagtaagattaataatatgaaccattcgaactctacttagaaagttaaacctgaaatgttaatggtcatatgtacacagcttgattaatatttacaagaagaggtatattaacagaagctaataactgaaaccattaaggttaattaataactctacaaagttatgattgaactactcaaaaccaaggatgccatgtcggatccatcatgcaaaggtttcttggggtcaaggcagcttcaaccaactcggttactcctctctggaccgactgcggtgggtctacagtattctcctcctgaatccagttagacaaaaccaatcagtaagaagtgtgtttttaagttttcatggaaaagagattcaaggaacaatcatgatggaaaagaaatttgagcaatgagttttacctcttcggagaaatactgtggagctataccgctgatccggtttatgacgttgtcaacatttgtagtcactttttgcttgaagtccatggggttcatactactgctccctccgaccagaggagcaataggcattccgaggggtcttctccatgaccaagacagcaattcatctcggaagaacatggctaactgatgccagaggtgctgactttgctgcaaatataagaaagagaaaagaaagtgagaattttgataatgattatcaaatctataacgttaagttgttgtaccaaagcaaaactcactttaggtgaaacaacagcctgggatgccgcacacattgccgacacaatgaggccctcgactccaaagtgggagaaaaaatgttgcagattccttgtgagacggaaaggcactggttcgttaaactctatcattccgtttgcatcatatgcaggatgaaaatctgtttggaatatcttcccggtgttctttgcaaataaaatcttgttcggtgatcttcccccgatttgcaacatgtaagacatgaaacttgagagtgccaactggatggcaaattgctttttaaaagcccacatgtggttgccatttaagagagtcttgtacatatattgagagaagatcccatcgcttacaagatttctcgttatgtcgctataagcttgaacccgaagatctacaatagcctctgaggaaatttgaacagatatagcctgattcagttgctccttgaaataggtaataggatgatctgcctctttgtcatttcttgcacaattgttctcgtacacctcgaggaaggtactgtacattaaatcatcttccaccatgcgcacctgtcatcatgtggagaaatattgcttattagaattcatgtggagatcgggttataacaaccctcgaggaaaagcaaaaagtgcgtgtatgtaaaaacccagaactacatcaaagatcctagaaagttcatcatatatattatagggaaagaattcaatagatcaagaatacatattcgagcaaaacaaataaaaatttgaaacaaatcaaaggcatatgtgatgcaaaatcaaacctgtgaccaaacaggaataatgattggggtgtgaatagagatgtggcggcgtcttgattctttgtgcttatcaaacatttggttcaatactcggaagagctgcaatatgcgttcatcacttctagcattgggggtcaaagatgtctggacaataaaatgacgctgagagccatcggagccaattagagtcaaacgacggaaactacttccatgtctacgcacaattggaatgtcagctccaaccctatctaacttcacagtgtggtctggtgcaatttcctgcattgattgtgtatacaaatggtacaaatagcataaaccgttaaataacatattatgattttcagcaacaaaaatgtacaaaccgacttgattacctgatcactaaagtactgtcctggaacttccacatcaactacatggaagtctcgcaacaccttactttcttcttccagcttcaacacagctgggaacctgtcctcaacattgctctgaagaacatttttccaatgtttcagtctctcagtcagttcagagagggtggcaggaaaggtggaggtgctttctggatcaagatcacgttcgaattcttgcttgtactccctcacgaattcaacatgtttattaacagcatcagcagagaagcaagctctgcacacaccagataactccttcttaagagactggggaacctcagccgtggtggcagttggatacttgtagcagcggtgaagcagtgcatttaccacagcaaggagtctctcctctggcagagtgacaaacctcgatccaatttcagttagcagagcctgaaaagtgatttgatgtaacactgagttagtagaaaaacaaagaaaatagaaaaaggagtggggggactaaagaaagttgaaaattacacaaaactcgcatatacaacttttcgggattcagaaaaataatgttgtatacagtacacatatttgcaactttgactacaaatatgaagtgatgaatttaaacaaacatatatatacataattaaaagaaatcagagatgcaatagtcacctcaagttcactggccaaatttgcgtgcttgcttctaagagcctccattatatcttttgcagcatcaaaagcactagcagcagaaggcacaaaacccaaaggaccattacgccgtaatgcattctgaccaccatcattgatgcttgaagaactttgctgcatatgctggtcatttcctgaatgcatgccaccatcagccccagtggacctctcagattcctgcccatgagcatttccaccatcatgagagccaatgccaccactggattgagttgcttggtgtccttggttctctgaggataaagaacccccagcatgaccttgtactctagcatttccatcaccaactataccaatgttaccagaaacactttgctgcattctttgttgtgccaaagccattctatttgcctcagatttacttgcaacatcacgccgttccagcaaatatgtgcgcagccaataatacagggcctgcagtttgaatgcaagagaataaatttcttttgaactgaagtagtaaactaatgcatttaaggtatcaaatacattgaacattaacctgaggataaacagttgcaacttttagtagtacaagtttgcaatgaggagcttctgatctctgcaaagaaagtaggagttgaggaatccatgagagccaaacccaatggggaatttgctctaaatgcttgtcgaaagcccttcccacaggttcattgggcgtatcaaagctaagaagatacagaacacgagcaagatggcttcttgagttagaaatgccaaatttaatgccttgaagaaagcagctgacagcatactccagccaaatctcttcatgagtttctttgtaagcctgtatacggagagaaaataaaacagaaaaagaaatatcagtaatttatcaggtaaagaaatgaccaaataaatgcggagcatgaaaataagtaccatgtcacaataatttccccagcttatccatccttttggcaaatttttaaatagggttatcgcattggagtacgcaagattggcaccttcggagtcatttagctttaacaggaaatcccctcttaagcgatatatttctgctttgtgtttcacagaaaaatactcaagattagtgttgttgatcagattaaaaccactggtaagctctcccttcatttctagataagcttgtgcctgctctcttatcttagtaaacgcttcctgcatagatcaaaaggagagattagaaactgtttaattagaaagaagcatcgaactacagtgacaaagatgtaagcttctgaaaaacacgctagtgccgtttggacctttacagtccacaaattgacttatctaataaaactattcactcttattgtctgaatattacaagaacccaaaagtaaaatcacagttcttgtctttatgcaatattatttagtaatgcaaaaacacaaacaatgaaaggagataaagatggacagccataggaaagcaaaacccttccatttccaaccaacataacactagtagtacctgcacttccatagttgcatgaccatacatcttgtcaagtattgtcacgcatacatcgcaaaggccttgcttacgagcaatatgagcaagcttgttaacattccaggctttgtcacgaaagccaaggtgatgaagttgtgggtttgtggtattaaaatccttgaacgcatctatgactgatgtatacatttcattcctccattgaagcaaatcgtaccaaactgacatattatcccatttatttggagttctcaacctccaagtctcgagaatgtcttttagatctgaataaagattaccatgtgcaccaacgacagaacctccagagagtttgtttccattcgaaatgtccacaagaattctagcagactcttgaacctcaacaagttgctggaattgctgcaagagagggatcctggaataaacagacatctctggtaactgccaccactgctccaaagcaagttcaacaccttttcctactgtattttcagcatccccgacaccattcgtatttctatcatgcagtgcaaaatatgcttgaataagtcgaagttttggagtttcttctacttgagcctttggaattacatggtccttcatataagtccaatcaggcaacttccataaactatccagaagtatttcataattctcaatactcttgccaaaatctaccaatgcatcccactgacttagttgtgtagcacagtaaagccattgttcttcccaaagacacatctcagccttcggtactgtattgttatatgtcccttgagttgccttaaccatggcttgataaaataaactttgagcacgctgccaataaccatgttgaactaatgatagtccagccctggtttctgcagtaactgacttcttcttccataatccacacctcatatcttcctcatttagcaaacgataaagctcagccagagattcagagcactttgtttctttctgaaatagcatgacatggctttctagcagggccaatgcaatatgccacgcattatatgtcttcccaatatatttaatgagttcacttggcatccgaggttgaggatggctcagttgaagcccttctaaaagtgcttgcacaacattaggccgactagcttgctgtttcttgtgataatcttttgagaggagagcaatcattggtttagctagtgtaacctgctcttccttttgcaaagtcacccagacaatcggaaacacaagcacccacagatggtatgcaacatttgcatcagtatgagccagctccctcaatggattgagaaggtcggccacctagaagagggtgaaaaaggtcagaatttccatttgcaatcaaacacatactaggtctttactgtactgtcatatttcaagttaatttaagattgaaccaacaacttcagaaaacactgagctattgcatagttcgtgagcacaatcatttattttaaaaggaaaaattagaacaaataagaattgtacttatacaaacatgaccagtttgataattactacactaacctttagtttactcatttcgttcagaaactgtgcatgctttagcacgagagtatcaaatgttaaaggagaatcgtcggaaccctcagacacatcagtagcctggtgtggcatcccagaagaatctggaacatgccctgaaaccacaagtggcggtagccttgcagtgtttggagcaactgtgataggtttatcctcaactaagatcgctaaaagaagatcaagaccctgtttgagccaaaaaatatcactcacagcttcccagtcctgaacttgaataatgtactgcagtcttgaaaacaaagatttcccaagggattcatgatagagtaagaagaacttcatcctcatttcaggatctcttgcccgcaatccaagcatggactgtctctccaccctttggaaaacttcttgacgcagttgtagggaatatctagaaatcaataacatttaaaaagttaaattgataccctaaaaagcaatataacattccaagtacaaaagtaatattttacttgcctatctacatctgaacaaacgccgtaaattagctcaagatatttcctctcccactcttccagaacagtctgggagaagttttgcttatcaactagtgaaagcttctgaaagaaagatacggtttcctttggggtaagaaaagcatttgacatgactggtcctggcttattgaagtcatctacaatccacccttttataacatcaagtatgcaaagaagcacactagcctcggtacctttctctgagagcaatgcattcaaaatctgagttatggatcgtttgcattctggaataatcataaccctttcactaatgagtttcaaaacagattttagattggaaatcactgctccagcatcggcaccctggcgcgaagaactaactgcagagtccggatcttttgtttgaccctgacaatgatagatcattttgttaatggctagaatatgatgaaagcaatccatgaaatttaaagaatttctcaatccatatgtttcaccttctgtttctaagtgtaaaattcattacctcttgtgaaaatgaaagataaacaagttgaaagtaacagggaacatttgataaacatgatgtcctaaagcaaaagatgccaaatcaaaagcatgcatctatcatgcgagacagcctagaacctccttgaaaagttccacaaaacaatagtaatgcgagaaaaaaaagactacaacttgtatgtaatggcaaggtatgacctactaatatagagcggatagagggaccaatgaccccaaggacaaaaatctatgaaaaaagatgcatcatacctgtctcaaatgagagcctgatgatgaacccatatctctggcaaggcgttgaagaatacgaaccaagataaaaggatcagtgaagttcttgtgtacctccgtcaaggtctttatcacaagaagaatgaagcttattggactagaagtgctttcttcattcgatgtttggtgagccgtgacagcattaatatgcttttgtatcaattcttcaactttctgatataagagcttcacatctggaggtgtggtaggtgcttctaaaggaaaagctacaaaaaccatcttcaacagggagcacaacgactttccagcatctagtaatttatacttgaaacagggttcaagtatctgttaaccaatttccccacatccccaaaaataaaaaacaaacagtaagaaaagaagcaaatatcaagatttacttgttgaaaaaacaaatagatacaaacattacactgcatacctgggaaatctggctaatgttatttctaatgaataaatgtggctgcttctctagaaccttgttcatgacatccaaaccctgggcaagggcagtagaaggatccttggactgagattgttgaatgctgctcaacaacttctcaagataattgaacttaacattggcatttggccaaacctccaaagcttgtgaaagtaattctaaagcttgtttatacatagcagttgcttctctgtccttgggctctataaccagggcaacctgtctcaagaaggcatgaaaatcacaaaacagtaaacatgagaggcattgacaactgattgactgggacatcaaaggacatgtctctaaatcataatatatggtcacactcaagagtctcaaaatacatgtgttcattcacaataaaaaaaaataacattaaacaactatctcagcataaatctataaacaacaaattaaaattgaaaataatgtatctgcttacgtaaactacataaaatagatttttaagtacagtaatttctattaagaataaaaatgaaggaagcagaactttataaaatacacctgtgcaatatgaagtaacggattttccacataaagtcatccttaaggctatgtttggcaggaacgaaggagagtaggatggatggagagtaagaatgatgatgactctatagaggatggagaggatagtgactctcctttgtgttgtttggtattaggagtaaaggtgagaggatggagagcaagttatgattaaaattactatagtatcctttttagtatagatatttgtaatttttttttaaggataattttggtatttggtgtgtacattttgtttttttctccaatccttcctaaaatggagggattgaatttttaaattttggagggagaaagtctcccttcctttttccctcttaccaaacaagggattcttcctctcctttcaactctccttccacccctctccatccacctatccatcctttctaccaaacatagtataatggatctaactatttattcacaagtaaaataacaaattggtgaatgtctcacccttataaggaaattgataatcatttcttccatagcagcattgggcttgaattcttcatcaggttgactagccagtccaggggtttctatattaggaattgatgatgcacctccaggtgacatgacacaaagtgactggagaccaggctcaactttgacacgcttggatgtatcttcagagaagttagccccatctacagaacgcttagaatcggtattaacaggacctggattaaatccatcagcattctggttgggtacatcattttctgtcactattttcatctcattttgcctttgcctttcccagccaaccaccaaaccagcaagctcaatggctaggcgtctgttttctgctgtcgtgttatatggcaatccaagtctactaagagaattcaccatttgaggcacaaactgggctctgcaactgtagaagagatctgaatggcgtacaatgagctggaaaatgtgaatcaaattagggactgagtgaccttcctcaacgagaatcttttttgtatatcggatccaaattggcatacgcgaatccccaactagaggcaaccttcgtggaagtgctggcattagtatatcaagggcttgtttgactagcattttgttctctggctgacaagttctaagaagcgctacaaaaacctgcaaccaaaaaaggatctttaggaactttctcaaggacaaaagcaatttgattgtgggggagtgcccatatcctgcctgtgtgtacgtatgtttcagcttagtaaaaatcaagtacataggattaacagtgcagagttagtgcaactatcattttccatacctgaagtataatcttttctggggcctgataggcttctaaaaagtggcaaacattcacaaatgcccactgtttactggcactatcttcacgtttgagatgattccagccaaatttgataagttcttttctatgatgaacaaggtcattctgaagatacttgagaagcaaagttgcaagctgaagaagctctattcttaacggctcatcatactcagcagaaacctacaacgaagatgcaggaatataggtgaaaaagagagcatgttgtggtatgttgaggatatcgtaaaaaagaaactaagaaacacaaatcatacagaagagctagaaaatcacctcttctggaggatcaagaagtttgtcgacaattgttttaataatgactgggtcaacaacatcccaactttggccattttggaacgcatgagcaagcattggaagaatgagcatttgcatcacgataaccaaatgatcatgaccaagttgtttcgattggaaaagttctaagaaatgcaaaagaagtgatcttttcaggttaggagggtaaccttcagcaacctgaaagacagaataacagttgtgcattcatcaaccataatataatatatgatatgaccaaaaaatgagtagttgaagcaaattaatttcagttacaatacctcaattatataaaactccttcaaaaaggtataatcaatgcgactttgaaacaagaagatggagagtatatcaaaaagaacattcacttcatttttctcatgtcgtagataattcaggaagcatttgaccagccatttgctttcttttacctgtataagtgctgaaaaaattactactgaaatatcccgacaagaattttaaaaaagaagaagaatagtatataattctcaattcattgtgagtttgtggcgaacctacagcaatgtttctaacaaaattttgaatggagtggactattcaaagaagtcattatgagtcatgactcaattttttttaggagttctaaaataaataaggaaagaaaagatgataatttgtaactgtggtggagcatcatcagaaacctccgacaaaataaaaatcatctatagattatatatggaatgtgataaaattttgaacagcagataagtttgaaacaataaaaaatatatacatacacatccaatgggaagcttttctgttgcttattgtgactttgaagtttgtttacattgctggctcttgtctctctaagaattgttttggtgtggattgttgtacaaatactaacgtttttggttgttatgctatttacaaatatagttagtaacttaactcataatcaactcacctgaactaagtccagctcttgttccttctgcaaacgagatattctaccagaggacttccaaacaagtactaaggtatcaaacacaatacgattgttttgaagccacccaggtatcagtttaactaaagttttaacaagtgcaagtccccgaaaataagcatcagaagttgctgcagagggtgaggacatagaactttctggtgcgggtgtagtaagaccttcttcacctactgaagcaggtggagttgacgacgagggagtcatcactgcatcagactttggagcaaattctggaaaggcactagcaagtatcttctgaggtgactttgcaagttcatctcttaacggctggccagcatctgaccggataacatacataaacctgaatttttaacaggaaatcaaatgaaattgaagcagaaaatgtcccatcaacaaaagaaaagggaaacatgtattatgggacaaaatcagaaacaaaaacaagtgttgaaagtcttaaaaaaatgacaaaattttcaccttctgaagtatttcggactatttagtcgagcaagaaaataatcaactgcaagtgttgcatagcgatttaaaaatttggtaaggggaggacgatatggactgtttatttcactgaacacttgtccaggagagagagctccttccaattcaatggttaacgtaacaagttcatcaaggaactttgatgcagccatgggaagtaaatggaaaagctcaataatagctgcatgaatgttaaaatcaaatgatgccatctataaacaaaaatgcaattaggaaataagcaactagtaccataagtaggcaagagatttaaatatactacctgcagcaattttcggttcttcaccagctttccatgctttctggctctgtgcaagtttctctggctctaaccatttcttcaggtgttccaacaacttactgcctaaggcaacattaaaccaattggacagtaattcaagcaaacgagctagaccttgcaagagaggcatgctaaggttctttgtgtgagccaagtttaccaatataggccttaggctgctctgcagaagatctttaggcatcctctgctgattaataacctggaatgcaatcaaacatcaaaagatatgagaaacaaacttgtgtggctttagaactcttaacactttcttcaccacattataggacagacttatatccacaaattacatccgcaaatgtatgagagagaccagataaggcattggcaagagctacaaaccaaattaccaattgctaaacaagtctaaaatagcatacttaagctgaaaggacctaagaaaatatagtcacatagcatttgtcaatatctgagaaggaaaagtaaaaacataagaaagagatctcaaaaacctgtcgcagaccctcttttccaacagcaacaatttccagtgttcgacaagtcaaagacttaaagaacatggaaatgatctttgcacgcaactcagcatgattgggagctttaaaatctgtccaggccattgttgtacagaggagctcaatgcaagcagttttaagcttggttaatgatgtagccacctttgggttcataaacttcacaacccatacagtttcatcagcctcggctatctgcaatgcttcttgaagaaaatttactaattcctgggtcaacttgagaagggggggcctcaaggccaagcaaaaattcaatgcagtcaccgtgccaacctatttccaagaaacagtaagcaatttgttgcattacatcaaaaccacaaggtacaaaaatgaaaataccaaatataatacctgttgatcaacagtctttgaccggagtggtcgaatcaacagaggctgcaagagtggttgatacaaaggctccaacagctcagacacctcactgccagtcctactagctagaagtgccaaacatgactgcacattctttctcacaattatagatgcatttggattaaacagttcagaagcaagaaagtcaactgctccttcaaaactttgtctgcgaggctcactgtttgcttcatcaacattgttaactacacgaagaacctgagtgagcacctgacctgtctcttcctgttctttgctagcataaacaggaagccttttaagcacataaaccaggccacggacaattcttacttgaaaaaggcataaagtctcaacagtgactttgccaactaaagcaccaagacccataacacctcccatttgtgcttgccatgtagttccatagcaacaatgcaaaagacggggcaaaagttgctcaaaaattggtatacgaacacttggaggaggtgaatatacaggattcattgaaggactggaaacaatcatgggagtaccagggcctcttgacatcaacacatcagcatgctttgtgcgagcaagtaaaagaagtgtttcagcaaacacatttaaagcattaagagcagcctttgcgtggaccctattttcatcagctagcacatcaactaaagcatctaaaaatattagaggatctaactctttgaggtttgaagaattactattctttgtccgtgagctagcagcattaacattggatgcaagcataggacctccaagtgcagaattaacagctgaagtagtacttgaagaatcaacatgaaaaatcattgcgaaatggcgacatacattggctacaaaatcatccttgggttcaagcaaatctggttcagcactggcagcaataatggtcattaagagaatcttaaacacagatttttcagcaataagttgggtcttcgtctttacacctaaatcagcctgaaattattcaatcataagattaagggcagtaagactggagaggaaacaatagaatcttcaacaatgtagaagatgatttgggttttttctgggatataattaagcataaggtggctatatgaacataataaataacaaggacattaaggcatattctttctcaatacttatgattggtatctgtggctgtaatatgaaagtttttgtgatattaaaattgtaatacagattatacccagccgtctattattaatgtaaatcttgtttcatatcatttttaaaaaataaaataagtaagagattaaaccttaattcaaaaaggttaagcaatgaattgactgcaatttgtatgtataattcaacataacagtttgttatcttttgcactttgtttcctataacatatttatttgtacatagttatatagataaatgcatttaagaaacacgtggcaaaaaacaaaaagaaaaaattgaggggatagcatttaatgccgagctaacctttatatctaaggtgtcagaccttctccaagaggaatcaacagtggaaactaacatcgttgacaactggctcggtgtgtatccctcatcctttactttttcaggcaaattaagctgagacgataaacacacacgtaggaactttagagcctgttttcgatagaaagcatcagttccattatgtttgttcataacaactgctactgcaaggttgatacatcgatcgagtggaaccaaaaatggagttgagggctcaaatgtaaggatcacacgtagtccatgctctggattgtccttgcactcaagagcaaggggctctcgaagaaatcgtctattacgaccacccaattttccaagaagttgcaaagcttttgcaccccaagggtagggggcaggtctcaagtgtgaccacagggctaaaatcacctcagacataacactggccatacttggttcaaggaaatcagggtttagactgtcaacccaaaactcgagtgttcttaaacctaagctcacaagttcatcacttcccttaagacacaaaacaagaggcttcataagacggggaaggtgaggtaacaatgaacttaaacgtgcaggcaaggttaaacacaactccagcaatagatccctcatgtcctctcctgttggaccctcaagcatagtcaagagcatattaagacaaggttgtaacatgggtatcaagtcccgtagtagaagttcaaatttgcaaccagcaagcgctcggaacatcaatcgaagaagctggatataacctagaggcttttcaacttcagtagcatttttcatacaaacttccataattacaggtacatgaggctgcaaaattcgttcaagatctggaggtgctttggaaactgcaccaaatataaagcgaaaaagatgcaaaactagttttgctgccggagaatctggatttttcaaaacatcaagtttgctgcttacaagaaaattaaccaaaacatctgcgaatggcctgtaaactttaggagcttgcaaaagggtagaaaatatgtgaaccaattgagtgttgcaaatcatacagtcaaacagctcaggcatacacaaagaaagcatgtccatcaaatctcggggctccataataaccaaaatttgggaaaagagattaagcatatccttctcctcatccttctctttgaagagagccaagcaatgtacaccactttttaaaacccccgaggccttcaagaccttatcaatgttaaatgtaccaaattaatcatctcttaaaaggttgaaaccaatttaaaaaaatttacaatatttgagtgtaatacctcatcttctctcatccctttgaaggcttgaggcgcctgcaaattagctggagaaacaagcccctgttgttgtgttccatgcacgaaaggagaaaccttaaaccatcagcaacattacgtaagataaaaaaaatatttgagtccacttatgagaggtaccaaaggaaaaatgacagtacctgtgccctgggcaagtgtgcatgtgtgatgctccatatgatagtcttcattcctgacaagcaaatatttgtttgtcaaacataaccaaataagcaaataaataaaatgacccaaaattcggaatattataataaaatatgatgttaaggatccattacccatgactaatgtctttatgagatgcttacaatcgttcacttccttagagtgttccacagggacctgcacattcaaaactgcctgcaaatacattttatttcagatttgatgataaagaatagagaatagaatctgatatgatataatactgagggaggaaaggcaccaaatggttggtattattctcatgtaaatataaataatgaacatacgcttatcgggttaaaactcaagcaaattgtaacattggataaattaataacatgatgaatatttaaaataaaattgttcaacaaacctgcactggaagctcgagctttgcctttaaggtaacacgatcctttccatcctcaccctcttccaacagctatcaatcaataaagaaagaaagggaaaacaaataaaacaagatgaaatgattttttccaaaataattgtagtacacgatcgcaacctctcaataaataaattgaacatttaacacaaaatatcaaacgtgaagattgtagataatctttatttgcaagcataactcacttatgggcaagatatgatgcattaatctacttggcagttattgcatgtgattctagatcagctgaaagaaaaaaaatgaaaaagagacaaaaggtcatatgtcttagactaacctcctcccaattttattaggggcccataagtgaggtggaaaaccgtggtaacaaagcaaaccatccattacaagaactacatataaaataaaacagaagctaacaatttctatagctcaattcaacatgacacaaaagcctagaataaatctaaacttttgattcttagtctatcagctaaaagaattaatgtataagaagagtttgtgaaatctattaattacctgaggaattgttcgcttaaaagtactgaatttccccacaaaagcatccaaaatacgcccctacaagaacataaacccaaatacacatcatcatcaaaattcagaaagaatgatttattttctaaaacaaacaagaagattattaatttaaaaagaaagaatacataagacgacaagatgttggcaaaatttgtataacttagagaaatattcagaatagagaagaaaagtgtgctgagatcacttattcaaacttgagcataaggtgatataaattacaatgatgtaggcaattcgagaggcctagtctctcccaagagcaaagctctagtcactaacacatcagcaattccctcacccccacaagattgactcccctgccttggtacaccaactcactattcaaagttcagatataaaaagactaagttaccccctgctcacaagtcaccaaactcaatcaccttttgacccctacttgcacaattgatacagatgggaggttttatcataaagctacaaccaaatactccaaatcaaaccaatacatgtttttgaagtatttagtattaaagatccaaagagcaacccagtgtttatcgtttgcaaaggtggtgaaacaggaaaataagaaccactaaatttaccagtttaagaaagaaaacaacaaactaaagggttcccttcctagcaagagagagagagagagagagtaatcaccaatagaattcgtgcttcatccatggatggctggtcgacgcctttctcaaaaatcggctccacctatattccacaagaagcactaaataatataaaccacaatcatgcaacaaatatcaatataatgaattatattagtcaaatctagaaaattatataagtaaaattaaaaaacgattggtacatcttaaccattactgaagaggccaactgcaactcactaatgacggagggaaacgcataaattgtgttggatgctagtcttactattctccatattgaaaatggccaaaactcttcttagcaataaaaataagaaacaagatcccataaaaattctgttataaaagggattagcatattcaccaaattcaacatcaaccgtgcacaagtagtatgaatgctgagagacaatgaagcgtcatgcatgttacttgaaaacaagtatataatccgcgacaactgcaataaaattcacaaatttgtcagtagacagaacataaattgcaatgtcatgtaatgcaaatgcaactagagaatgtatggaagaacacaacaaaccaatacagcatttaataaattttttgaaaaaaaaaatatcaatttataaaagcagcattacccaagaataaaaaactgttaacaaaatcaaaatggctaaaaggctgagaatatcaaaaacacacatagcacagatgcaatagtgctcactttaagcatctaaaaactagctaaaagcatcttagcataagtatcacacacttcacaccatgtagagtacctgtgacagggaaagatccccacgaacgtgatgaacaatttctgctagtaaactataagccagaggccgcaatgtctcaaagcaggctctcccagttccaactagaactctgaagaaattaaaagcataaacattaaataactgaccactcgtgcaggaggtatccaaaatcactgacaaacttgaaatttatttataagacagaaaaaggaacactgcaaaacagaaagtacaaggtttgtgattcaatatcaaaataactctagacatttagcaattatcaaagacataaaagataatggcgtgctgtcaaacaatcaacacagataacagggaaagattgtattgcaggagcaaaagaactatatttaaactatttttatgagtgttttgttcaagagtgtatgcagttgcagtcactactataaacttgttaagattcagaagagcttgatttattcaacaaatccaacaaatgccaactaattgaatagcaatatagagcgaaatgcaaggatgatagaatagaaaagtgaacaataaactgtcaaactccattttattttattttcctttcctttactctttgataagcaccaacaaacaagtgccgcagatctttccaaaaaaaaaacacttatataattggcattcttcataatttaggtaactactaactaatacatccactcttgcacaacacttaacacaccaggggtaaaaaaatcaagaagttattttcctcttcataatttcaaaagcatcatatatgattattaaaagtagaaaaacctacacctggcattgattagtattccttctactgcagatgcattaacatctagtagaaagtgaggactgggtgaaggcttccttaagttcaaaaaacagctcaatgcacgttgaataactcttttttaaaaaattctcttgtgcctataagccacataaactacactgcatgcttccaacatgagaagacagcgttctcaatgcattatagaccaatcaacttgtaattataaataaaaatataagataaaacttccgaacacttttttgacatttgtggggacctattgtacagtctgcaatttacctctcttccaaaagtgtgtctatcaaaggaaataaacccctcttgcaatcagttccaagaacatgttttaatgctactaacagttcctgcatggaacaaattaaattgtttatttatttattcaacatacagcagaaaagatgtcaagtaatttttacaaggtaatctcgagcgcagtctcattgagacatagagcactaattgaaatatatttgcattaaagccaaagcttgaggattaatgtggaagaaagttggattactgctttaggtagttccattagttgtgaagtagaagcttggcctcttaattatttcgggaaccacttatcatgaaagtaacacgaaaaatggatggatagatggaagtaatggccatttgcaggcctatttggttagagagcaatggaagatttttttgataatattgaggaccaactagataacttctggtggaagggaattagcctttgcgtagctttggctatgtgacgtgaaagagttcaaaaatcttttgctaaatgagttaataagggactggaattttctgatgtaatttccataaatctgattttattctcaaagttgtggaattattccatcgataatcaagtgtttatttctccttaaaagaaaggtcaagtacaataaataaatcaagacagaattttacctttctaattgagacagagtctgagcatgtaactagaagattcacaatgctcttacaaatgctttcttcatgaggccttatataatcagcaaatccctttaacagatacgtcaaaaaagaaactgtctggagcaagaaacagaaaaataaactattaaacttgaaggcaggtacatcaatgaactaaaaaaaacacgtcgaaacttcagtatcttccaatatcttaattgaaggtcgattcaacgctatagacgaaaggaaaggaaagatggccttaatttcactattatgagactattgacattgggtattacatttgcaagagagacattaaagtttaatttccttatcatagaagacatttgtaacacaacctccttgcccatcattggtggaaaaagggcaatactgtttttaaggtacattaacattaagcatgagaagctatttctttgaggataattctagtagttttgatgcttacaactaaaatttaaacctctcctccagctaaatttgagttctccaaaacaaatatacctaaaaacaagggagatgtggctcacccacagagcactaaatataaattaaacattcacagttgtgtggccattcagactggtattacacttgcatgaaaaactaacaggaattatttgcttacaatagaagcccagtttaatacagcatctatatacccgtaatttatcggaatagggtcgcaactttttaaacacaggcttcattggtaggatgtggggcattaagcatgagaatattcccagctttaattttttattttgataagaatagaaactacatattactaataaacataataaaaatacaaaagaatgacttcactgtgccaatttaatcacctataaaagcattacaagagtagcagccattttatgcctaaatatcataaccttgcaatcaaaaatttgtaaacgacacgaaattattagtaaatagcccgtaccttaacttgtgcaccctttagatcaacgaaatgagtcttcaaatgagaaggaaccttttcaggaccaggaacagatatagcagctaccattaaaggaagtaagtgaggaatattggtctgtacaagcctactatacaactgaaaaagaaacaagaccactaaaggactctctgtaattatcttgaaagaacgactacttggattgagctgcccagaaccagaatacccactactaggaatcgataagtctgaagatgaagtatccataggcttaatatcttccccaacaacagccacattatcaaaaaaatggctcacagtcgatttaaagttctgataaatcttacaaacaaagtccaagaacggctgaacttcagcttccaaagtgggtctaaagttcctaagcaagtcaaagattatgcgaacagatattaaagcattttcttcattatcagtggtgaggacttgtaaagcaacctttaatagttcctgaacaaaaggcctaagaacttcactgtgtggaagacgattaagtatctccacaacaacatttctaagtttatgttcaggattatcaacaaactgcggcttagtaatttgcaatagaatcaccgaaaatgctcgaaagtaacactttaaaaaattcaagtactcagcagtgtgagcaatctcaagactgtccctaacttccatagccatctgcaatctcgtctgaatagctgtcgtttcaaaaaaaaaaactcaaaattcaaaattcaaactaaacacaacaaggcaatacttccctataatatatttatacatataatatataaatagagagtgagaaagagagtttacgaagctcggggtcgacgagatgcctcgagtgctgctcgaagttctgaatgggactcatggcgtttgctaataataataatgagtaagaaaaaccctaaatccttccctgtgtagctgcctaccttacagattattgttaaaatttatattagaaatgatgagaaatgaaaattgagagaatctgagaaattattagggtttttgtgtgggaattggtttccgtttccctcgtattttttctttttttttttttgtactgtgaagttttcttcaggtccttttaggactctgaggaatcgggacgaaataatgtgtttcccggtttgggaagttgcttttttataccctttttttttttttttttt

SEQ ID NO: 14486 - DNA, 2133 bp, Cannabis sativa
ctgattaaatgcacccaaacccaaaggacaactttttaattagcaaaataataattatgtttttatgagattaaattttgtccaaataattattgtgaataaataagtaaaactattattgttgggtgttgttgttagccttaataattgtaatttttagggatattatatgaacatgcaaggacatgacatgttttttttttaaaaagggaatatagaatgaatttcatatttattaaaattaaattactttattttattttatgtgtgaaaaagcctaaaagggcatggaatggaatattgtgcaaaatgtgcctaatcacatagataattattttcctattggtcaatgcgttacatactacatattacaattattcaagttacaaaggctgtattgaatcagccactgaagacattatttaactactattcatataatataaataatttattaggttaagaaaaaattaataatggacattatttgattatgatttacactttgtgagcactagtattattttagaataatgtagaagtttgtaccaaagaccagtccaaagtttaatgaaatgatggaaccaggctgtgttgatttcaccacaaacaactaggctccataatcatatcatatggtaatattgtatattagagcaaattataacctgactttagtttggcttatatattcggcatttagtgtcgaccttttcaaaaaattatatatttatatatttttctgtttattcttttttttttcttaaaaaaatatttgtttatctaattggtttgggggttgggaataggacaaagtaaatcctttgtgaaaatgatggtatgttaactcttgcttttgtttaatcttttttgaattaaaggcaaacacaatatacaccatattataaaaatgtgttttactttttattttcatatattgattaaggctaactaatacccaaccatattgtgtacacaaaaatcgaaaattagatatatccacctcatttatttatatactatgaatatgttagaaagccaatcatatattgcaagacagtatagcaatagaatcaataattaatatggagttggtatgtatatctttcaaataatttaatttgatatgtctacatttattgattagatgcctcctatatatagttttataagtggcaaaatcatatcttaatatatgagtctttgtacaaaattacattattaccaaaattgatttttttttcacaacttacgcaatggcaaacatttgcttcaatataaaaatagtggcacataatctcacattgttagaccatttctaaggtatatattattttagtgtaatttttcactaattttagtaccgatcgatttcattactttttttttttcttaacaataaatacaactcgaaaatgacacaaaattaattcagcataaacatatacgtgtcaaaataagttaaacacgattagagacgattaaattttaaactaaacacaaataaacttattaactctaaaattgacatgcttaacatgattaaacacatattaataatcaaattattgatattaccatcaaattaacaaaatattaatctattaatgaactataataggtaatacaggtaaaaattacaaatttgaacttacttcttttattattattattattatttatgtggataaaataggtatgaaatagattaataatgttaatgtttgtgtcgtgtcacatgttttcatgtctataatcatgtctattcgtatttacattttgtgacatgtcatgtttgtgttaagtataattatggtatgtcaaaatcgtgttgacccaaaaatatgaattgccaggtttaattttattggatcatcactttgaagtttgattgttctctcaagtcttatggacaagtggcttaggttgtgttatatctttttaattgtgtgcctttctctctatcccttttccctctatatccttaataggggtgtgtatataaatcaatcttattcaataacaatcgattgttagatatttaatatccagttgtgatcagattgaattggatgttgtttttgaatatctaattggatcaaatcagaaatgaggtatctaaaaatctaatac

SEQ ID NO: 14487 - DNA, 4469 bp, Cannabis sativa
aggcagcgacaacaccaagcttaattccatttcctttattcgttggcaaccaacgacacctcactgtaagccatctccaatctccaaagtttttatcgttttttctatgagaactttgtctttgtttgtttcaagatcactgttaatgatttagatatttttaatttggtttgcttttagtttttatgaaacagatcagggtgtggccattatttagggtttgggttcttgatttttgatatgtgtatatgtatacatattaatctcattttatctcacgatctcatcttatatatatcaaatttgaaattaacgctttgtacttgggaaatttaggtatatgggttgttgccgcaacatccatccatttgcatggtgggttttggttagatctctttttgtggttcacttgaatttgtatatatttttatatatatgtgcattgtgttgttgccttttatttctgttggtaagttaacttgctttgttgggcttcattctcaatttttacttttggatctggtttcatatttgtgcttttgatttagtagatcttgttgtagattggtaatacctttgcccacattatgatttgggaattttaattatgattttggtaataccttaattgagtttaaagaggctgacattggaaaatgtgtttattgtgatgtagattgcatatttggctttatgaatattagagtagcatagatccacaagtggggcaatttctcaaacacttggcgggcgttcgttttatttcgatgggattatcgaatatgaggtcgccctcaatccaacgtgctttgcttgtgttggcctttttagcacatgcttgtaatgggttttatctccctggaagctacatgcacacgtactctaaacaagatgagatctatgcaaaagttaattccttaacatctattgaaaccgagcttccatttagctattacagccttccttattgcaagcccagaggtggtataaagaagagtgctgagaatcttggtgaacttcttatgggagatcagattgataattccccttaccgatttcggatgaacacaaatgagacaatatacctctgtactactagcccattgaatgagaatgaggtgaagcttttgaaacagagaactcgtgatttgtatcaagtgaatatgatcttggataacttgcctgccatgagatatgcccagcaaaatggagttaacattcagtggactgggttccctgttgggtacactccaccaaacagcaatgatgattacattattaaccatttgaagtttaaagtcctgattcatgagtatgaagggagtggtgtggagataattggaactggggaggaaggtatgggtgttatttccgaagctgataaaaagaaggcttctggatttgaaatagtaggttttgaggtgttcccttgcagcgtcaaacatgatccggaggccatgttgaaacttcacatgtatgacaacatctcagccataagctgccctggggagcttgagaagtctcaaataataagggaacaagaaagagtgtcattcacttatgaggtagagtttgttaagagtgaaacaagatggccttcaaggtgggatgcttatttgaggatggagggagcccgagtgcactggttttctattcttaattcactaatggtcataactttccttgctggtattgtctttgtcatatttctaaggactgtgagaagagacttgacaaagtatgaggaattggacaaagaagcgcaagcccagatgaatgaggagctatctggatggaagctggttgtgggagatgttttcagagaaccagaatgctcaaaacttctgtgtgtgatggttggggatggagttcaaattacagggatggcagttgttacaattgtatttgcagcctttggttttatgtcaccagcttcacgaggaatgcttttgactggaatgattattctttatcttttcctgggaatatctgctggttatgttggtgtgcgcatgtggagaactctcaaaggaacctctgaaggatggaggtctgtctcttggtctgtggcttgcttcttccccggaattgcatttgctatcctgacagtactcaatttcatactttgggctaacaacagtactggtgctattcccatttccttgtattttgtgctctttgctctctggttttgcgtttcagttccacttacccttctgggaggattccttgggacaagagccgaaccaatatcttttcctgtgaggaccaaccaaattccaagggaaatccctgcccgaaaatatccatcatggctccttgttcttggtgctggcacccttccatttggaaccctcttcattgaacttttctttatcctttccagcatctggcttggaaggttctattatgtctttggcttcctgctaatagttcttctattgctggtaatcgtctgtgctgaagtgtcggtggtcctcacctacatgcatctctgcgtagaggattggcggtggtggtggaaggcattcttcgcatcaggttcagttgccctttatgtattcttgtactctatcaattacttggtgtttgacctgcagagtttgagtggacccgtctccgctgtactttatcttggctattcacttttaatggcggttgcaatcatgttgtcaacgggcaccattggtttcctcatgtctttctactttgttcactatctgttctcatctgtgaaaattgattagaacccatcccaactggaggagaagagtctacataggaagatgaagttatttttttttctttagtttttcactttgttgctacttaaaggtgattgtgtaaggcatgttagaaatatcttaaatatattgtatttaggcttatcataagtttaatgctttaggggaggatttcattgttgtttgctatcatgatctgcaccattcatcaccttcctattttttgatcactttttaactagtgttgagctgtctttggtttctacctctttaagttgaatcaatttgttctaggaagtggttatcaatgaatatggtcatcactttcaaaaaaaaaaaaataagaaaaaaaagatgagctttcaatattataaatcatgtgtaaagtttcattatttttaatttttttacattgaattgcaaatgtgatggttaaagtagttgtttaattattttaattggtctgaatctgggataatcaaagtattagctgtagttggaaccaatcacttctcagaagtattttatttttactttatatattatagaaactactagaacactcataaaaaaaaatatattatagaaactataaaaggtacattatttatcacaattggtttaagaaattaatattaaaaaaataattattttgacaaatttagtaatattgtatgttagagaaggttaaaagttatggtcaccaaaaacaaaattataatattttgttacataattattttttcattagtgaacagtattaatgagtgataaagaggtaattaaaaaatgtgatttttgtgagctaaaatttagtcatgttatcttttgtgtcaaatttaatacaattcttaacttgaactaaatttgacacacattttatatcattattagaattaagttttagcaaaatgctctaaaacaaaaatgatatgaaatggggggaaagttgcgtgaacttgaagcttataggtacatggacaagtccatttgttttgaggactcagattgggcttgaaacgtgttaagtgtgagttcattaaatagaagtacagaccaaaaagtgatttgcttctcaagtccaacccagtccacaagaaagtcccaattcttatccatgcacataaacccattcctcaatctttagctattcttcaatacattgatgaagtacgggtgctttcaagaaacaaagagaaccatctggtggccaattgaaagacccaacgctcaggttgataaggtgctagggtcattgacatttccaagcattcttcctagaaagtctcccaagaattttttccattttcatcaataatgaatatacaagtgttctgaggaagcaaaagagatgatttgatggccaaaacatgtacccaacgcacggtcgacactggtgttgggcctgcacctagactgacatttaacttggttcgcatgtttttactactcaaaagtaaattttgctctggacattcctcttatcttggtccaaaacagagtaagagaccttgcttgtaatctgaaatgacatagaagtaccagaacaagttctgggaagctcattaatgaacacacaatgcctaggttggcatgtgacctagtgcgttaggttctgtttattcgattctagttccgtcttgagcatttaattatttttttcaaagtaaatgagagctacaacttgtgacaattgaaaatcttacttttataatttaccttttt

SEQ ID NO: 14488 - DNA, 13920 bp, Cannabis sativa
cacctcatatccaaacacaccttcttgcattttaaaatatagtgtaattactacactgtgtaattactaccctaataattatcctacctagtaattacacagttacttctaaacacacctgtaaccaggctagcaactctactcctcattttcttacttgattgggtttatctttagatgctcctcaagtatgatggttgggtatccacatatacttccctgcttatttattgtagtggggttttctttgtaatgatctttggatctctttgatttaggcctattttaatggaaatgttccttctttttctttttaaagaaaaaacaacaacaatttcttactaagcaacaaagtatattacttccatagttttcttaaataggtagctaacaaattacatgaaccaaatcatccttaaacttaatattttatttgttgtaaggatcccctaagcttaatttggatgtttcaatttttacaatttcatttacaatcaataaaatattaagtttaaggatgattgtaaaagaaaagagaggtatgcacttggactgctcataatttatagtctaaaaccaacaaaagtaactggagtgaggttgagcatcttcatgacatgtttattaaaaggaatgagaatcatttgtatggtattgattcttattcatttgattactaaattttataatggaagaagttaatagaacctacttaaattaggccgaaaagaaagagaaataatttcctcccatttttatagggcatgtcttttttttttttccctaacttactttatttttaattttattttattaattacaaagttaaaagacaaatatgtccttccaaaaactataaataaaaaacaagtacattttttaaccataacaatttaatcacattttaacattctcattacctttctaaattatgtaaagaaaattaaaattaacagtttggtaaataatataataaaaatattatttccgattatattaaattttaaattcatatctccaattgattattctgtaattccaaatacacttctataacccaattcctgatacatttctattacctaataaatatgaaatgtgctacgcaaccatgattacattagtaccaaggatagaggaaaaaaatctctattatttgcttgtcaacgatgtactcatcttttttaaggtaagcattttattctaaaaacaattaggaatacgagtgcaaagccagttttgaaggtgggcgacaaaattccatgttgagtgtcaacaatttgtaagaagtaaacattccatttccatggttactaaacgagaagaaaagcaaagaaaatggaccaaaaagggtaatataaatcattattagccaaaagtggtatatatacaaaatcaaccgaagtgatacatactcaaaatacaagatatggcattttggcttcaatgagaaatgaaacagaacacatttagaaggaagtagcttcattttcattatttatgtacggatgggagagggagatggcaaaggagaaaatggagctgctttgccaactttaaccgcaatgggactcttgggatgtttgtgagcattgggtgacgacctgccattgagatttctgtgatgttggtttcgagagtgtgaactgcgctccatgctatccgactccacaagatgttctaatgcttttactacctctttcatggttggcctgtactttggctcattggatatgcactggattgcaatgtttactgcttttagagcttcacttactgagtactggccttcaatgcgagagtcgaaaatttggagaacttttcgtttgctggtcagataaggttttgcccattccactagattgtgttctccagatggtctgttttggtctactgctcttttgcccgacaacatttctagcataaccaccccaaaactgtacacgtcacttttggccgttaagtgacctttaaagaagaaatgaaccaaatgtcagaagagagtgagcattgtttgttatatccagcagcaaaggaagttacatatgataaaaaaccttttttcttttcgaaactagactccatgggcatgactatccctacaatatttggagaccaggaaatatagcaattgctatttagtacttggaaaccagaccatttgaattttgagctactttttgggtgcatctttaaaaaaagcttttcaaaggtagaactggtaaacattttagcagaaacttcagataatgattaataaacacctattttactctatagaatctttctaatgtgcaagtaatgaagattgaagatacctgtggccatatattctggagctgcatatccaaatgttcccatgaccctagttgagacatggcttctatcattagctggaccatccttggccaatccgaaatcagacagtttcgcattatagctctgttaaataacaatggaaaagaagaccaattagtccaagtaatatttgatgagaagctaaaaaggtttcaccaatgtcatatgcttttcacttacagaatcgagcaggatattcgaggttttaaagtctcgatagatcactctagcttcatcactgtgaaggaacgctagaccctttgcagcacctaaagcaacttttattctaaggctccacgaaagcggttgaaagtaagaagcccctgttgcattcaaagttgcatttcataaattagaacatcatttcactgataatgctatttatcaaaactcaagaacagctaaagcagtgaaggaattcaataactcactcctaaatagatggttatccaagcttccccgggacataaactcatacaccagaaggcgatgatcatcctccaaacagtaacctatcaatctcacaagattgggatgtttcagctgtccaaggaaatcaatttctgtctataatttgagaagaaacaaaagtgttagaaatacaaaatgtgacctattctatacacaatcttttcaaagtgattagagaagggttcagaatcaaaagcataatcaagggaacactagtaaacttatcaaaggttgaagtaaggagatgaaaatggaaagaaatcaaggtaactcaccagccattccctgtgaccctgaagcccttcctggttaagccgctttactgcaatgaccaaaccagttccgggcttggctgcttttaaggaattctcctcaacccaccctttaaagacgctgccaaaacctccttccccaaccatactgtcgggacggaagttccttgtggctgttttaagttcattaaaagtgaagcacttcatgttggatgactgcaaaatctcaccttctgtccgaggtgttgaaggtactgaggctgaagagactttgcttccataatttgacttaagccctacaaatggcagatgcatgcataatcagactaagtttatcaaacggaaaagctcgaaaagtaaattcaagaaagaagaatcaaatcaatatatctcaaacagttaatctgcatatctattatctactcaattgtgatcattttcattaaatactcctttcttactttccctttacttgtcttcattttaatttttgaaaatagagcaacaattttcatgcagatccagatttgtaaaactaataagcattgatacctaaagttgaaaattcattcaaacaacacaccaaaacaccaaaacaacaacaaagcttctatttaatgttccatgaaaacccaaagccaggaacaaggaagcttaattagctgcacttttctctattacagaaataccaaggaaagaaagaaagagattgaattgggttagtaccatttcgatctgggctctcggctttgattcgagaactgcaacaggaacccattaacacagaactcaagcatgtacaagacgaatatactgaaagcagtcgtttgaagaaagaaagatataagaaacgaaagtgtgaacaagttgaaacagtggtaaaaaagcaaaagccccgtgatttgaatgataacaagttctttatttatttattttttttttttattgtgatcgtgtgaaagctagaggctttttcaacacacaggtttagctgtcagccgcatatgatatacaaaaaaaaaaaaggaagaaaaggaaaatgaaaatggcgagaccgagacagagacagagggatggagaataggttaaaagttaagagaaagctctgtttcgtgtgtttgtgaacgtgaaaaattggagtttagcgagggtgtttggattgagggaaagttcttatcagcgagacaaaagtgaatcgtttgacaaaagtgaatcgttgacttggcctctttggactttctttatctgcaagttgggtgagagaaatcccacaaagattttcaacctaaaaaggttaaaaaaaacaaagaattgaattgtagagattaagaagagtttacccatttctagaagggtagaaaaagaaaattaaatactaatcatgtaaaacaaatttgtgtagtcgcaataagggagtgagtaactaatgataaataaatccttaaaagttttatttagggtgtgtttgaaagtaactgtgtaattactaggtaggataattattaggatagtaataccttagaaaaatacaaagggaaggtccggaaggaaggagtaatttttttttaatgagaaaaaaagagtaatttaaggtgttaagcatgtaaaataaaaattaagaaatttgtgacgaaattttcttatgttttaatttttatacacttaacttctttctttattttttgtggcaaaatctccttaagtttactttactttgtaaatttaaggtgtcagttagatattactgttaaataccaactagaactgtatcgacttcgaggttttatcatacatatgtatacagtggtcatccatttaatatttaactatcgtgtcaaatttacaaagaaaaataaacttaagggggttttgctacccaaaaaaagataagggggttaagtgtataaatattaaaacataagaggatttcgctgcaaattgctctaaaaagtaatatatcattattgatgtattttgttgacctcaaatttggtcaatcgacaaccgaatcgtatttatgactgatattactacgtgtacacaataagaacaagtaaataaagagacaatatttttatagaggttcgacccctttagttagcaggtaatgacctactctctttttggttgtattgataccaaagataatacaactcagatcacaagtgttgtggattctaaagtgactcttttaagattgcaatgatgagaatcaagaagcaaatcacaagagagatgagagagacttagtctcttctacaatgtttgagatagaagagagagagagagagaactaaagttctttagagcttcacagtttaaagacttaaagtgttctagacttagggcttgagacatagcactttagacctagagatattaggtttaggttagtgttctttatataggagagcttacgagaaatggtaggttgatatctttttaaaagaggaaatatcacctatttgttatataataaaataataaataaataatatgttaattagtccccaagaataggtaaataattgaactttatcccctattttcatgggttgttgaagtccaattcgtgacttgaggtgttgtctaggatgcaagctgcagaggcataacaagtgcttgccaagactaaggttagtcagcccttccctttctagaggttggccggcctatgctggccatagggccggccatgggggtccgaccaggccccttaagttgaacagttatctctttatctcacttaagtattcagactcctcgtcaacgaatatgttgtgtatgatgacttggccttcttgttgataagttgtactttacgtggcattaatcttgcctactaggacatgcacatcatgtaggcaaaaattaagataatatttgccctccaagtccttgtgtggacgtctgtacggatagagactttctagcttcaattttgacttccttaaccaggcaggttttacaataaatccatttatgaaatattttctcttgtttggctgctcacattccccagttggaaactaataatattttgcatacttgtgttttgcaggatgcatggttttttgctgcatgttaaatgagagaggggcccaccaaaaactatataagcttacttggtgcaactcattttcattccacactttatattctctctcttcaaaaaaggaaacaagggaaagctctttacttccccttgtggctgacgtacccctcctccaaagcttgagattcttgctttgttttgacgatccaagctttccatcgtctacctcgaaggttttcactagtgggtaagctttcaaatcccattctctacttattttcttggatttgccattgttgtgttcaagcttttccatgctttatacattttttaattctcacgttagatcgtagtatttttggtattttgatccgcatgatagttttagaatgcataatgtgtgatttcttgacaaaaaaatattcaattttgattgtcgttgtgatttttgactcttttagtcacaaagaacgcgtttaagttttgaaaaacacgtattttgatccaaaacataccctggccggccctaggggtcttgtttaagacctggctggctctagggtttcaccctaggaagttggccggttcatgcttaggtcttaagaccttagccggttcttgcatgggtcatgcgatcctgttagccctctcaaagctttgggaccctggttgacctaggccttggttccaaacgagtggccagttttctgtcctcttttgactcagcaagaatcctgtcatggccttgtgagcctatacaactttaatctcatacgtggttcccttagaaattttgtatgacactttatggtgagtctattatagttgaatgcttaacttaagactcaacatttatccaagttgttacacttgaaactatacttcgttgatacccaaccttgtatgatgaaattttcttgcaagtacccttgagtattgttgaccagagtcttgtctaaaccttgtcgctttgttaggttactcacctccccttattttttgtgtgcagatgatctcgagtgactattagggaggtgacaaccgcgtcaacaaatatttacttagtcttctcttcgaggaccagtgtccagttgattcctctagcaactcctcaagtgatctcgaggttagtggtggttcattatggcaaggatcaagctgacatgccgcagggcaccaccttatgacccttatattgctaggttgtgaggaggctgcacaacctctggatgacagagagccaggggccggccaggctgaggtacctatggccgagcgagatgaggagagcttggatagcgagtctaaaaataccatttatctttatagtaaggattcaaaaaaaagtttttgtctatagcccatttcaacttaaggtcagccttatctctgatgcatggttttcttctcatttttctgagactgacaacttggttttgttttttgtattctctacaaaatcttttattgtatcgactttttaagatatttgttagagaatattactagtttagttatcttattttttaaggtatttcgttcatgttcataatcatgaatgagcagtacagttggatggataatgaactagtttgaatggattctccgatatttcttcaagatgtattattctcgtattatttttcaataaaatttttgttaattgtttaaaatatataaataagtattataagtaactgctaattaattataaagtatcatgttaatgttaagtgtcacgttgatattatactaaatatctaaaagagttaatagaaaagaccaatgctcattatttatgatatgaaattatcctggaacattagtttcttggcaatattaattttttttgtttttaaaaaaacttatttgtttaacttgtttttgaaaggttaagtctctatttgttaaataatattagttttgttggtttttatttatttatttaatatatattctttagtttatatattatataaatttcaaatattgattttatttttaatattttttatataaaaaataatgtattaaaattattgattctttttttttttaaaaaaaaagaattattgagattgttaaatttaaaaattttaatttaattttattaataaaaatttgagtttattaaaacttgtttaagtgtataattttgtgcatattaaagtttaatagttaccacttaattaatattaaagtttagaggacaaatttagtacatattaaaataattttcctttttttttattcaaaaaaaatagtttctttttttttttaattggatgcatgatttggtaggtggaactggtttgaaccatctagtttgagtgagcttcaccatcttttctagagatgaagagctaaccatttattacatggataagctcaaaacagtcaaagtttttgctaaaaataaaataataagttgtcaaagttgacactaaaattattatataatttttcttttattgctcatgttcaataataactgacattaatataataaattaataattagaaggatgagatgctggttggactggtcggctggtccaagtggggctttcatattaaagctacggttagactatgggccctacttcaccaatttgccacgtgggatagccaattggtcagattcttcttctctattggtcaacccagcggtgctttcttgtaatttggttacaaatattttatttataaatattacatcaacttatataattaattatagtaataaaaatataataatgtaaaaaatacttaaatgtcttttagcatttctttattttattattttttttagtaataaaaagaaagagtaatttatttttggtaggaatgataacaaacttaaagagtacaatgttattattctgttaaagaaaatgttacatttattgtaccgtcaattttccaaattctttcttgactattagcttagattcaaacaaatccaatatataacatcacaaagtcaaaacacttattttattttcttactattattttcacggataaaaaaataaaggcaacaaaattaaagataagatgagaggggaccattccaatatataaaagtattttcaatatagtgttaatatatatattaaatctgaccgtgctacacttgagctagccatagagggtgcgtgtgtattggaagtcctggatttgagtctcaaattatgctgatgtaatatataaacgcttaaatcaaaaaaaaattctgaccgtgctaagatttgagatgtgttgaaacttgaaaattatctcaaatttagcacataatgtatatgtgagctaatattaattaattattttattacttttatatcatttcttattatttttggtatcaacattaaatataaatgtatttatttatcttttattaggataataataaaataaaaagaaaatgatttgttttcaagttttttttatattttaaaaattaattaactttaacatgtaccaaatcatattctttgaatttttcaagctgttaaaattctttccaaactattaaaattgttagatttaaaaatttttgtccaattttattccattttgatattgtgacggttgtacatgtactaaattatggctccaaactttaatatctattaaatcatgtttcctaaggacctaatttaatacatgtccaattttaaggagcaaaaatctaaattagcctattttcaataaatatttacatcttattaatttattttttatgctaaatataccttaatttttgcatctgtagttgagatagtctaaacaaaaaaaaaataattagatatgtatttgtgaaattcttgttgatgaaattgaatgttatggatgaggcaatatagtagggttaatactatgtatgcagttcgtcagccaacaacaaccgcgtgaatgtgattgcccatctttagtttatagcgtagacttttaaattttttgaaagtgaagtacttttttatttattatttttaaagtggtatgcaattttataccacacaacatctataaagaaaacaacaacaacaaaaaataattaattaagcttatgcgtgtgcttgtgcaatgcaactatattccctcttattttatttactttataattaagcttataacaaacaatatgtaaacagttacgtactcaaaaacagaacaataaataaatgcttacctactcaatcaataaacgcagaaggcatccctttcgagaaaaagaaaaaagcattaaaagttgtataaaacatatcaatgcgtatttacaaagtaaagttccacctttataaatttaagactatagttcattagttcggctaattttatcgttaggagtttggcaattggcagatgaaacaacttttacaagtcctgtatgagaaattcatttaacaaatatggctgcagagcttttctttcttcaaagtctacaaaagatggcttttacgaagtacaaattaaacatttggcattaattaaatgaatgaatgaaacagggtagactagtttattcttctagattactccctacttttcaatttagatgggccaaaacccgattttctcacctaattcaacaagttagaggtaaagaaggaaagaaaagagacactctttataaaggaaagagaaaacaagaataattatttaagagaagaaatcggtgatcagctcagatacatcgtattgtatatacgaataatatctgaacttaattatctagttacgaagactgtctccaatccctctgcttggtattatcgttaatatttttaagtggtttgcttagtgttaattattgagtgttataaatgaacatatgggatatggattgtgcaatatttgagtgtgtgacaaccagagaaagaagaagaaaaaaaaaacaacacataaagagtaagaatagagaaaaatataaaaaatcaatagtacggctcaattcttttaactaaccactgagcatcaactgcagcaagtttgacaatcggttctgattctaatgtttgctttctattaaaaaaaggactgataccacaagacaaaaagaagcaagcactgtataattggttatcaaacaaaccaagaaaatgtagtcgcatcacatgccataatttattcatacaataaaatccagatccagggactaccccaattacaaaaagcttgttatttctcgaaatttatctataaaattctgcggatagataaatctacctctgaaacaaaagatttaaaattgcctaatcagagacaattcatgcatttttcttcacctcggctgacttgattatgtcaatgaactccggctgtagaaaaagggcaaaaattagctaaattagctttttacgcacatatatgatagacaccaggatttaacccattgtcaaccgtgattttcttttttagtaagaattttaagttaacatagctttaataaatatatcagatgattaactttcttctattatttttcttaaagaacacataaatgtcagcagctttgaatggttaccttgagagaagctccaccaaccaaaaaaccgtcaacatcaggctttgcagccaattccttgcagtttgcaccgttgacagatcctgaaataagaaggcatttaattaaagtcaaaggagaagaattaaatatctcaactaaatatttagaacagccatgacacaataagcaaactctaaaagcaataaacagattctgcaagctatgaaccgaaaaaatcatttttttttaactaaagctacacagtgcatcacatattgacttcaagagactgatcattatatcctgccctctcttacgaagattagaacagttaccctcaagccctaaccaaggttttactagtagaccacatcctattcagaataaaattataaacaaatggtgtctccacacatcaaatagtacacagaaacttaattctacttgtagcaagaaaaaattaacctcctgatcaagtaaaatagatagtaacgcacgacacaaatatctgtaaggaatctaattgtacctccgtagataatccgagttgaggcagcaacttcagcactaatgtttgcttgaagccattttctcaattcagtgtgtacctataatgtaaacaaaatttccatgaaacactgacttagttatacaaataaatgcaacttgacaaaataaaattgtcccatgtattacaagcaacaatctcagctaaatatctatgttccaacatttaatggttataacaaatggggtattaattatggcatgcaaaatttagcccaaaaatatcataagctcaccacacttgctggctgacaagatatattctaggactaaagacgcatccagaaatgtttccttaggagcataagcattatatcacgtctatgcagcagttacagtaaggtgcaatttgatagtaaaaagggcttgtgacttacttcctgcgcctgagctggagaggcaaccttcccagttccaatagcccatactggctcataagccaagacaacatcatcccaatttgacactcggtctgcaatagaattgagatacaaaagaaatttactacagaaaatataaaaattgaactagaaattccagtatacataattaggtttataaacagagctctgttcaataagaactggaaagatatactattcaaaaaaacattagaatagtaaaataaaatcatttgttaaaataaacactttagaaggtcaagggagtgatatgataaacactagatgcatatgaaactgcaaactgagtcttatagacataactagagatgtacctgcaattgccttggtttgtgctgcaacaacctccaaggttgatcctgcttctcgctgctcaagagtctcaccaacacaagcaatcaccttcaacttttgtgaaagtgcatatgcaaccttgtctccaacaaactgaaatgatgaagtggagtaacttgttattggtggaaaatctcttttagcatgctagatgaaaatacattccatcaccatgcatgccatcataggtacaattatcgcaaaccaaaataaaaggggtaaaaaggcaacagtaaacattacctcattggattcacccaatatgagtcttctttcagagtgaccaacaatgacccacgggatatccaaattgacaagcatctctgcactgcatatttacatgcatgttattaattaaaataaatcatactgcactaacacataagtggatcacaaaacatactataatatgccatagccattcattgggcttaaatttaatctgcattgcataatataatcataccatagccattagtctacgtgaaatttaatgaaaacaattatatacccagaatgagcctctgataagaacttgtgcttcaagaaaaaaaaaatacatttctgcataaatgaatattgaatatgcatttgagtcaatattgcagctttaaccttatccattccaccttaaggtcaacatattgcacaggcataacttttagcatgatacatttatcagagcttgaacctctacctcacacacacattcacccatccaaccaaatgagctcaagtgacacaccttgaatatgcattcgtgaacatagcagcatttgtgttactagttcactcaggtaagtggcaatgtttaaaaaggcgtttttgaggcgcgcctcaacagtgcctcaaggcgtgcgccttgctgagaagaagtgaggcgtacgcctcatgtggtgaggcgttgag

SEQ ID NO: 14489 - DNA, 4613 bp, Cannabis sativa
atccacttgggattccttttctttgatttttttgtcatttaattactgggttttgggtgttatttgtggtttcgtaaatgtcatttaaatctggcgctcgcttgtgtatttggattctaagcttctgtagtttatataatgtttcctattcaatgaattttcgttctaaaccatttgggttcaggatggatatgctgttgtggcttcagatgggccgggtgagtacccagtggttgctgaagctagagctggaaatgatggacttggtgtgactttgacttcaggaactgttgcatatgtcacaactggaggtgacttgcctttcatatcattttttcttttaagaaattttatctcacagctcacgtttttcggcagtagatttcctgtcatttcttacttcattaggctctgtgttagaaacttagtgccatgaacttgtataagtcaccttctatagtgaaaccacattcaggaggtttgaactgggtccatttacctttggctcctcatgaaattggtaacctttttgagcatcaatgattttggatatctatctatggtaatgcatataataaaactaagtttaaatctggttggaggtttaactccgagtatagaggaattaagggaggcctagtagggggatacaagccctggcttttggttaaaggtgatattagaaattgttattgagatcagcaactgactcatcagcaatatttaataagtgactatattcaattcagtttgcactcacatttacacaatggtgtctatttagttttagccatagacattttttagtagggagcatgtcacttttgattatgtggttgagattgggtacacatatcattatgtaaaaagtgtgtgcgatttgtgtgtattacaatcaatactcttaccatcatttctccatagaaagaatttctactctttaatttttttaagtgtaatttataatatttcatactctgaccatcaatttctccatagaaagaatttcattagcagttactccttagcagaataaattttctactctcctctttttaataaaataaaataaataagttaagtttcttttttttttgtcgactctgttgactcttatatttgatcaatataatactgttttaacttggcaatatcttagctaattcaaaatgatatcattggagttacttgttgttttcccctaaaagtgaggacttcttgataccgatgattacaatgcataatggagctttggagtcatttgcgagcttttgtacttaatttcattctgtgaatagattttaatgtctgttcgtgccctcaattgttggtatggcctttgctcaggaccaatacctgatggagctgatgctgttgttcaagttgaagacactgaacaaattgaagagtcttcacatgaatccaaacgagtcagaatattggtacaaacaagaaaaggaacagatatccgcccggtggtataatatcattacttgacaatatgctgattaaactttcaaatttatttgtttatattgcatggttgtaatatgacaaaataattttgaatttataaaaatggatatctactcccataaatcaaaataagcatattacttttcacatatcacaaatatgagagcttatggatatgtaagatgtctcaagaatggcgggaatagacaattataaataactcttttatcaagggaaaatgagttgttttagcatgcaatgtggaatggctattgcaagcttttgtacttatttacttttctttatatatgtctataattattattgactgaaagaagcattgtaaagattcccagagataatgtagtacgctatttattttagttcctattttaataagttcattcatgtatttgcttgcagggatgtgacattgaaaaagatgctgtagtcttaaaacatggagaaagacttggagcctcagaaattggcctgcttgccactgttggagtaatgatggtgaaggtatttaaataatatactttgtttactttgcgtgtgttattgctgcaaatttctgatctgttattgtcatgacaggtgtaccggcccccaactgttgctgtcctttctactggagacgaacttgtagatccatcaacaaagtgcttaagtcgtggccaggtattagatttggatgtctattggagaagctcaaacttcaaccctggggtcctttcaaaattttctagcgacaatgatgcaaagagatagctttaagctttcagtttgcaattattgtcaatcagaactgtagattgaaactcatctatatcaatacctaatgcctcccatgagggtaaaacatgaaagcttgaaatacttctgataatccatgagataattttgtttaaattttttttttctctcttaactggaaggtttttcctttgctcttctctgtttttactttctgttttattgtgttcagtaccgtcttttgtgtgtctacttacccaaataattagaagatgaatatattattcattgtcgataatgaattttctacaagaattctacatttttgtttaatgttggattatatttcagtcatatttgccaaatcttttctatgcattggaattttgtcaatgtttttttcttcctatgtgttccggacagttttagctgtgaagttaattcaactcttctgcagattagggattcaaatcgagctatgatattgacagctgcaaaagagcagcagtgcaaattacttgacctgaatatcgtaaaagatgatgaaggtgaactagagagagttgtagatggtgcagtttctgctggtattgatattctcttaacttctggtggtgtttccatgggagacaaggattttgtgaagccacttctcaaaaagagaggaacagtgtatttcagtaaggtagactagttttgtatagacgtagtctaactattcttccactgctgtcatgcgatttatacattataaaggttgatattgtgtttgcaagttgttataatttgttgttatgacttatatattttggaagaaaagaagaaaacttttgataggaaacaacttatttttttttatctcgaagtaatgtagacatgatacgaaattggtccaggcattcttccaagaaaaatatattttatgtataattatgaataaataaaaaatcaaccactagaaagtaacacaagcaaaccctttggaacaccaaacacaagagctccaaagtccttacgtgaaaaaccaaaactaacattgatttgactattcaggttaacatgaaaccaggaaaacctttgacatttgctgagatcattgctaaacctgcagcagataggccagagaaaaagattcttgcatttggtttgccgggaaatccagtgagcagtctagtctgtttccatctctttgtggtacctgccatccgccgcctttctggatgggaaaatcctcatcttttaaggttgctggaagctctctgtctgtctgtctttacatatatatattatccaattttgaatctacattttaaaattgacacagcatgttgaattattcaattaatcatgtttataaacaagataaacaaagtcatttgctaaatcaaaaactctgaactagatcatttccctaaagtccttatttcttatttatagagtgcaggcccgtctttgtcagcatttaagtacagacccagtccgtccagaatttcatcgtgctattgttaggtgggaggttgatgatggatcaggcaaggctgggtaagttgtgcaaggaaattgtcatcttgaattatactcgtaaatattctgggttcagttccaccttttctgttctgttatttttttggacttccacaatacttggtttttcttccccctcctttggcacgtttaataaatggttaatctttttcttattatgtttcattttctttttggcgatttaagttttgttgctgagagtactggtcatcagacgagcagccggcttttgagtatgaaatctgctaatgctttactggatttaccagcaacaggaagtgtgatgcctgctggttcttctgtgtcagccatcatattttccgatttaagcagagttgctattggcaaaaatcctcccacatccaatccaacttctacattgcaagcaaatgccaaaaaagaaataagtacaaatgattctgaattcagattagctattcttacagttagtgatactgttgcatcgggggctggaccagatagaaggtatgaaactctatattgcatacgaatttgctattttaaagtgatgttggcttggctctgtgtaatattaatctatcatctatatttgttttcttgaaaatccaataggaaacttggttctgagaccaatgcatctaggtacagctctttgaattattgtcttcaatagggtcactttctggatgccaaattgatagtagagttgatgttcctccttctcaaagtttgagattgaatgggtgaatgctcttctataaggatgtttactttagccacccggagaccatcctaatggctagccataccttttaagtggtttagcatctgattgttctggagtcagggac

SEQ ID NO: 14490 - DNA, 17784 bp, Cannabis sativa
  modified_base (17153)..(17157): a, c, t, g, unknown or other
aaatttaattagccttaaaaaaaaaaaatagcaacaagtaaaggatatcactcgttacattttactcccttaccgagtcatttgttcaactaaataatattaaaaaaaaatcaagggctcatcaccaattttgttatctattgggcaaagaccttaaagaacctttaatctctcctattaaatctcactacttcggccagaactaaagctcatgatggaagctgcatttgtctttttcagcaaacaggagtaacatcccaaaatttactaccaacataagaaactttgtgctataagaaaaagatcccaataaaaattaatcagtacagcaaccaagaaaaatatgctttcagcaaccataaaaatataccatttagataataaaacactataaacgataccactgttgtcttcaacttatttataggcattttgcttagccttctccaatacagtgtttaataaagaatccaaaaaacagactcttgtatcattctcaacaaccactttagcaattggcgttgccacttcaacaacctcactcaacctcaaattcgtattgtaagtttacaaatcttttaatatacaacaatgaaacaaactgatagagatatgagacttttgatcacaaaggaaaagacacaccattttcctttattttctcttcaatttaggcacatgaggagattgttaagtgttaaataacaacatatcaaatgcacctcaagtaagaggcctaaactatgttgaaacttgaatttttaatgtggaactcaaaactacccaaagctcttccactgaccatgataaaccattgaccatgataaaccattgagctgaattcttttgaaacatataacacttaaatttataaccaaaaaaatgtcattattttacttcaattcccataagccaaatgaaaaaccattttaacaaaaattggcaagctgtatgattaatttccatgtttgttgtttcattcattcttttatgagctgggaaaagagaaatatcatggagccacaaaaggaattgtacctttttgagggaagaaatggtgatgttgcgacgaagaaaactgacaggattaggccagaaccgacggaagaagacgataagggactcttgaaacttgaaaattgagactgaaaattagggaaatcatgaaataggtaaaacctagaaagacaatatacagttataccaaaagctgtaaacaacaactcgcctgggttgcggagttgtaaaggaattggaacagtcgtaaatggaggagaagaaatcaaagagagaaatcgggttatgacttatgagctgttttgggatttatcagagctttttttttttttttttaaaaaaaaaatttatttatatataaaaaaacgtgtttcttctcgtttctccgtcaccttgggttttcttatttggtgctggctcaaacggtgtcgtttagttacagttacagacatatcattcaattctcttattggtcgttaaggaacacggagctccgtttcgtcgaaacatcttcttcttcttcctctaatccaacccaaactcacgcgcattacagtctgttttttcatctctctctctctctacaaaaattaatgctataaatacgaagctagagagataaagagaaagagtgaacgaggaagaagaattttcaatacaataaatttgatctctaacttttcagtctcgatctggatcggacttggtagatcaatcggaatcaaatggccccggtatcggctctagctaagtacaagctcgtcttcttgggagatcagtctgtcggtaaaaccagtatcatcacccgcttcatgtatgacaagttcgacaacacctatcaggttctttcttcttctttctttccttttgttccgtttttgaatatttgttttctgaatttagtgttttattttgtgtataggctactattggtatcgattttttgtcaaagacaatgtatcttgaagaccgcactgttcgattgcagctctggtgagtgagtttcttggtatcaattctgtggtttatgaaatgggactgaacatgatcgtgattttgtaaaagctttgtcttaactctttaataagtttgtctgttaggaattaggagattacaaagtagggtttggacagtttggttggtgatggtggtgggtttaattatgcttcttaaccagtgttttagtagaattgggagtacttatatgcttaatgtgatcattttttgaaagatgattaatatttgtcagagttcagaacatgggggtaatgtactcagtaaattatatgtggcgggtaatatagtgtcagatgaattactatgtccatggtgataggcttaagacttaacagtacatcaagatagctggatggttcttatatacttctatgatctttccaataatccaaagaggggcattgcaaccatgatactgtcaaaacaagaattgtgtaactattatttgttgcagcctgtgtcctacatccatatacttttaaatttgaaaaattcttctggttagtgattagcatggtttatacttgtatgattttaggacaatggtggccatttctctaaattttatgcttatgattcatttaaattccttgtttgaagcattaatacgatatttataacagggatactgctggacaggaaagatttaggagtctcattccaagctatatcagggattcctctgtagctgtcattgtatatgatgttgcaagtatgtcactttctcactcgcacaagctgctacacacatctatgcatttctcaaaaacatttatttcagattaaaggtctagaaattgaaatcagcaacagcaatatgttaaaaaaacgttgtggcttcagttggaatacaaacatacgaattcgtatgcaaacatttcacaaaccatgagaaacaaataagtaaaaaaagaggcttggcattggtttccacttgccattgagtaccaataatttattgggcttcttttcaaaaaaccaaaaattagtgaaggagattttgtatgtttcaactctcccaaatgcaaaaatgatcttgaaatttagtcaccacataaatatttaagctttatattatatttgaataactttaccaattatgctggctctttaggcagacaatcatttctaaatactgccaagtgggtcgaggaggttcgtactgaacgagggagtgatgttatcattgtacttgttggaaacaaaacggatcttgtagagaaaaggtaacaaagttctacttatatttttttcaagttgctattctctgctgttgattcaatggtgtctttagttatgtggttgtactcaaatatttaacattttgtgcattgttgcacaggcaagtttcaatagaggaaggagaagccaaatcgagtgaactcaatgttatgtttattgaaactagtgccaaggctggttttaacatcaaggtagaaaaattttgcttcctgatgtgagattgtttgaacatgacaacgccattgattagatactagatttaatttttgttggggtctttcctagtaatactatgtgagaacatgacaatgctgttgattaaatactagatttaaatttaatgtttgctgggtctttcctactaatactatctgtgaaagaatattttttttttcatattattgtgagattaagcaactgttttcaaaagatcaagaataatgtcatataaacatactttgaacttaagtctgctcttggatgttgttttcacataattgtggtcgaggagtttaactagaattcttcaatcaatataaagacttgaagctatgttgtgtgtttccaaattgttgttggtaaattacatgatccatgctgctttcaagaacctctaaagagaggtttgcttagacctaatttctcaatctctacaacaggcattattccggaagattgcagctgccttaccagggatggaaacactctcgtcaacgaaacaagaggacatggtcgacgtcaatctcaagccttccaatgcaaatacatcgcaatctcaacaacagtcaggcggatgtgcttgttgattttacccaattgaattcaagctgtagtgtctattgcaccatttagatcctgttctctgtaaagctaagcccctgcttcaccttccatttttttttaatagaacttggattgttggtataatgttgattgttaaaaaggtttaggaggcccttgttgggctataaagaatatagaaactgaagaaactatttgggataaagttttcacttgtgaactcttcacataaaatggttatttttcaatataggctatgtggttgaccttactttttcactgctttttggcctttacaagttagaaaggacaatggtacatcatacagttcccatgtttctgtatatttattcctctttaatgcagactgatgaaaagggtatttggtggactttcttgagaaattatgtcagtgcttcatcctctacaacaagaattcgataaaaaagtgaccttttagattttgtgctttcttctatactttttttggtctttttagtatcttttgtgttaaacgagcttttttcttttatcttttttgctataatgtgtatttatatattttttttaggggaatcatccatatatgtacatttatactttttttttcttctaattttataatttgtatttttcttttccatttttataatttattttgtttcatttttatattaaaattattatttttaatttcttttatgcaatgtttaaaataacacaaataacccttgagatttttttttgtgaggcgaggcgtaagcctcaaaaattaattgaaataatatttttagagcccctaaggataaacaatttttttttctttgctttttcgttgctatttgaaaagtagaaggtgtagtagaagagaaagggggaagaatatagaattagggttttaaattttatttgggcttcactttattatttttacttgggcttttattaattttcattggacatcatccaaggacggtctagcaaatatcattaccaattactttgctgagttgtttactgctactgcagtaaatcagagagcaatagatcaagttgttgatacaattccaaatagcatttcaccaaatgaacgcttctctcattgccccctttacagcagcagaggcttagacagccttgaatactccggtagcgatggtatgtctgcaatgttctaccaaaactattggaatattgttggaaattcggtaactgaagttgtgttgagtgtactgaaccatatatggaacaaatcaatcaggctatcatcactcttgcaccaaaaatcagttctccacatgtaatggctgattttcgtcctataagcttatgcaacgtaatctacaaacttatttctaagatgattgtgctgcgatttaaagaagccctccctcttgtgatatctgaaacacaaagtgcattcctctctaataggttgattactgataacatacttgttgcttttgagcttgtacataatattcatcaccgaaaacgtggagccaaatgttttttagcgctaaaattggatatgagcaaggcgtttgatcgagtcaaatggaccttttttatggctgttatggccaaaatgggatttgcaaaggaatggattgaactaatctattgctgcctatcttcatgtagtttaactttttctatcaacggtgatatcatgggacatgttaagctaattagaggactccgtcaaggggaccccctctcgccttacttgttcttgatatgttcggagggtctttcaagattgctgcaacatgaggaggctagtaataatcttcaagggctgagaatcactaggaatgctccatcaatctcacacctacttttcgctgatgatagtttgttattttgggaagcaactaaatcatctgcattggccattagaagagctttgtgtatctaccacaatgcctcgggacaactgctaaattaccaaaagtcaattatgtctttctctcctaacacaccaataccggctcaacaattttttcagcaaacattgaacatgccgataagtgagtgccatgagcgatatcttgggctaccctcttaccctggccgtgacaaaaaggctctctttagccatattaaagagagagtatggaagttgatgaatgcatggaatgagaagttgttttcagttggtgggaaggaggtcttactaaaggcggttgttcagtccatacctacctacgccatgagttgtttccgcttaacgaaaacattttatcaacaattggagagtatgatggctaacttctggtggggtacctctaaagatggatcaaaaattcattggaagcgatggaatttactttgtaaatctaaatttgagggtggcatgggatttcgttcatttatacattacaatcaagctttacttgcaaaacaagcttggaggatttttgacatgcctacatcttttctcaatcgactccttaagagtagatattttttcaataataacttcttggaagctagacttggcaacacgccctctcttacatggcaaagcattcactggggacgagaattgcttcttaagggtcttcgatacaaggttgggaatggatatcatattcgatgtggtttagacaagtggatacccggacatacagaattcacaccgatccactatactggacaacccacaatgactgtttcttccttgattactgatagtagggagtggaatattgagctcctaaatgaacattttggcccacttgatgttgaaagaattctgtccattccattatcattttttccaacaaatgataggcttgtatgacatcataccacttcgggcatatataatgtaaagtcaggattctacttatctgcaactttggatgaacgagatcaatccacaccctcggatcttcatagttcatggtggaaaactttttggcatttgtctctcccatccaagatcaaaatttttgcatggaaagtcatgcacaatgccatatctactgctgctgctttacacaagcgcaaagtgatcgattctgctgcctgttcaatgtgtaattgtatttgggaatccattgggcataccctcttttcttgtaagcatgcgaaatcagtatggacaaagatcgcattctgtttagactttcggcaggctcaacaaatgtttaatggtgattaccttttccacctttccacgttacattcacaacatgattttgaacttatgatatgcacaatgtgggctatatggacaagtcgaaacaaagctttacatggtagctctgttttggatggaaaacacactgctacatttgccaaagagtacttagaaaagatcaaagttcacaccagcaggcaacaaaagaatgctggcaaagcatcctcaacgcatactactgcaatttatagcagcaatgttccagcaccagctgctgcaactttttgcagcaatgtctcagcgcctactgctgcaacatctagcagttcttcttcaagagataaggttacatggcatcctccatcgagttctggaataaaaatcaacattgatgctgctgttaattcagtatccaaacagttgggggttggagccattgttcgtaatcataatggtcaagttcttgctgctctttccatgccaatataaggttgtttccggtcggatgaaatggaagccaaggcattattccatagcttgaattgggtgttgcagcaccaaataagcatcacccgcattgaaactgatgcactcagagtcttccaggctttaacatctacatcaaaggatttatctagttttttagatttaatctctgatgttcgttgtcttttatcctttttccctgaagcatttatctctcatgttaagagaaattctaaccatgttgctcatggttcagtgaaacatgctttagagttggatcaagacgtttccctatcctattttcactactgttgttaacgattgttgattaataatattagtgaattttctcaaaaaacaaaaaaaagttacaagcaaaaaactaataataataaaaaaagataattacataaatcactgttttttgtaatttttgtatatttttatgtttaaagatttttttttttagattttcacaattttttttatagaaataacacgaaaacaacaagaaaattatataaaagtaacaggaaaataacaaaaaataacataaagataacaaaaaatcaacaataaattaacaaaagtacaacataaaaaagatcgtattttctgtaaataaaatcataaaaatcgtaaaattatttaaaattttgtacaatcgtatttttatattttttatttatttttttgtgtatttgtaaaataattccaagaaaaaatagtgatttggggcttttttttagggctcaaataagcccatttttaattacttttttgaggtgtacgtctcttctacctcacgcctcacagaaaaacaaagtgcctcgtcatttgaggcgcacgcctcttccatccacaacaaggcgcacacgctggtgcagtttttgaactagggtgcttaacaaaatttacaaaccgtacaactcaaataaaccgtacaaaccaaaccgaataaatcgacaaaaaatacaactcgaaataatacaatgaaaatctaaactgcccaattaatccaaataaactaaattaaaccgatttatatacttttttaagaaatgtgtatataatgtattacataaattgcatttattagtaaaactattttgtatttaaagtttgaacattttagtgtttaacttaaaatttaaagtttatagtttataatttttattatatttggatattgaagttggaattcaaactcgcaaaccataaactgattccacttctcgatcaaatcctcaaacttctcaagtttctcttctagcaagtgactcacacttaaccccccagctcaatgtcaacaattaatcttcatgcttagtcaacaaacagcctacaactgatgtttccacatcaaaaacccttacaataaacaactttattggtaatcttgatcattttttattcaattcttgaattatagatagtggtgctactcaccatgtttattgtcatgctcaatgcttttctttatttacttaaactttaactcacaaacatgtcacattgtctaatggcaccacagttagaattgaacaaattgccactgtcatcttaaatcctcacattactttgcataatgttctgtgtgtacctaacttttgattcaacctattatttgttagtgctctcttacaagacagtttcaatattttggattttcatctaacatctgttatattccggaccctttacagacattgaaaattaagacagctagaagatttggacacctatactccatcaagcaaaataaaccaactataccagtttgtaattcaagttcatcttatgtacattttattcaaaactaatgacacacacgccttggtcatccatctgtactaattacaaacaaaatcaataaaagagatgaattttacaaatcttgatagtgttctttactgtcctacttgtcatttgtcaaagaaaaaaaactactatttgtttcccacaacaatttttctaaaacaattttcgatcccattcatttagatatttagaggtcataccccatatcttccatagaaggatacaaatattttcttattattgtggataatcattcccaatatattttgctatacttacttcgggccaaatgagatgccccactaatcataatttttttttttacctttgttaatgtttaatacaaaaccaacataaaatccatcagaatagataatgccaaggaattgaccttgactgcattttatgctagcaaaggagtaaacaactattattcatgtgtaggcagaccctagcaaaatgctgaggtagaaagaaagcatcaaaacattttatatattgcgagagctttagctttttaatcccaccttccactctcttattggagttatatggtcaaaacatatttactcaactgaacaccttctgttacattaaaagataagacctcatatgaactgctccaatagaccaccacaatatgatcacctatggaattttgattgtttagcttatgcatcacatgtcaaaaatccccacaaattttctcctcgagctcgagcatgtataaaagcatatttcaatctaggaatgtaatttttcatgaatcagtttatcccttctataacgaacaccaaaataatcttagcaacatagatagattcttccctcaacaatcaaatattaatgatcatcttccatactaatttccttcagtaacacctgttgcaactcctatagcagttccccttgcataatccattacaccacctgttgtaccatctacaacaacccctgctgtaataacaaccgcaacacctgctgcaacaactcaagcaacacttgatgcaacaactcaagcaacacttgatgcaacaactcaagtagcacctactgcaactaatcccactgccaaatcccctacagtccctacagctcaagcagctcctactacttttacaaaatatggcagaccaatttagaaacctgcatatttgaaagattatagttgcaacaaaagtagagctcacccaataaaaaaatatctctcttatcacaagctttcacctaagtttcaagtagccattcttgctgcccagttaatcgaacctatttcctgtaaacaagcttatagagaaaaggtttagaatcgagccacggatactgaaatagatgctatagaagcaaacaatacttggattattgttgcattacctcctggacaacatgttatcaataacaaatgggtgtataaaatcaaatacaaccctgatggatctgtaaaaagcgatgcaaagctcaactagtagcctcctcaaagctcaactagtagccaaaggctacacacaacaacaaggtgttgattatttcgacacatgctcctctggccaaattcaacacttgaaaattattatttgcacttgttgcaataaaatagtggcacttacaccacatggacatcaataatgccttccttgaagactacaaaatagggtgtttttcattaaagatgacctcgggaactggtgtgatataccagaaatagtttagcaagcttttttgagtttttatcagcaggtgcttggttcttctatgtccaacaagcttgggtaaacaaagaaattgttaatcttggtcccaagcttaatgctatacattctagcatcctaacaatagcttatacaacccaggaggtaaaagaagcaatattctccattcctgaattgaagtctccacgtcctgatgggttcgggagcaatttttatcaagacaattagggcttagtcagatctgaagttgaaccgatagtactttccttcttgaattcagacaagattcttaagaaaattaatacaaccactattacacttgtccccaaaagctcctatccacaaagtgtgagtgatttttgtcctatttcttgctgcaatgtgctttataaggctagatctaaagtaatttgttcaagattgaggaaaataattcctgattaagattgatctaagaaaatcatatgatgcaatagaatgaggtttcattggagagatgctcaaggcgtttgactttccataaaaatttattgagttggtcttaacttgtattacaactctcaaattctcgttgcttcttaatggttcattgcatggattttttgtttcaaaaatagggcttagacaaggggatccaatatctcctttgttatttgtcctagggatagaatacttgtcttgaatcatgattaaggtgggaacatggcctggcttcaagtttcatgatcaatgtgctactttgaaattgaatcatttatgctttgcggatggtctcttgcttttctgtaatggtgattatatttcaatcattcttatgttgaggggtttgatgttattctcatcaacttcagggctgaatcctaatgctacaaagactgcaatgtattgtcatggaatgtctaaatcagaagtggatcgggtgcttgatgtttctagttatgctcacagctatctcccatttaggtacattggtattcccatttgttcaaagaaaatatctattattgaatgtaaaagtattgtggataaaataacaagtaagatttgaatttggagtacaaggaacctttcttacatgggaagagtgacattaatcaactcagtatcattgctatacattcgtattgggctcggatcatgatcttgcccaaaagacttctgaaggatgttgaagccatttgtagagtctttctttgaaaaggtgcatcaaactcttatagtccaagattagttgcttgagataatatttgcttatcgaagtcagcaagtggcttgggttttaggaaaatacttgattggaatctggctgcgatgggaaagtatgtttaggatattgagaagaagaaagacaatctgtttatcaagtggattaacagtgtttacttgatgaataaatattggtggaattataaatctcccaacgattgcatctggtactgaaaacgtatagtctccatgaaagatagtgtaatatcccgaaaaatataacaatatttaattaggcatattttattaaatatgtgattatactgatattggagtgaaattataatcttacttaagctatatgtgtggtaattagtgcgaatttaataaatgattaaataaagcgtaatttattaattacggagactttatcagattaagtgggtatagtagataccacttttgaaataaaatattttcgagtttggcggccttaggaactcgacgaagtggttagaaatgtcacggcaattaagtagtattgaattggtattataccggatgagtgtagaactttaagttgtcagtttggcaaattagttagaaattaccaaaatatccctaagtcttattttacaaaagtgttttattggaggggcaatttagtcttttactaagctaaaatgttgacttctatgaatttattttatggctgataattatttaagttaaatcttatattaaaaggatttatgttaggaaaattaagaggataaagaccaaattaagaaataacccattaagctctctctcttctctttcggccctaaaaggaaaccaaggagaacaaattgttcatctcatttcagtccagaatttcgctagaaatctaccctagttgctttccaaattattgaggtaagttcttaatactctttcctttgattttcttaaattttaagttgaattttggttatggttttaaggttttagggctgtgtgattaacctaggttcagagcttgttctaagtgtaattctaagatttgtttaggttctaattggttgatttcttggttgtttggttcagtattaagaattttagcttaaaactctatttcttggttctagcatggtgatttgagtaaattgatgaattatggtaaattgatgagctgaatgtattatttttatggtattaaactgttctggagcatttgagtaggtttgaagaagttttggatcaattttgggggaagaaaaaccaaatttcttgcctgccagaaccggtcgaccggttggtttgggtatagcagaacaggtcgaccggttggtctgcaggggaaatttccagttttcttcgaggttagtttttggctcggggtgatttccagtacctagtttaagttgtttagatgttgtttggcctactttggggctaaatgaagttagtgtttgtctaattttggtattaggggttgtgtccgaaattggttaaggtgctcaccagattttattgtcgtgacataggactcggatcgtcgagctttatttccattcaagtcgacatacacacctgatttctgaactgaggtaagaaaagttttatgcaccgctaagtatgttagataagaaacaattataatcgttggtgcctcgattatgatcgaggtaatgatgtgtacttgttgtgcctcgattatgatcgaggatagaaacagtcattattggtatgagtaattacttgtttgaaactgcagatagattttttacttatcgtccgctttagtgagcaacgatagtgacatatgtagctcgtggataacgaatggtaagggtgctttatgaagcactgggatcgtctcgtcttgtagacgtttaattgattatgcattgttgaatatatgttgaatgatgagtatgtatcttatatcaagatgtgattacttgtattttacattgtgtgtgatttaatagcttttcttgctgagtctctgtgactcacgggtgctttgtggtgcaggtaaagagaagggtaaagcagagcaaccatgagttagaggttttccagcagtgtacatatcaaccgcagtatctcggctactagtggacaagatccacccttttgattgtattttaaaagtgtaatccgatgttgtaataccacttttgaaatagtatgtaaaagtttttataaaaatgatcactctctcttttttaggaaaaaacatgacactttccttgcacttctcatatatgtggatgatatcatagttgccaccaacaacttaatcaaattataacacttcacatctacttttgactcacatttcaaactaaaagaccttggcaacctaccttttttttttcctaagacttgaaatagcccgctgtaatgtacgtatctctgtctcataaagaccattctcattacagcttctacaagaaactggttcacttggtataaaacctgtctccactcccatggagcctaataacaaacttagcaatcatacaagaaagttactccctaatcccactcaatacagaagtctcacaggtaaactcatatatctcacaataacatgacctggcatctcatttgctgtcaacgaactcagccaatatctccaagctccaatacatacagccaaccgcatcttgcaatacttgaaaggcactattggccaagttctattcttctatgcctcctcaccagaaccattacacctttaggcttttgcagatgcagattggggagcttgccttgacacaagacgctcaatttcaggctactcagatagactttcatatcctggaaatccaaaaatagcaaaccatgtttcgctcctcagacgaaggagagtatcgagccatggctaatgcagcatgtgaattaacatgactctactccatcctccatgattttggtatccagattccactacctttaactttgttttgcgacatcaatgttgtaatacacatctctgagaatccagtttaccatgagagaacgaaacacgtagagattgactatcacctcatccgagaaaagatcaacaatagcactatcaaaatgaaccatatctcctcaaagtctaacatagctaacatcctcaccaagtctctcttcccaactcacttttacaatattgttaccaagatgagtgttaaaaacttgtacacttcatcttgaaggggcgtattaggacaattagcattctattatagttattctaagagttagttagagtaagcattagttgtagctaagcttctctctatatatatgtcttgtcattgtaatcaaatcataattttccagattaataaaaactttttcctattctctcttcaatacttgtagtactcattgctgtcaatgatgaatccggtggaccagcacgagtttcaaggtcaaagtacatcatcagtttcatttgcacactcgcagcttctacaatatactctcttttactttctctaatgcaactttcattccaaaaagttctaaaacgggaaaccttttctgtggtactggaaatgcaaatctatacatcattggtagccatttgtgctgctctcgctggtcttttcgcgagctaagaaatacagagttttggtaaagaaggatttgcttatgtgaatactttggtttggacagcagtggcttggaaagtttgctcggtcactagtctttctccaacttgattttggtttatatatatatacatctgtacactgtacttgaattaatatgatgttatgggttcaagtgttatataaatcatgttaccagttgtactaatttatatatgtctatttctttcctctagggaaaatgtttcttattttatacattatattccctgtcataacctgaattatatcacatcctaaattaatcatgtatttgaataaaaaaaatgattggatatgtacatattcccttttgtttactttactttatatatctgattgtattattgcacataatgggaaaatacagttttgcagggcctgtattgttgttgtcttattgatgaagtgaataaaaataagagtagaggtagtgatcaatagtgatgtggggatagataggattacaagaacctctttgacccatttgatggggaacttgatcttgatcgattgatgtggatgaccccaactatttttatacagaacagattataaaaatctcaaaaagtaaaaccaatgatatgaaagtatgaaatcatttccattctcatttaatggtcacaaaaagttaaatcctaagtcaaatgagaacagtaggagcatacaataaagtagtcaatgcagtgaatactatgtatgtagccatctcttagtctaacaatatatattaagtatttatttgtacttaaactagcttattccatttagaggttaaatagtgtatataacagatatgaaacttataattttaattaaattatttacatatggaccacaaattggaattggttttgcttttgagtaacttgggagatttgctctttttctcttgtaaattaataatcaactcaattagtttagtggtcagctctcaattgattggattatgatttaataataacaatgactggtcagttgttactttaaacacaaggctttttaagttgcacacaatgtttaatttgtagtccaggttaaaataataataataataaatannnnnataaataaataaaaataaaaaaaggcaaaacaaaaaaacaaaaacaaaacaaaatactcaataataataaaaaaatcaactcaaatgtttaatttgacaaattctagtgtacctggatgttaaaaatatatttgtatgatatgaagtatatatatgatccggtataaaatgtagaattaattgaacatatatgtattatgaacaaaggatcaaaataccttaagttattaattcttgagcttcaatcccacacaagttttgatctgcaaaagaaaagaaaactgattagtgtgggtaatcgggcttccaaactctctctactctctttagatgaattttcgatttttcacatattgagtagtgagctcagggactgaaactctatatttatatataggtgagaccttccatcaaagtctttaccacaattaattatcaaatatttactcagttaccaagaatattgtaagaaaatcaaacaatactattttctaatataagatattttttaccaaaaattgtgccaagcataagtgtgtgaaagtaaaagcagggatcattgcccaatttgtcaaaaagactttttctgataaattgtacccataggagacgctgtcacactacctc

SEQ ID NO: 14491 - DNA, 3760 bp, Cannabis sativa
tacccatattattagaggtgacattatgtcgccccaaaattagtggctcctaataagtatatttgttgtagtgacccttacaagaatgggactaatacatagccgcctcgcagagaaatcctaggactcgtcgaccccggtacgtggtaatattaatgcaattattaccgtttagtccttgtatatatttatttgtgagagagaattaaataatttaatcataaacctatgtgacgcttctaaacggacaaatgaatatatacaaattatgcccccaaatatatatatgttttaatttttcagttatgattttgtaatttttatttttattttttattaaaattttatttagtgacctcctcaaattatttttttacactttataggcattctgtctctccctggatataatttttaaattttagtggagttggaacaaagcttagctatttttatacaatacacacgatcgagatgtttaataatatagagtatatactcagtatgcatgtgtaaaaataagtaaatgttccatcccatgattcgaggtcttaaccagttatagattaggagtcgtactctactgatatgtacagtgattactatatagataattaaatatagtgtatccatatgtgacgccacaccaataattaatatatgacaaatgtcaccatcattagacaaaaaaacacacacacacacttgaaagcttggcgaaatcaacctctccacttagaaggcttcttactggtcgaacattttatatttgatataactaaataattttgatacttattaattaatcggtccccgaaaaattgtataaatgcatacattaacctaaatcaatcttcataattaagtgtaaaacaataagctagaacaaaaacagtttatatccaattttataaatatttttttagagaaaatcatgaaggcagctcaagtagttgatcaagaagtggaaaccggcaaggtgtcaatagagtcaaccacgaggcgaagtgtaagccgggggctatcaatactagatttcattctgagagtacttgcagcccttggaaccctagcaagtgccattgccatgggaaccaccaaacaaacacttccttttgttactcgcttcgttcgattcaaggccgtttataaagaccttcccacatttacgtgcgtcattacatacatacatacatatcatcgttcttaatatatacatttttattttttaactataatatataatgtttagtacaatgttttagttgatctattattaatgttgacgtttctatgttggaattgatgcaattcgtaggttctttgtgattgcgaattctattgcgttcggatatcttcttctctcactcactatctctttcctacacatcgtcaaatataaagccataaatagtagaatcgtcttgattgtattcgacttggtaagaagaatgatattgatcgaggatggtaaataattataatatagtattatatatatacattaattaattaatttgaagttatattgtgatgaaacaggtaataatgggtgtattaatgggtggagcttcagctgcgacagctatagtgagcttagcacacgatgggaacacaattgctaactggtttccgatttgcagacaattcaatagcttctgtcaacgcgtttcgggttctctcattggttcttaccttgccatagttctcttcatcatcctaatcatcttgtcttcacttgtcatctctcgacgctagctacctacctaattatttaatcattacaaatctctgtttgttatttaatttgctttaatggcaaaaaataagattcacaaaagagatggaatcgagcgtacgtactgatgtaatttgtcaaacatggaaatatggaatgtggtctttaccttatcatcaattatatatgttctcaaatttgctatctaatatgcattataattaaaaactataataagataggctatagaagaatgaagagggataaatgcttcggaaaattaatatagaagtaagagaagtgtaaaaacatatacaggagtagagttccgtatacatggctaattagctatagtaatgccacaacatcgtctattgatttcaaggtcttctcgtagtaaaggtatgactcataaatctttggcgtccgtacgaaatggtccagctttaaaaaccaaacaaagaaaataacaaattattagaggaaaagaaaaaggaaagaaatgcaatctcataaaaaaataaatcgctaaaaatcacaatctcatacatctagtcaaataatcagtaaaacaaatgaaataatgctctttcaaaaaataataataaccaaaatcacaatcccatccaaccaaaattttaaagttagttagtcctatgaaattaaagatttaaacaaacaaagttataattaattattaaggagatatatgagtaatacctcggacatgttatcaaccaattcattagcggccttgacataatccttgaggcgagcttcgggcaaaatagtcatggcgttcttgagatcctgattaagatacgccgttttaagccgaatgtagaacagaacatacctccacgacatgttctccagcatctcccttatgctccggagcccctccgccgtctgtctgattctagccaccgcgtcctccggagacaacccgggctcgaagaatcgttccttaatgaacgaacgggtcccccaattttgggccactgccattggtgtcgtagccgcggaactcagtcccatgcccaacgacgctgctaagaatgtggtcacgatgcttcgacgacatgtcgtttttttttctgagctggcccggatcggtgggattttaggctgttggtgatgtagtggggcgccgccgaggagggcggtagaggtggtgttgcggatgaaaaagctactcatgatagattattattattagcacaagggaagggaaggtaaagcaggcttttgagttttgttgctgacaggattacccacctttcgccacgtggacctctttatccttctgatgtggtcctgtttttgctctaccttcgtcgaccttaattatgtgggcttgagcctccaagattcttgttttgggcttttctttccttggaactagaatacaagtgaggcttcgagtgttacactagcaccaaacaaaaacaaaaagaattattttagaaataccaaaacgataaaatatttataaaaatgtggatttacaatattcttaacaatttcacggaatatttttttttttttttggcaatatgaaaataatgtttttcaaaaaaatgtaagtaaaaaaactgaacaaagaatatccgtataaataataataaaaaaaacacttaataaaatagaagtgtgattttagatgtttttgtacataacagaatattgataaacaaacacagtactcctaattaaaggtctgtcaattatgtttttatttttttaaaaacaaaataataataagtggtgtactggtaagaattatccacccgaagcgtgaattttatttgttttaactttaaaacacgaagaaagagtcatcataaggataaccattacaatgttatgtacaatagtttcttgaggaattctcggaactttatggaattttaagaaaatataagagaagtggtagtagggtgttgatcaaaccgcttacacggtacaaactaccaacaccgaattacaatgtaaaaaaatgcagattaaaatattttgcag

SEQ ID NO: 14492 - DNA, 3487 bp, Cannabis sativa
ttctctctcggcaacggcgactcatccacagtacgccgacgccgacggcagtggagcttaggtcatctcagtcagaagcagcaggtcagtagtttcattcatattgttttgatttgtcttctagattaaactcagaatgttcaattgacactactgtactcacttacactcacaaattttatccataggatgatgaaccatcgtcaagtatcatatttctactcttaaggctcatatttatgatgttagtcttaatttattcaaaacatagaatttgaactcaaattgattatcaatcataatttcagaaaaatgccaactttatttgcaaaaatcagagaatagtggtatgagattttgtaagatattgttgtatcaactatgcactctttatgtttgatgaaagtcgaagtgggtgtttaggtatgtatttttggatgagcaagaattgccctttttctgaaacgtttagcttaactgtttgaattacttaatggcttgatgattatttgtagactttgaatatcattaggaaaaagtctgctatttatgaactagatttaactggttgctcattttggaatatgtgaatttcaatgatgtgaaataatttgtttgtatactttcaagcatttttttggtttgaaagtatgtctaattttaagaagtgaaatgataatgagatggtgttgcttgaatcttacattttgtattgagaaaaagtaatagtttagaaaccttaatataattgaagcctcttgaatagctgagataatctcagtctgcaatatttttccattttttgacattgacgttcatttttcttttccatgcaaaagtggtgaaaaacccaatatggctactctgctcaagtgctacaaacccttattatcaatccaattgtcttcaattcactactccactcggactattcaagttgcaactcaccgacctcacccctttttcaagtctagtagcattcgtagcctcaattcttcatctccaccattgattgctaagaaaactcaaggtgaatccgaagaaggtgcatcaaagaatccattgtcaacaaacctatggttgtacaacacaatgagcagaaaaaaggaggttttcaggcccaaagtggaaggaatggtagggatgtatgtctgtggagtcactgcttatgatctcagccacattggccatgctcgcgtctatgtcacttttgatgttctctacaggtccttctctttcatctttttcatgacaacttttgtatcttttagatattaattagaatgctatttgtgttatctttgtttggaattaggcagatatttgaagcatttgggataccaagtatgttacgttcgtaatttcactgatgtggatgacaaagtaagtagccttttgttgggtttgttgtcaattatgtaaatttgggttcttagctctgtaaaagtacaatgtgttgcggaaggttgggctgtataccatgtcaaataccaattagtttccatatggtatgacaggatagcatagctgagtctgcaaaatttgtcaaattctgtagataattgctagagcaaaggagttgggggaggatccaatcaatttgagtagacgcttctgtgaagagttcaatcaagatatggtctatcttcattgcctgccgccttccgtggaaccacgagtgtcggatcacatgacccagattgtagatatgattaaacaggtagttttcttctttctaatgctcaataataactgggaagttccttcctaccacttgcatcttgcatattctttaaatgatctatcacataaagcttgttttggctttgtcactgtgcttttgcaattgatatttttttatcagctgcattgtcttgctgtgtaccatttttgcagaaagaaaataatttcaagtttggtttagagttctatcattttggccttgattgtaatttatttgtcattgctttattcacagataattgataatgagtatgcatactcagttgagggtgatgtctacttcaacgtagacaagtttccagaatatggacgcctatctggtcggaagttggaagataaccgagctggtgagcgggtagctgttgactcaaggaagaaaaatccggctgattttgcattatggaaggtaaatacctgaagtgtaggcataaatacatattgtaaatttcattggtaatccaagtaaataatctttgaatttctatactataattacaatgtacaaactagtggaataacttttctaatgtggaaattcaaaaaaatgttatcacaaatgtcttgcagtctgctaaggaaggagaacccttctgggagagtccttgggggcctggaagacctggttggcatattgaatgcagtgccatgagtgctgcatacctgggttactcgtttgacatacacggtggaggaatggaccttgtgtttcctcaccatgaaaatgaaattgctcagagctgtgctgcatgcagacaaagtaatataagttactggatacataacggatttgtcactattgactcggagaaaatgtccaaatcccttggcaacttcttcacgattcgtcaggtaaactaatcattaatcacctttttcttaaaaggaaacaagaatcacattaattgtttattctattttgttacactttaatattagtgaaattactgattaggatttaagtgagctgtagtatagtggtgttaaaacagttaagggagacttagtataaagagagagctgatcaattgtaagaggtgagggattgctttgttgagtaaaaattactcagagagatatctcgaaaagtttggaactctgtaatttctctttgatatcaataaaatacctattttctttttctttcaagtattggattagatgaatagtgtatcacatttcgagttgatctaagttatgatttttcaggtcatagaactataccaccctctcgctttgcgacttttcttgttggcgactcactataggtctccaattaactactctgatgcacagcttgaaagtgcttcggaacgtattttctacatctatcaggtattcggttctccttattgggttgttaatttaagatgttcgaaagagttctctagcattttgtgcctattggaattggacttaaagttactaaatttaaacttgtttcattatagactttacatgattgcgaagacgttctgagacaacacgaagtaacagctctgaaagattccattccacccaacatcatggaagagatcaacaaattccaaaatgtttttgtggagtctatgtcagatgatcttcacactacagttgttttggctgccttgtctgatccattaaaaaccatcaatgatcttctacatactcgtaaggtattgtacagcaagattttataatcttattgtcatcgttattgattataggtaaagctcaaatggtcagacatgtggtttgctacaaaatc

SEQ ID NO: 14493 - DNA, 7806 bp, Cannabis sativa
gcgtttgctgggtttggtttaagctgaccaaaatatcaactaattgaagtaacaaaaaccaaaatactctctacttaagcaaccggggtagcctaagtggttgaactgttagttgatcaagttagttttagttggtacaaatacaatgataaataaataaaaaaacgtgttcttttttttttttaaataaaataaaataaaataattaggtattgaatttaattttgaagtaattaaattacatcacaggttgtgggatcaaactcgcttgtgctggtttcgctgtgtttggtatcgattatgagggtcacggacggtcgagaggggccaggtgttacatcaagaagtttgataacatcattgacgattgcaatgattttttcaaatcaattatatatatatatataaaaagattggagtcaacattatataaagatcttaaataaataataatgtaataattgaatgatgacgtggcatgcagcaacggaagaatacagggataagggtaaattcttgtacggagagtccatgggaggagctgtggcccttttacttcacaagaaggatccttcattttggaatggtgctgttcttgttgctcccatgtgtaaggtaacaccacattattaatgtttactttggttgtcgttttgggtttaactcttgttcgtttgttgttagatatcagagaaagtaaagccacatcctttggtggtgaatgtactgactagggtggaagagattataccaaaatggaagatagttccaacaaaggatgtaattgattcagctttcaaggaccctatcaagcgtgaagaggttaaaatttactgataaacaacatcattactaagtacttttagtcaataattcttccttactcgattggttaatgagtgcagataaggagcaacaaacttatctaccaagacaagcctaggctaaaaacagcactagaaatgctcagaacgagtatgagccttgaagatagtttacacgaggtatgtctaatgtctctacattattaagagctttgtattaagattggaaaatccattgttgactctttttcttttttcagataatgatgccattcttcgttttacatggggaggcagacacggtaacagacccggaagtgagcaaagcattgtatgagaaagctagcagcatagacaagaccatgaagttgtaccctggaatgtggcacggtttgacatcaggggagcccgatgagaatgttgagattgtgttctctgacatcataagctggctcgataagcacaccaacgaacgagatcatatcacgagcattcaacgtcctattcccgcgctcagcaatggcgtcgtgaggcttgcaaccacagcctctgtgttgccagagaaagtgagcaaaaagccgcggactcattcacctgtgaggtatttgtgtggactgaaaggccgccgcttgcaacatcactctgcaatgtagctcttgctcttgttgtattgaatatagtaaactaaactcaggtttataatcagatcttttgtgctttagatatactggacttagattatcatcccagtgaaaaatgtattatgtgtaatttactcgagctttcaaccaaggtttgagaaaatgacaagagtaactatgaaaagccattctagcaaaacaagaaaataatatgaaagagagtcaatctgagtgataaactttgttttggtatttttggcttttggtttatttcctcaaaaaattattaactaccactgaagtaaacaatgttctttcattctgtttgttgggcttgaagctcaacttttgtcccccaccttttttcaaaagtcaagagtagctatacagtaggaagaatgtgtaagctaaataccataacaaggaattttaaaaatcagaaagctcatcgtctattgaagcttaaagagggtaactgatacaaggttacaaaagatagacgtaaaacaaatgccaagtggaccacctaaaaggatctattccgaacgataaccaatatagctgtgctacctcttctgctgttactgtatcttttggaagtaggggaaaagctaggagtactcttttttttctagtaagcaaacaaatttctttcccaggtaccacttcaaagtataaatttccctcaaacttgggggattaagccgttgtggacgaaccaccttccttgtggtcaccaaaaatgcgttgacgaaagtccttgaccataagaggaagacccttgcgaagggacacctttggttcccagcccaattgttctttagccttggtaatatctggtttccttttgtgtggatcatcctctgtgttgggcctgtgctcaatctttgcatctgggtcaatggtttcctggacaacctgagaggatgaacacatatagaacgtggtgttcagatttcaggatataatataagtggtcagagagtacatgacagctaaatagatgaatagctaattacaaaacccactttctattttattcataattaaaactacgaaagtcaatgttattcttcatcttaaagagatcttgatgccaaaaaaaaaaaggcttatctagtagccgacccgagataatgtagaactactacgagacctgttcctaatatacaagctggtcttgactatatctattgcagttggatctgacaccgtctaccaatattattataatgagattagattgctgaatgaactcatacaataaataaatatgcatcactgatgacaatgacagatatatcaccaacaaatggaagcgcatggtcaacgggagtaatgctcttaccttggcaagttcaagcatggtaaattcaccagggtttcccaaattgaaaggtccgacatgttctccttccatgaggcgcataagtccttcaacctataatgacacattttaaaagtcatcagcttgctacaaaactaagattaaaaataaatacaaaattgctgcgtaaaattcttccatagataattacagaaagacagagaagtggaatcactcttccaattaattgtcccagcttcgattaatattaaaataacacacacaaccctgcctaccaccaaacaatgaaaatattcttttgagcccagccaaaatggacagccctattctctacaacacatcagtaatcagaagccatctggtgctcatcatcaatggcattaatggaacaattactttcagcactaaattagaaataaacccagcttcattttctagagggagaaaaaaaaagtcagttattgaaaaggacatctatttattaccatttgataagaactttcaatgcaaaacaaatggtggtatctatcaacctacggtacaataaatatctgggaagggatggacccagacaacatttcaggaggtccatccctctgggccacctgtagctaattgatattggctctatagaggaatagatttacgacaatgcaggtttaaaaactggcgcaggttgtaatgtgctatgcacatggaaaaaatataaagaaaaatgggtgtcagaacctctagagtttcaaacttgcggttcaattaaccactccaataaaaatcttatcttcaagctagagtggcggtttttacaattcattaatctcatcaaaaccaatcatatgatatgaaaagaagcaaactaggttgggccaaataaatatatttctttttttttttgaaaaaaaaggtaaagcaactaaggacctggccgggcaccaaaggaactttaaagagaaaaaaagaaagaaagagactgtaaagttgtgtaacttgccagatcagaaacatattggaagctccttgtttgcttcccatcaccataaactgtcataggctccttcctcaaagcctgcaaagtcaccaataattaacgtttaataaaaacattaaaatatgttaagaactccttttgttctttatttaaataaaaaacacatacataagaataataatagtatacctgggcaacgaaattactaacaacacggccatcatcaatgcacattcttggtccatatgtgttaaagatcctggcaatcctaacctgcaccaaaagggtaaaagtaaatatttatttcttcccccaaaagaaaaacctttttacatccatgtgaaagtgtggagtgcacatatcacaaaatttagtgtttgtatttccataaaaaaaacaacctttgtcactttttgtttattttaattaattaatgtttccaaaagttagattttcattataaattcatatggtaaaaacaaaataagtaaaaataaataaaactaacctcaacatcagcgcctctgtgataatccatggtcaacgtttcggccgtacgtttaccctcatcgtaacaacttcggacacctgtcaaacatacacaagcactgtcagataaccgacgagcactctgtctgtttatcagtcccaccagctgacaattacataactaccctttccttttccttaactctttttcagaaagataaataacaaaataccctgcctgaactactggacgcaaagtgcgtttaaaccgtcggatcagtggaccccgacaatcagggccaaacacgttgactgtaaaaacaaaaaatcagaccggatctaaaagagtttggccgtgtgggtccatgtggtgaggaccgactcgctggagaaagacaaagcccccccaccttaaaccccgtttgaaccgctacaacatcacgattcacatttcacggaaacctcttggcgcaggttaatagggaaataaggtacttaaatgctaacgtgcgccgatatcggtatctgactaattcgatcggcaattgagaattgaaaaaaattgagagaaagagaggaaactgaccgatgggattgacgtttccccagtaagtttcaacctgaggatgttgcagaggatcaccgtacacctcactggtgctcgttagcaaaaaccgggcacccacccgtttcgccaacccaagcatattcagagtacccaccacattagtcttgtgggaataagaattaaggattttccaaatataaatcgaaaataccatttgcgaatctcagagaaacagatttaaaatttgaaaggaaaactgaaaacagtgatatttaaattaaatgtggaaaaaggatatgatagtcttaacggggttgaacttgtaatggacaggggaggcagggcaagccaaatgatagatctggtcaacctcgaggagaagtggctcgacgacgtcgtgtcggatcatctcgaatctggggttaccgaaatggtgcatcacgttctcttttcttccagtgaaaaaattatcaacgacaatcacgctgtcaccacgctccatgagacggtccacgaggtgagacccgacgaaacctgctccgccagtaacaacgatccgcttcccctttctcttcagccccaacggaatcttacccccggaattccagttctgaatcccgaaacgacgctcgttgtacacagggcgatgagtcaagtggctcgattcgagctcggcagggaacgaatcaaagatcgcggagctgtacctttggggagcttggttggacgggagaagcgtgaaacccagagtagctatagcaatgccgatgagaacaaatgtcaaccgctgttcgcggaggacgtatcgaatcggacgggtcacggctaaccatggcttgggtggtttcggggagtaggtatcggccattggttgggtctcatgacccctgaaagtaagctccgaagtcattgaaacccttgtcttcttcggtgaaaggtttcgattccggaaaagtttggggtttcgagatacgaattattatttgttttgatatcccaccctggaattactgggtgactcgggattcaattcaagagagaagaacatatacaaatgaaagaggttgaaaatatttctgtatatataggagtagggagaagaagagaagaaaaggttagtgaataataataataataacaacaacaacaaataaataaataaaaaatctgataaaaaaaaaaaaataaattcaccggtaactcgctctcgcttctcggcgcgtggcttaagttttagttttagtttttcttttctctttttcttactaaaattgctttgtatatatatttgtgggtttctttcaaaaatatatatttgtgggtgattttataaagcatctccttaaaataaatttattgatctactttctacttgttttgatattcaagtaaaaatattgaaaaatttgaatattttatgcgcgtataaaataaaatagtcacgtatgcaacacactgtttgaaaataatttttagtgtgctaaactttttagaatttcttaaaattacaataaagatctatggatgcatccttttaaaggagtacattatagaattttcctatatttttttattgaggagtggaaatcatttattataattctttagttaatattagtgactaaaaatatatgttagaatattttttaaaatttttttatggtttgaaggtttttgaaggcccgtggtaactgaaataccaaaaattctattttcgacattataaaccatttgtaatttttcaaaaatttatgagatgatactataactataacaaatactgctataaatttttttttaaaaaaaatatatcctaatttctaatttcaggcatgaaaattataataataaattgtaattagcactcctattttttatttataaaaataccaaataattcaaactagaatttttttgtggatttatgctaattaaaataatttatattttggttagtagagggtagggggcggcgttccatgctcatgaaccaaaaccctttaaatatcttcccaagttggctattttgacttggaaatatatgtttagggtctaaatcaaatccttatggtgcattagtctcgatgtgactttaccatattttgtataaaacatccacgaagccccatcaatcatgttccatattatttgtgaaatttcatgatatttagaagaaggcaaaaaaaaaaaaaaaattcatagcttttacgtaaaacattataaataaattagaaatcggtttcactttcaccatgtcacaattttattgctagctattaatttgttactttgctttaaataattcgtatcaagggtacacaagacattattaaccatgtagatttttttattgtgatcatatatattgaatgatcattattgaattgggtactggaatttggatttttattggttgtttctaaatttgatgctcttaccaaccacctgagttttttatttggtaatttattaacacaaacccaataatataaccatgtacgttttcattcattgtttcaaaaaaaaaaaaatgtatttatattttatttttatttttggtacttatgtgtattacaataatccatatttatcaaaaatcttcttttcttttttttcttttttaaaatatatccctacccttttaaggaaacgctcggatatttatatgaatgattaaggagaatcaatatttaataatatgggggcatgtgtcttttgtgacagctcttctagaatttttaattttccaaatatgagggacagttcaccttaaaatttaaacataaattggatgagcaaagaaatatattatagtagtacctcccctgattcagttatgacctatgacagtccttctaatagaagtagaacctactgaaattaaatggcttatttgtatcacaatctaaattttgacaaagtttatttacaaagtttttttttttttt

SEQ ID NO: 14494 - DNA, 5009 bp, Cannabis sativa
  modified_base (2298)..(2301): a, c, t, g, unknown or other
  modified_base (2484)..(2491): a, c, t, g, unknown or other
gcatcatcaacaaaaggaaaattaaagggaaaagacttaataattacgtgacaaataattattaattgaattaaagagttaagattgtaagatttatttaaattattgttcatatattgattaatcccattaataaaaaataatttaatatataaaccctatttgattaaagtgatttttgtacatagtataattcttctgttttattatttttgcaacaaattattaagttatgtatattattatattttttttttagaaaatcataagttaatatcttatttttattattctatgatatttataataagttttttacaaaaattttttctccatttattcacacactctctccatgcatctccatctaactatcataactatacatatgtttgttatgtacatattttttttttctccatcttattcttttttttttctttcatatgtcaaattttcctttttgatttcaaaatttcaatttgggaccatcaaattatatttattcgttcatactttctcttcatctctatttcattattataattatactctatgtatatagggcaaacttattgagaatataatgacaactataagtaagatatagttataacataacgattttaaatatagtgtcatctataagtgagatacggcgatgacaacaattttaaaatgatataatatgagttttttttttccttatagatttatcaattgtactttaaaatgatataaggacaacagttttgaaatcatatatgataaattttctagatttatcaattgttacattttttttaaattccaattcagtttattcaaacgatataatatttagaaaactaaccttataataatattaatctataataaactaattaaataagaattatcttaacttcaaaataatttgtacaatattaatttatttttcttatatttttaagagtaataaaaagtaaaaatttagtagaatagttacttattttattattatatatttatataaaatattaaactttgaagttttatataattttatgatttgattatagttgaacaattacaaccgcatgcgaagcgggatttgtttcctattttaactataaaagagagatatggaacggtctaaaatctttctaagtagcattatttattctttccttaattctcttattttttttttaattttttattagtttcataatttttttttccctttttctaatatttttactaaaaaattgtataaaaaattattatttttaacaaaaccgtataaaacatattgaattttatgtcttgatatttagttaattattttatcatttttttaaaaaaaaaaatcactaactaaatctatctaatccctaatggtaggggtacaatggcaccagacatggctgaagctttagccattaaagaggcgttaagttggattaaggatcatgaatggcataatgttaaactcgagtctgattctcttccaagttattcgaagtaacaccaccatggtttcgcctcttgggggagtggtgatggaatgtcgaaagcttttatctattttaaacaatatttctttgtttttcattaaacgatctggtaatatgactgcacacagctttgctagagcgtcacattcttttccagattgagttttcagtgggaggaatgttcctactgaattacagtcttgtcatttggctgatttagcaaattaataaaattccaatttgcattcaaatatatatatatggaacacttctcaataagtattatctattgatggttattaaataattaaactataaatattaactttaaaaatattaaactattagattttgatccaataacaaataataaaagaaaaaattgaatttctatgtttaatttagctatttaattatcattttttatactatatcaaaaatatgtttatatacaaactacttaagtcaaactcaacttttttttttaatttttttttcagtcgatggaacaatcccaactcatataatgtaaaaatgagagatttttttttaataattagataaaaaaactaagcataaaaactctaatttttataatattacccatgaatgggtaatacctattaagagtgcatccatatatataaggaatacttcttaatgggtattacccattaatgggtaataaataaatttaactacaaatattaattttaaaaatattaaactattagatttttgtccgatagcgataatataagagaaatttaaaatatttctatgcttaatttagctactnnnntaaagaaaatatcaaaaaatatatttttttacactatatcaaaaatatgtttatatgaaaaaatatttaagtcaaattcaactttttttatcacttttttaccaaaaaacatttttttattattatttttttcaactgatggaccaattccagcccatgtaatgtaaaaatgagaaatttttnnnnnnnnataaaaaaattaatcataaaaactcaaaattttttaatattacccgttcataggttatacccattaaaagcgcacccatatatataaaaacttttgtttagcatgcacgtgatattttatttttattttttcatgcataattaatcatataaacttttgatatctctcctcctccgtttttctcttacaattaaattctccttcgttttttttacaattaatatgatttgaaaaggtaatgttctcaccttctcattatgcataaattttattatgtataattaaatattatatataattcatgcaattagttatagttgcaggtatatatgtttttataaatggaggatataaaatacttatttagtaccttgtgttttatcaaaatacgtactcgataccctttgttttagagaatgatgaattggtacctcatatttgcaaaaattacatatttggtaccctggttgtgtttaaattttgaaaaattccaaattaccccttattttattattttatgtgcttattaactccaagacctacttcccctgctccttccaaacgtaaattagatcttcattctccttctaagaggatttctaaatgtcatcgatctatggaggaagagtctaattcggattttgaacttgaagatgagttcattaaattagcaaaagttgccaaggtcagtcgtttatttttgtgttgatttagggtttttgtgttatatttttaaaatttatgttattgtgttttgatttttacgattataatttaataatgttttatttaaatttgtatttgtatgtgtttgttgttttcaattgttttataccttctataacacttgaattttcgttttttttttatttatttttctgtaggggaagggtaaatcccctattctgaatattcctcccgaagttgtgttggaagagatttctggtgatcttattgttgaggtttgtggacttttttttatttctttttattgttttttggttgttttggtgttatttttgagttatttttaattgtatttgcatgtttattattcattcattaacgatattaagtctattcttattccaacccagtcaaaaatgttttcccaaattgtttttggtcatttcctccgaagtttagagtatattattcattgccaagtcttgcacggcctgttgttgagggaagttcaacagcctaatgagatgaattttgagtatctgtttgtggaaagtttcttagatttagtatagaggaatttgcctttgtcataggtctagattgccacaatataaagtctaatatttttcagttcaaacagtgcaagaatatgctagtagaacgttgtttaaagggtaataaaaagattaccaagaatgtgatttaagttgcttttactgctaacgaccttagggatgatgatgatcttgcagtcaagttggctgttttgtattttgttcagtgttacttgcttggaggtcctcctagaaaggttgtttctattgaggaacttgatattatggatagtggtcgttataatatgggtgggggaaggagtattttgagatgactattgaatctcttaagggtaagattgatgctggtattaggactgttaggaagaaggaaaaggatagcgggttttataggttgttaggttttccgtatgcattgcaagtttggttttttgggtgttgttcatacgtcattgggaaactttctttgtattcaaacataggcattcctaggattcttaactggcctaaaatgccaaagcttaaagtttctcagctgaaaatggacaatgtgagcaatatcatcttcaatcggtctttaaaggaggtatatgtgtgttgttttacttttattttttgttgttttttcattttttttttttatgatttgtatgtttattcacttttattccttttttttttttttctcttttttggctttttttgttacagttacaacttaaaaatatttgtccaacttctattgagagatctagtttgaatttggctaattatttttctagtgacacaactcctttctttattaaggttaaaggtaaaggtcatcgtgaattcggttctaaatttatgcccaatgcttttgtggaaggtgatcaagttggtccatcatcgtctagggctcatgagcatgtcactcattttgagtacgaggatttaaagaaagatgtgtcccttgttcttagccaacagtagattattatgtctgcttttgtagatttgaacagaaagatggatactcttaatgagatattattttttgtttctttttttaatgtagtagttgtgtagtttgtgtattgttttttcatattgtttagggtttatattcgaattttcattatttttttctagtctttgtgtgatggcttcatatgcccagtactaaaaggcaggtacatagccacttatagtgtacttaattcatcatcgtaaatacttagtacggtaaagatatagtttttattagaaagattttg

SEQ ID NO: 14495 - DNA, 6308 bp, Cannabis sativa
  modified_base (722)..(726): a, c, t, g, unknown or other
ttgacatggcggtcggtttcagtttttttgacatggcggtcggtttcggtttttgaaataaaaaaaagtaattatactaaaaaactgccaaaaactacccaaaactgccaaatcgaaaactaccaaaaaccgtacggtcaattttatacggttataatttctaaacgttcggttacggtgttcgtaaaataaaaattttaaccgaccggtcggttataaaattgtaaaaccgaccataaccgaccgattttcacccctagcgaaacaaattggtgagcatgagttttttatacagagggtgatacttgaactttttctctttggctgcgagatggaatctccgagacaagtattccataataagaacaattaaaagaagagatattggatcctcttgtctcaactcctgctctcttttaaaagaatactgatatctcacattcataagcaaggtctatgaagtatttctcacacaaattattacccaacttatgaactttatagagaagcaataagacttcaaattatttattagtttaagttattaaattttttatcgtcaaaaattaaatttaaatatttatttaaaaattaaacttaactatttatgtaaaataatgctttgtaataaaaatacagcgggtgaaaaggaaaagcgagtaatgttttaatacggtcgattcattcagttcacgcgatatataaataataataataataannnnnataataataataataataataggcgctagcctttgattcataatccgtcagaaaaagaaatctatttgcttcgcaattctctctcctccaatgtcttcaaaccctaaccctagctccatttcttgatctcattcaacttctacaatcctctaacagggcttgagattcgtcgaaggattctattctcttcgagctttctctgccaaatttctcgacttcttcgattgaacttgaggtgcgtcgagttcgaaggtgttatttgcgattttcgaagaggaatcgaagtactccgcgcgaagttcagatatctgctacctgcgttgtttgctacttggatcgattttcggaactgtggatttctgatcgtggtcgattgtgtttcctgaagttttgggagtttgcgcttctccgttactcttaaagagggcttttttgttctccataaaatcggtggttttctgctcggattggtgatgatcggcggtggatgatcacattgacgaactgattctcttgtattgaatgttcgttactttatccagattcatgtgtaattgcatcggagaaaagcctttgtaggattcgtcttcgaagaccttgtgaagagctctgcgcgttggcggttcgatatgtttgatcctttattgagtaattgaaaaaaaaattagaagaggaaaaaagagtttgaatttttgtacctttaatttttttttttttcaatacaaggcctttatattttttttttcagaggccttttgattgatatatgcttcagggcttttgattgttcctgttttggtataatatttttctcttagaaaattaaaagaatttatttttatcatggcggtctattataaatttaagagtgcaaaagattatgattcaattgctatggacggtcccttcatctcagttggtactttgaaagaaaaaatatttgaaaacaagcatttgggaaggggtactgatttcgatcttgtggtcaccaacgcccagaccaatgaaggttggtttagattttgatatcactttattatcatataaaatatgttaactttagacaaaaatactagtcgtaggtggttaggttatgtcctaagcataatgtcaatgaaatggggtttttttagttgctttattattattattatatgagctgctgtagttgtataggagttatagaagagatgactgccgatacctcctcaattttattccaattgccatattcttccatgactaacttccacaatatgatgtatacatatatatataatatactataatataatggggcaaaataatattaatttatgataagaaatcttgctcaaccaaaatttgttgaattgccgcaatttaagagggggttacatggtgatcacgattttgaaatgctgttggatgatggtttgtctgtgttctacttccaaggaagacaagggcatagttctgtattggttttggagggaatggggaggggttactaactttttgttctcttcttttcttttaaactatgtatttgtgttattatcgactgtgttctctgtttggaatttcagagtatattgatgaagggatgttgataccaaaaaatacttcagttttaattcgtcgagttccaggccggcctcgtatgcccattgttactgatccaaagtataatctcaaaacctctaagctgttggttacttattgatttcttagagcgtgtttgtcactgtacagtcaatcaattagcatagtatcagcagcattgatgccatgtatctcaatatatcaattatgttagttttttagaatgtagttgtaggttgtggtttgttggcataaaagccagccattactgtttcgtgatttttgttgcggtacgcatattatccttgtgatgtggaaatgttttttgctgcagtccaatggtggaagataagatggaagaacttgaacctgaaaagactagcttctcagtagctgattcatctgccatgaaatatgtaatctttagtctcattcgtattaaatatgtgaattgatattagatccttgcactatgattttcaattggtaattttccatctattaatgttctaaattgattttatagcatgatgattcggaatgggatgatctggggggcgatttatatgagataccagaagttgtgccagttcaatccagtcatgtacttccagaagctacccctaccaacaaagctgacgaggagagcaagctacaggctttgattgataccccagccttggattggcaaaggtgaatttctgtttattagttttcttgattgcactactaattttacaaaatcttgatcttatgtattatcacccttttttattcagaattatttcctcggtttttgttaatttgtaactctattctgagatgcagacaaggtcctgaaggatttggtggtgctggtagaggttttggcaggggtatggggggaagaatgatgggtggacgtggttttggtgatactctgctcctaatgtttatcatatttttattaacagtctagtgctcagttattgttcttctgtcccttgcattatgaggctgatatttttttgccattggtttgtggttgtgcaggaatggagaggaaaacacctccacagggctatatatgtcacaggtgcaaggtgccagggcattttattcaacactgccctactaacggtgatccaaactttgacatcaaaagggtgaagccgcccactggcattcctaagtccatgctgatggcaaccccagatggctcatatgcattaccaagtggtgcagtagctgtgttgagaccaaacgagtatgttacttagtaaatcattagaatctttattgattttcagtctttagtccttgagattaactgctaagagttgttaaagctgtatatatttatttattaattttcttagagctgcttttgagaaagagattgaagggtttccatctacacgatctgttggagatctaccccccgaactacattgtccattgtgcaaggaagtaatgaaagatgcagttttgacaagcaagtgctgctttaagagcttctgtgataaatgtaagttactatcttaattccattaattttaatattatactattcacttctttttttcaatccatatttcttttttgagctgtgctttattgcatacgtccttggattatcactaaacatcccgaatcatctaatatattatctcacattaaactcacattaaaattttcttcaggtgtcagggactatattatctcaaagtcaatgtgtgtctgtggggcaacaaatatacttgcagatgatctattgcccaataagacgctcagggatacaatcaaccgtatattggaatctggtaatagtagtgctgataatgctgggagtacatttcaagtacaaggtttgtgtctaagtgatctggtatttattttgactagaatgcaatgtggtttctacaactaatttggattggtttcttaactttttaagacatggagtctgcacgctgcccactgccaaaaaatccatctccttccatgtcagctgcatctaagggagaacatagaccatcacctgtcaaggaagaaaccttaaaggtagagtacatagcagatgaggccaagcctataatagctacacagcaaacagtagagaaggtgaagactgcgagaatagctgatgtatctgaacccactcatgaatcagtgagtgttaaggaaccagcatcgcagtgcagtgctccacttgtggaggaggaagtgcaacagaagctaatttctgttgaggcaggtaatgtgcaattcataaagttcttattgactggaaattataattcaatgaatttttattattgttaattgaaatctatccaagacagccaattataaagggaattatgggaagtgattatgcaacagaagatattaaatatgtgtcattttaaccagctgacatttttaatatctttttattacaggaaagaaaaagaaaaagaagaaagtccgtatgcctgctaatggtgcgtgtttcgtgtttctctgattttgtagtcccacacttatgtttgttagtaatttgtacatcctatattgctataatcatattcatttcatactttagttattttgacacagtaattatacttgcagatttgcagtggaaagcttctcaagatttcccagttgataattatatgatgcctatggggccttctgcttataatccttcttataatctctcttataatccttctgcttataatccatactggggtgggatgcaacctagtatggatggatatatgaccccatttggtggacaaatgcctggacaaatgcctggacagatgcatggacagatgcatggacagatacctggacagatgcctggacagatgccttatatgggttataacataggacccttagacatgccatttggtccaggttttgttcaacaagatccatttggtggtcagggttgtatgtaccctgttgctcctcctcagaggtatttaggagttgaagacactggaattttgttatgttattttttaaaatctatatatatatatatatgggtattattgtgttagatgacaatattttttgttcaataagtttttcgttatcaacgttgtgatttgagctgttttctccgatgcaagtcattgtggtaatcaaacggctactgatattgttatcttttgacgtttacagggatctgtcagattttggaatgggtaggaatctagcaccaccccaccctctcatgagtagagaagaatttgaagcacggaaagctgacttgaggaggaaacgtgagaatgagagacggggcgataggtaaattgaaattttttgtttttctttttgatttgtcatttcattattagactaatttatgaaatgttatcttatctgtggagtttgcctttagctagtatcaggaaaaggacttagactagactactctatgatctgattttattttctcatatgaattagaaattgccttaccctctagtattagatggctgtaggttgcaatttgcaccattgcacaagttttaagctctcacactacactgaatctgacatgggttatttatgtctgtttattgctgaaatccttaatttaaacatttgtcgtatgcatttaatagtggattcattgtcttgcagcagcagggatttttccaaagatcaggattttggtcgagaagtgaacagccgtggcggtgccggtccaatgaaacccaaatctgtatgtctcttattttgtcctaatttttcttttatttgtgtactgcagcagcagcagcagcaggtacatttatggttcttagcaagtttttcacaagaaggcactaagttgctaaagaacaccaatttggcaagaaatacctctcttttccctaccaaaaaaagaagatatttcgttttttcagcagctagaactttagaattaaatatagtagggacgtttgtcttttggttattatttaaactttcaatttattttaattttatattttttctaatgattcaaa

SEQ ID NO: 14496 - DNA, 1534 bp, Cannabis sativa
tttttctacatgcagaaacattttaatgtggttagtatgtataaaaaagacttcagcaagtcagacgaagtacttcaacaaagattagcatctgctgtatatcttcaagtcagtaccattagccaggccttaatatttgtgactcgttcaaggggttggtcatactttgaaagacctggcctcttacttgtttcggccttcatcattgctcaactggtacacgaattgttgcccttgtttttttttttttgtatatgaaaccaagtttcaaccacatcttatctcacataaagtttatcacttaaaatatctcatatgtagattgctacagtaatatcagctactgcaacttggaaatttgctggcatcaaaagtattggctggggatggacccttataatttggatgtataatattttgacgtacttgctgcttgatccactcaagtttggcgttcggtatgctcttagtggcagggcctggaatttggtagttgaacaacgggtaagatccatcttcattcttcctcttatgctttatcattaatcaaagtactgaataactcactgtacaaatctaactattttgagatagagactaataaagattgatcaaaagcgaaatgtttctaagaatccttgtttgcatctatcattccagactgcatttacaaacaagaaggactttggaaaggaagctcgcgaagcagcatgggcgactgagcagagaacattgcacggtcttcagattggagagacaaaaccaatttctgagagggccaccacttttagagacataaatctcatggcggaagaagcaagaaggcgagcagagattgccaggtaaacttagtcttcaacttcattcaacagtctagtatgtctagtaaatgagaagaaagtgtcagtagtagtttgagttttgaattatacaagtcctttcagtcatattgttcttggtcattgtctaaatttgcaatatgcttaatcaattgatttggattatgcagattacgggagattcatactctaaaaggaaaagttgagtcatttgccaagctgaggggtctagatatcgaagccattaaccaacactatactctttgaatattgatgtttttcttaaacaatatgtatcatgtttgctgaactataaaaatatttcaagtttgttattcataatcttttgtgttaatgtacacaatgagttgcataatttcttatgcttttactaattacataacgaataaatttctaaaatatgttcatgaaacggaaatgcatttttatgtattgtaaataaattcacttattgtcgggcctagcaacattggggggcatgtgggaaatgaactttgggttggataaattggccggattcggtgttagttgctatactgcctgtctgttccatgaaccgttgaatatagtccttcaaaggtttctcttatctttgctttatttcgacaagattctccagttgtgaaggtatttgtcttgtaacagagaactgaagatagaactcttagagaatt

SEQ ID NO: 14497 - DNA, 6736 bp, Cannabis sativa
  modified_base (1026)..(1032): a, c, t, g, unknown or other
  modified_base (4107)..(4108): a, c, t, g, unknown or other
  modified_base (4740)..(4742): a, c, t, g, unknown or other
  modified_base (6064)..(6082): a, c, t, g, unknown or other
  modified_base (6681)..(6705): a, c, t, g, unknown or other
aaaatcttaaatgaaactagcaatacgtggctcgccacgtacattcacctagtatatatatatgcacatatacgactttaagattgaaccgaaagagatggacaataatagtgggaaacaataatatactaatgctttttgtagctttgtgcattaaatttcaatgctaaattttgtgattactctcttaaacagtattcttttctacgtccatagtttgaattgaattctaatttgtctaacttgtatttcgaattggtattgatttttatttatgttaaatatatgaactaaaaatgcctaaaaatttatcatggaaaagtattaagtcacatacaaaaatataatttttgtaattaaatatgtttattttagaggcatactattgctagctttcaaacaaatacattatttttgttgattatagttacaagtttcgtcagaaaactagttgttactctagaaaaatttggtgttcatccgaaaaactttatttgtaaagttgtggccagtccaaatggttcttttggatagcttgtcttcagtaagtagaatcttctagatagcttgttataaatccagagatgtccttctaaatagcttgtgtcaaccttgaacacctatccagaacatgtaattgtcttttagattgtccgaacaaaaagcttatttctgaagctgacgtagaatatgtgggcgctaacatgaagaatttaagacagcacaattagccacaatagaattggagctaattttagcaatgtgaaatctatatatagctatcatctttgtaatccataaataatcagaccattgaaagcttgagcaaaaattgtgattgtgtatagttaaagagagaaaatctaaactagggagaaaaagttcatcttgtaatctctgtaatagtttgaaagaattcttgtaaccttgaaaacactaaaatcgataaagatatgaatgttgttgtttctactgagacgtagcgtgttgcacaaaatcaaaaagctgtaagttttaattattaannnnnnnatttattataataacaaataataatatctataaactaatataaattattactttttttcacagtttggagaaaagcacgcatacaattcaaaaattgaattattaccattacagtaacagtggatagaacggtttatagcgatgattcacaaaggcttggtatgaaataatgaaattaagcatattgattaatcataaaactaatttaaataatatttaatttagctttttaagaaataaatatttaatttaaatttaaattaaataatataatatataaattaataaatataatttaaataaattaaatttcctgatttataatagttttttaattgaaataaaaaataatttagcgtcagttattaggcctataatgtcggttataaggccatatagcgtcggttattagtatataatcgacgcttagggtacatatggcgtcgattctattgtaataactaacgttattgggtaacttttagcgtcggttgttttcaaccctacaacgttgcctggatccgcgccgatagcgaattttgtcaaaaccgacgctgaaaggctttaaaaactacctctaaagcctagatttgtagtagtgaaaatatcaatgcaggggtttatttgtacaattttagaaaattaagatctattttgtcatttaacaaaacagaagatctaattggtaacttttgtaaaatatatagtccaaaataatatttacccttatatataagttatcaatgaagagttcgatgccaacatgacaagataatatttttttaacttgcagtcataatttttccacttaatccttcaaaatattttataaaaattttatagttttctatcatttttcatttagataataatattttatatacatgaaattttatatattttgttatatatataatatatttacaagtttgtgatgtgtgaatgaaaagtgaaaaaacaataaaataatattttatatggagaggaaagaaaaataaatttaaaaatgtttaggatatcttaactacatttagctaagaattttgcttttgaaataatgcatgtctatttaagctcattcatgtatgagtcaaattgcaagttttggttaaatatttagctaataagatattttacctttatagctccatcctcattgttttgtaatagctgggagcactcttattatcagcttctcttctatgttttaaaatatattaatgaaattttaattttttttacttcacatatttacattagtacactatatatcaaatcttttttatttttttctttatatcattttaaattataactttttttaattttatttagaaagagaaaaatataaaaaatctcattcctcagcaaatcttattttttccacaaagaatcgtgatatttttctatggatgcggttttttttttctaaattcttatttgtggtgtataatttcgtgaaatatgaatagttatgatcaatttaatctaaaagaaggaatagtgttattttttcttgggtgagcctcgaggaaaaatatttttctagaaaataaatttgtaaggtaaaaaaaatgataaagtaatttaaaagatagtaagaagtacgtagctagggagtatgctcgtcttaattatttttctatttgtaaatatgttataattttagtttttttttcaaacctctaagttcatgtatgcatgcactttatatatatatatatatttaattaaatagttttggaatttattgacattttcatattgtatattttgtattcgattgagtttatgctctctattaatgatagtcttttttcccactaaattttaatgaggttttttgttaacttgtaataaattattgaaaaaataaagtaaaatatataatgaatatatataggtaaataattattaattaagtaaattaaggtcatataaatatacatatacacttaattagttacgtacatgcaactaaaagcactgggtgcatatatagtatatacaccctttttcgtgagtgattttaatttattttgttttatttcttaattatgtattaatattacacatgtagagatctctagagagacaatatgattattattattattattattattaagtagtcgatgatgatttacgaaagattctagcttctcctttcggtaaattaacttattaacaaatatatatatatgttactgtaacttcaaaaaaaaaaaaatacttatatgtgcgcaatatatatatatatttatacacatcattattttcatctttctacaacgttaactctttcttcaagtattgaatagtatataaaatgtttcgatcattagaaacttttatataacatatatatttcgagtcatcttaatcatatatatacatatatataaggttacgtaaccacttgaggctagctcaagtggttatagatgattgtgtgagtgttagaggtcctgagttcgcgtcccaggtaaactcttcctctctatatatatataaacgttacgtgtacggtatttcattataaagtctcatcatcatcctctctctatatatatatatattgcatgcgttaactcttcctatatatatatcataatcatgatccataagctaggaatttatatataaagatggtaatccatggaattaaatttctagttattagggtctttttgggtaagggaactataggaagtcaccatttaaatgaggaaaagtatttgaaaagatagaatgggaacaaacgatggattggatgggtgagcataagaggaaagtcccaaaatcagagaaatactacaaaataagaactcacttttagttgcaataaaataattgtgactaaaagtaagcaaaaaaaaaaagtactctgggactaaaatataaatttaaccatgcttaaaagtttatggctaaaattattatatgagaattacataaggtattatttttttttgtaaaataaattacatttttatatttaaagattttttttatatttttacggtttttaataaaaacaacacgaaaaataataagaaaactatataaaagtannatgaaaataacatctaaataacattaaaacaacaacaaaaaataatatacagataacaaaaaatatcaacaagaaattaacaagaataaaacataaaaagactgtattttttgtaaataaaatcaaaaaaatatttaaaatatttaaaattctgtaacaccgtatttttgtaattttttttttttttttttttgtgtgtatttgtgaaacaattccaattaatttagccaaaaaaaaaaaaaacacaattttttatgattaaatgtgtttgtcacaataagtaaaattttgtatctaaatattactttttagtaataagtaactttacattgtgtaaaacaaattatttgtgactaaaaatgttgtcattcaagaatatatttttttaagtgaaactgttcctcaagattctattaatattcaatatacaaaaatataaaaacaataaaaaatttacaaaaatacggttttacggaattttaaacattttacgattttcttgactttattaatagaaaatacggtcattttatgttgtaatcttgttaatttgttgttgattttatgttatctgtatgttattttgatgttattttcatattacttttatgtagttttcttgttgattttannntgttttcgtgttattttttggaaaactgtgaaagtgtaaaaaaaaaaacattctaaaaatataattattttacaaaaaaaatagtatcttatgtaattattcaattattaattgtgtcatttcagtctttgatttcttaggcttaaataactttgtaacaaaattctatactatttttagataaatacgtatttacatgaaatcctctaacacaattatactattttagaatattttctactatttttgtaggtatattacaaatacaaaaaaaaaaaaaaagaaatacaaaaatataattttacagaattttaaacatttttaagatttttatgattttatttacagaaaatacgtctaattttgatatatttttatgttatactcttgttaatctgttgacgatattttaatatttgtatgttattttttgttgttattttgatgttgtttgaatgctattttcctgttatttttatgtaattttcttgttaattagtattatttttatggataccataaatatatatataaaaaatctttcaacgtataaaaatataaaaaataatattttatgtaattatgtcatttttctatatcatcccagactatcaaagagctcatgacctatgtatatattgaatttttatacaaagtaattaaaatggtaaaacaatgtacatttttatgaacaattctaatttatgaactttttagaaaaaaaaaataacatttttacggaatctgatgaaagaaacatacaaacaacagtcagtattttaaaaataaaagaaaaattaatctagtgaaaatgctaaaaagaaattgtagatctatatttttataatttgttttgtcattttttggtacttaagaaaatatcctcatatatgtgtaatctgtaacaaagaaagaaattccttcaaagctcatcattcccaaattcaaaatgggccacaaatgttttgagaaataacataaagagtaatcggccacttttccaaaagcccaaaagcaaaagtggaaataaagtatatcaaatatagctgtaggcatgcctaaaataggtagggataaggattttctaggagtggtgctttttgttttgttttacttttgtttttcttatttattcttttttaaagtctttatttatgagagaaaatgtgagacaaatcactcaattacaattactttaaaaaaaaaaaaaaaaaaaaactcgttactatccgttctcattttccaaatcatcctcccatggtgcacttttgtaaaattacaatgtccctaaccatgcatcatagatatatatatatatatannnnnnnnnnnnnnnnnnnagagagagagagagagaattttataaaattaccattttttgtgctttatttacaaatttatggcctaaagtttttatttacaaaaatatacttgtaaaatgtaaaaaaacaaaaatacattataaagtttacaacctaaagtttttatttacaaaaatacactgctcaacaaaatgtaagaaaacaagtaaaaaataagaagaaattaacttcacaacaaccatacatcaactgtaatacaactataaaataacaaccaaaaaaataattcattatttttactaaagaaatatttttgtaaataaaaagttcaaaatgtaaaaatgaaaaaaaaaatccgtgttgtggtatttttataatttttttcaaatttttggtgtattattcaaatttttcaaaaaataatcataaatgggctttttctccacccaaccaaattaaaattttgggcccgttcaatgttaaaatggtccattaaatgtctcaacgaaatttgtagaaattgcataaaatatagttcttaaaaaaaggctaattagtaatttttcccccgaacttttaattattagaaattctctccgaactattgagattgttannnnnnnnnnnnnnnnnnnnnnnnnattcaattttactgtttcaatgattgtttat

SEQ ID NO: 14498 - DNA, 4141 bp, Cannabis sativa
gaatccaggcataccacctggaaaaccaccaggcatgccaccaggtcttctactagaagatgattcttcttgcttcttggccttctcatatgcagccttcagtatgtacacaaaaatttcagacacataattaccagatagaataaaaacttgtttttaattaaaaaagtacataactacttacctgagcttcagcacggcgacgtcgcctctcacgttcaatttttttctcttccctctctttgtgcagcctttcatatttacggcggtgctcctcaatcttgtgaacatttggctcaacctgtgcaagttccaagaattacaagaaagatgcagagtaaattaaacaaaacacaaaaggcaaagacacaaactaagacttgcagtaaggtaaccacttatgttatcatagtcccacacacccaaaattaattgtcatagtgctacctgttacacctcaactagcaaccagcacgcaacaaacactagctcaacactaagatatattatatattgaaactgaaacataattcattaaacttgagcaccaccggcaagtagatcgagattcataccacattaaacataattcattaaactaagtgtcacaattttttttttcaggctaggctccctgcatatccctacaatatttggggaccaaaaactatagcagtaatttctatgtaggttcccaaagggactcaaaccttaagtaccccacatatgcctgaaatttgaactattactcttgagtatccgtatcacaaaccagtttctcaatgattaaataaaatgccacagcagtagatttggattaataccagactgagggacatgtaaggtagagactggagaatacagcatttagtaagcaaacagtacggttaacctcgatagtaattggtatcaaatttcttttccagaagcttagctttcaaagaaaatacaaattaaagaaaagagactgaaggagttttctttttaaaaaaatgaaattgtgttcacaaatatgaaaaggaaaatcgagtaattctcataaatgggaaaagaaaagtatagttgacataaatatgaaaatgccctgtcatgtgaatgaaatagcaccctacttccagtgacaaagctatgatttatataatatagaaacttgtactatctaggtgggctttagctatataaataacaaaaataagaacactttgaaccagaaccaaactctgaaactgttaaaatgcagagcaagaagggaaccttcttaagaacatcctttatttcttcatcataatctagctttgatgccaaatggagatcctttgctgcctcctcccactgaccaagcattgatcgtgctatgccacgagacttgtagcctttggcggagtcaggattaatctgagaaacataagacaagtttaatgagattttgaataataaaataaattcacatcattttaatcatcagacactggtcaagacccgacagaaataacacccacaccactcacaatgataaaatttccatatgaagatattatactccaaaaagatgataaacagtaagaacatgcttacctccagagcagcactggcatcacgaatagcagcattaggtttcttcatcttgatgtaaacactagctatcaaagtcgcccaacaaatataaaacaacttagcaactagaagaccgaaaccaagatgattgttacacaaataattcttaatcaacaatatacctctcgttccatacataattgcagataatggattgagcgaaatggcttcagtaagatgctctattgcttcctccaatttccctacatcaaacaacaaaaacaatcaaattccacaatctacacttacactgtaagaatatatttcatcaagtacattattacattcacaatcattagcatagtaaagctaccttcggaaatggcttccattgctttcgccttctccaactgagaggcatcgcgatcttcatcggagacctcaactgactgatttcccatcttaaaaatgcaaaaaaaaaaaaaaaacattcaaaaactatagaaacagagttgaaatatatataaatgtaaatatatgaatagttataaataaatagatatcattataatgaaacttgaataagttagctaaccttttgtggaggatcattatcaggctcaacaacatctccctcaagctcaatatcagattcgactatttcatcatcctcttcttcttccacctcaacactcccctttgtgccgctttcttcttctacatcatcatcgctctcatccaccacataactcttctgccaaaagaaacaaatcactcgctcaatcaatggttaatgctttcttacaaacacataaataaacctcagataaaccctaaaaagaaacagcatatcattaataacataccgacttagaatctccgccgtgatcggaagcagaagaaggcaggttcccgccgagactgaataaaacggtattctagaatgagattcaatttttaaacccaaaaaaaaaatgcaaataaacaaagcggaagatttagggttgtcttacctctcgatgtagtcgcggaagaaagagagagaaggatcattgagaatagaaggatcagacttgcactgctggatgaaatgcttcaactggcttaggttcgcggcgtccatggcgatcgagctttggttatgattcgagtgagtttgttgttaagtggaagaaagagtatgtaggttttagtttagtttagtttgttctagtagtttctaaatggatagggacgagtaattatgaataggcaacaattattattattaattatttcaagctttttttttattattattagtttttcttcagtaagtattgttatttatttttattctttgcttccttggagagattcatgggggagaaaagtgaacaaaaacacacaatttgttaaaacagacaaacacaatacgagaaacatattggtttaattaaatgtctttctggagtacctttaactttaatttatgggtccttaacaagttttagtttatgaatattttttaatagaattgtattagttcaattcaatatggaattttaagtatttaaatttaaataatccttctagagttttgattcacttggttttttttttaatttatttggccaaaatttctattgaattttaaaaatcattgtaaagaagctctttcaattgcattttgttctctttcttacattgacttgttgataaggctaaatataaatgccacaaagagtttattgatactaaacataggggttagctcatataacatatttcaaaaaattgtcatcaaatcataagccggtcattatggtcgtgggttattgtatagggtcaaaaaaaataaagtatccaatgtattttttctttaatgtcgaataattttttttttaatgaacctaacttttaagggactaacaatttgttattagtcactttcatctcaattctcaaagtttattttcaattctattaaacattttaagcaataaaataaaaatctattattgctatttattatttttttaaaactttttatattctttttttcttattattatattttttttttttttgttctactgaaatcaataacaatttttataaatagttgaagttttttggtgttttgtaagatatatataactgaatgataatatttaaaaattctatttataaattacattttttttgtagggacctaaaattagaacaacacctccaaaatatttaagatggtcactatacatatatttttaattggacttttgaattatatcataatgtggcattattaaattgtgtacaaaagatgaataaaagtaactaaaattgacaagtttacaatgacttctataatttagaagattctagcaatacaaataaattttagaggaaattctcactacattttgagacaaaaatctctaaagtacataatttaaggaggaaacaaactacttctccttagtctaataactaatatgaaaaattattcacatttcacactatttatgatggtgaagaacgaaatttctccgtggcataatatattatttatacctatataagtttagagtacataattaatttt

SEQ ID NO: 14499 - DNA, 4609 bp, Cannabis sativa
aaaaaaaacttgaaacacatcaccccttgtttcatttcatcatggaaagtactcaacacgacgaaccagtcatggaagaagaggcaacacatcgaccaggaaaagagcctcggggagcacaaactcagactaaccgaggaaggggtcctactgagaggaactctgagagaagtgaccctgaggaagaaattcttgagagagaagggagtcagatgcatatgaccccacaagatacgtcctcattatggagttagaaaatttataaatccatcagaggcttacagaatccaactaaataaatgaggaggttgaatgggccatggctgcaacaagagcgactcaaaacgatgcactgccagtgcaagaagagaaacctgtgcgacgaccgcgtggaaggccccatggttcacaaaccagaagagcacaatgacttaatgtcgaagaacatgagccaaataatcccactcacccctaagagcaacaaccaggggagacaagggacatccttgttgatggacgaggtccccaaaatcagggtgccacaacttcatggcaaatgcgagcaaggggacagcaaacgtctcaaagaaataatgaaaatacaaacgatcaattgcctaacaggtctggtcgtcctccacgtccaccacacggacataggagagaagaaagagacagtatgtatacctacttgaacaaaggtagattccctaacttattaaaaaggaaaaaacctgcccgagaatcaccacaagaatcagaggctaatacaacccaaagtagatcaaggagtcgaggacaaactcgatcctcgaggtcatgcacatgcaaaaacccaccaggtggggagagaacacctcaatatgaataccaaggcgaaggagaaagtatgagtaactttcaaagttaccaatcagattgtaccccaagctgatcagtgagcaattatgatgacagacaagatcaacaccaaaatatgtgtgatcagcctgacttgtgagaccatataaatcgaaggcaccatgatctacatgagcagataaacaaaaatgcaccatatcttagagagagattaaagagaaatactcaacgagcaaatgagcaaaaaaatcaactgttgataactccttccagcaaaggataattcagcttgaggactagttcagaaaatatcaggatggagaatatgggaagattccagggtatgattcagaggacgacccaaaacctttccaccctgatattttgaactcacagtttctaaaaggatttaagaaccctcatgtcgcacaatatgacggaaccacaaattcggttgcatattttattaactttaaaaccataatgtgaagtaatatttctaataacttgtgttacatacaattccctacatccccgacaggggcaacaagtagttggtttgataagttcataaatcattccatcacctcgtgggaacaactacctaaagaattcaataagaaattccacgctacgagggatagaagaccagaggcatcatccttgacaaatatcaagaaacagtctggggagtcctaaaaggaatttctgagtcactttagcacgacaacaacaaaagtaaaaaaaattgaataacattattcagttaacaacactctaggctaagataactattgacttgtctactgctggaggcgagttatgggatgatttacaagggcgcccagtcaaatcaattattgaatttagtgatagggaacttatatatgttagaaaggaagaaactcgatctgaactaaaagtatataaagatggcttgaggaataaacccagctcaagcaatgcaaaaacaagcgttgcaaacacgagcgaaagccatgagccacatggaaagaggaaagatgaatccaaggaatcattcaaagataaaaaagaaacagaaatagtatgagaagtacatcctaatttatactgtgtatactgagctaaacgaaacacgagaaaacatattcctcgcgaatgagaatagggttgcattttgcaaactagaacctatgaggaatatgaggaataaacaggatcagaataagtattgtcgctttcacaaggacattggtcacgcaactgaagagtgccaaaaactcaaatatgagattaaaagtcttatttctaggggttactttagacaatacgtgaagaacaaggggaatgagcagaatcaactccataaccagaatcaaaaccaaaatttccaacaactacctatagagggtgaggacatcttggttatttttgggggatcccatctcgcaggaacaagtaacactacacagaagaggtacataaaccaagtaagaaattagtctttagctttttcacctgaaatgttaaaacgagctaagactgaggaaccctcgataactttcactaatgatgatgcaatgcacgtaaagtttcctcatacagatccactcgtgataaccattcaactctcaaataagagagtaaagcgagttttggttgataatataagtttagtgaatattttgtagaaagaaaccctaaagaaaatagggttggaaggaataactctgaaactatggatggttaatctatgtagattcacgggagatagcatcgcaagttttggaatagttgaactccccctcacaatgggagacccgcctttatcaataaatcaaatgcaagagtttttggtagttgatcttccatcggtctataacatgattatggatcacccaatgctaacttcgttgggggaaattagctctataaaacatttgtcattaaaattcccaactcagaatgggataggaactacgaaaggcgacaagctgttagcacgagaatgctacaacattgagttaaggaagagagtcgagcctcatcaaatggtagttgtaataactgaagaaattggaaaaaaggaggaaaatctagataaaggaattataaaagttgatcctctcttctagctccagggttagtggtgtaaagaccgcttaattttaatatggaagttagtagataattagggtttatttcagaacttaaacttttagttatgatttatgaacttataaattttaggtgtattatttatgttgtatatgaaatttcatgtttttcatattttatgcccgggaacagtggaacgtaatgtttggctgatagaatcatattttcttatggtttagtattttagttatagcggggcaatatagatagacattaggaatgttgggattattcgaggtattagttttgacaaaattacccctaggtggtaaggatgccttttggtttaggcaagagcaaaatggtctttttaccatttgattcttttgtcttttagtgatattgttttatgttgcataatccgattttagtgagtgtaatagataaataacaagatttatcctttaaattagaaaaaaaaaaaaaatctctagaatcacttcctctctctccaatactatctctctctttctcgaaccctcaagaaaaaccaacagcaaattagaatttcatcagctcaattcagggtagtttagcaagattcttagtgcttcaattcaaggtaagcatcatagaacctttctctttgtttttcttaagttcaagctaagttcctatgcatgatttttagagttagggttctgtgatgttgaatggtgtttgattttgtattctgaagtcaaattgatgttatttgagttgaataagagttgattggtggcttggtgttgtgtttggacaaggtttgagatttagagctcaaagtttggtctttaatggtgatttgtgtttctatgattatttcttggttttattgcttggattagatttattgtggtgtaaatatgtggtctggaaggtttagaatcatttggggttgaattgtggtgtttttggtgtttcctgtgctgaaccggtcgaccgattcagtgggacatataggaactagaattccagttggtccccaggaaaccccacagaactggtcttttggttagggaactgttctaccggttggggcattttagggtgccctagtttttcccactttcgcagtatttagggtattgccatgttatccatcgatagagaaacttttagtttcgattttaagtccccgaaaaagtaatttagcgcgtcactcatcagttttacaaatattgtgatttaggggcttgtaaattgtcgagcagtagttccacttaggttgatcaacacacctaaatttgaaatgagataagattagtataattatatgtatatgtatttacatgtttagcatacatgtttattaatcatgttagattacatcgatagcagtatcaatatacgtagagttgtattggataccgatagatgtatgtttggctcagatactgatcgatgctatcacatcggtatagctacagtatgactagagtatcgaatatatgttgatattatggtcgatagtattgttatgaacgttctagactctgtaccgcttagggtgcgaggatagggctacagttgggtgtatgtgtgcctaattgtaatccgggttatatttatgattataattatacttttcttactgagtttgtcaact

SEQ ID NO: 14500 - DNA, 4762 bp, Cannabis sativa
aatacatatacatttttttctcgattttttttttcagggggggcgactgccctccctcgctacaatgtgggtccgcccctgttcttggtggtattatattgtcttgccaagacgaaaagaagtgagttcatgattaataccaaattattacatgtaaacaaacacataaccactcctgtttgtatatatatgaaaagtcatgagaactacaccaataatccctctatatataattctacgatttttcctttcacatgcttagatatatatatccactaattgcaaattaacttttaataatttgaaacctagctaattaagtaatcatctaaagaagtacttaaaactcttttcactttcaaaaaaaaaatattaattaattatttaaagaagttggagaatacatgtgatgtgtataaaatatacataattaaagaatggcagtcaaacttacaactcaagcaagcttaagtattctcttgagttaattataagaataatatctaatattattacgtaacattttccacaactataaaacatttccttaataattgaatctaattaaaataataaaaaaggtcaactatggacaagtgtcaagatactctaatgatgggttgccaaatcttattgcataggatgatgatcagtattcagtagtgaattgaaaataataaaaccttggtaatttgtgaccctagaatcttgatgatgaacaagatttgaaaatgaggtttggcaagacaggccgaccacgcatgttttgaggattaatggtaacttgtctgagattggtattacacttggtttggtttggtttattaggagaatccaatctaacaaaaaacaaagtgaaaaagcatgttttgttccatgaaattcgatcaatatttttttgtatatatatttatatatcacaatctgtccttctctttacaggcagatcgatgtgtgtggctctagtactcttgtttcatttactattgcttgacttgaggctaaattaatttgtgtgaaaaagaagagggaccgacctgtgtaaataaaaaagttatattggatttctacatcgaatccaatttagattatgaagtgtttggaatattactataaatggtaaaaattcccttaaacagtgataaatgttaatatgagaagttttcccgaaaatagatgacttattattctgtggtcctaaatgcctgtctttcaatcttcaatattcccattaacaatgcaaaattgaaataaagttgtgaaaaggaaaggaaagacagagatggtgaaagagaaccctctccaactccaactttcttttcttctccacatcaccttttcttttcttttcactaaaatataattaatgctctcttaattttatcatatctctctccacccaaaccgatataaatatcccattctcatgttaattaacaccgaattaactgatcaaaacattaatacaactaattcataaaaaaaagatatgagtggatttccagataaaccacaaatgaggagctggaattgagaggactgaggaaaaaaaaagacacattcaataaaagaaactgctgatatatgatgatatacaagctagaataccattctaatgaatttgttattattattttttttaaataccccaggattatcaaactaaaagaggtgatgaagaaaataaaatactttaatcatatttctctctacatatgattatttgactttgactagtttggagaagaaaataaacttaaaaaaaacaaataaatgactctcattcattcattcattcatcttgggatatgaaagcacgcgttgttcttctgatatcacctgcgtattatcatgtgggaaatgacgaccaagtcgtcatatggcatggtatgggtctcataaatgctcaatcgcaattaacataaatagattcttttccttttgtgggggagaaaaaacaggccaatataaatataaatataatcaagctgagttgttccatgatcatggtttcactttccctactaggaggaagcagataaattaacaacaacaacccatttatgcacagttgaataaggctttaggtgttgtataattacctacactactctacactacaacctctcccctctcataatctactcaggagtcttcctttttcgtttcacttattctttacccttttgggtattttaaagtttaaaatcactacccccaattctaatataaggatattacctttgttatacgtaaaggaaccacagaggaaacttgcataactaggaaaaatctaaaaacaagttgctgttttgatttcacacttggtgtacctaacaccgcgtgcgtgaggtgcttacattacatctctctctcctatacaatattagaatataaagaaagcagcaatctaaccaccatcaccaccccctaacccatcaacaatccaaacaataccaaaaaaaggtaaataagatttataccctttattccgaaagcttaaacatttcagggggaaaaaaatgcttaggactaggtctaaattaaattctaaatatcaattttggatagcaatcttcactttgtctagtaattgaccatcatacacaatcagcttgtcttgatcaccattctccgagggaagctcagcagcttcagagaaggaaagcaataaaaagtttaacggaagttataccagatcggagatcttggccatctttttaactacaaactcattatatcgtgaagaagagtacaaatcgggcatgaatctttcaagaacgccttgatccattcatcgtggcaatttcaaagataagatatactaatccacctcacctccccaaaaggaatattagaaataaaatgatatagttgaacaatcaaacaacaaatgagacaaacaaagacgaatttaaaggtataccagcaaggagcaaaagattaacaaatggaatcacaagtctatcatccaccaaaggacgagggttatcacaagtctttgacatttgacatcatagtttccatcaacatctcccattatattatcacagaatcttaagcatagcacatccatctcccctcctccctccctccctctctttttgaacaatctaaatcaatgataattcatcaatgaactaaaacaaattgacctctgccaaatcctccatgacctatcggtataatcctatactggatttattttcccttttgggattgtaagcatgtttgctagagctaaagacaaaacaaaactacctagctaaaggaccatgaaaaacaaacggaaaataaaatagtgtatgatatgatatgacataaaattatgctgacatacaataggccattaaggaaaaagagtagtctattttggtcataatttacaaaaataaactgatgcacaagacaaacggactagtagaatacaaaaggaaatagttatgtggaagtcaaatataacatagatatcatgtgattaatgtctggttaaatatgattgtgtagaaaaaaattctaattagatggaagaaagctaaaaagaacagcaagttactgaatatgacataacactaaaacataaagagatacgaaagagcataaacaacaattatggtacttcagtagatgttactacggaattatctagatccaacattgccaatcccacagtttggagcatagcaagttttagagcaaagatgttaagttgccctgatctgatgcatgtgtgctaacatgtccaaaatgctattaaaataacaaatagacaatacctacatcaccaatttttaaacacacatttagctagttctcttctgatcctatatcatacccagtacataaaaagaataaaagataaaagaattcatctccaaatattgataaggaacttttcacagacaatccgaatatacataataaaagagtacacagcattcttaacaattggcataattgtcaatcaatatcctaaatcccaaattggaccaacatataaaactgaatgcacaagaattgattatacagaagtatatatatatatataagcccatgcatgcaaaacaacacatacgaaaaaaaatcaaataaaatcttattccaaaatgtaatacagaatgcaaatcaaagatttagggcaaaaccccaaaaaaaacatccatacaaaattttcaacaattccacaaacggatcaactactataagcacaaatgacattagtatacaagaaaagatgtatatcactaattacaataattctgtaaatgacctaaatttaacccaaagcgcacctaatccgattccgaatcaaaatcattcgtcggagcgtattagggtaatgagctacatcaatcgcgaatacctaattcaacctcaagctcatcgtcatcctcaaacagcttgagaagacgagcgtgttgttcttccctcttctttttttgccataatttgaataacaagacacagaatccaattactgccaccaaacccagcaatataatcagtaccttgatccctgccgagcttgatttgctctcagatttcgaaattgcgggatcaatcgcggtcgctagaccttcagcaacaacaaaatttcatgttagatcaaaatttaccaacgaacctcgatctgcttcccaaaaaaaaattagagagaaagagaactatacccgaaacgcagagcagcaaaagcgatgagagcagagatgagatttgcatggatcttcgggtaagggacatagtcatctctctctctctctct

SEQ ID NO: 14501 - DNA, 9441 bp, Cannabis sativa
agttcagggggcatttttaacaaccttaaaagttcaggggccatgatttggtacatgccaaagttcaggggacaaaaatcttaattagccttgtttttaagtttcatctgatttgattcaaaaagctgggactgtatatgctacaagacctaactaaagtctatggttgctctttccaccacggaagcagaatttatggctaccacggaagcattcaaagaagctttatggcttcaagggattttgtacgaattgaaacaactaaaaggaggagtggttgtgtgctcagatagtcagtcatctatccatctttgtaagagctcgatttatcatgaaaagagcaaagaaatagctataagactctactggattagaaaaaagatcgaagaagggttggttgaattagagaaggtcacatcaaaagataatcttgtcgatgttgggactaaggtcttaacagtcaacaagttcaagcattgcttggatttgatcaatctcaaaattagcatattgagatacctggaacaccaaccataatggttgcatactttcttcattaccatcacttttaatttaaaggaattaggtggaatttttggtatagttcttccaaatgaaaagatttctggaaagagtctcgtggaaagctagcagtcgtcgggaaaggagttttagaagtctagcttgtccactccagaagtagtcttcagagaagctagtcgtcctccagaatggagttttggaaggctagatgttccctcaaggaagggggttctcgataactctactccagctggcattgaatctatttggaacatcctcccaagaacatgtatcatctatctgggacacccattccaaaagtgtgctttacattttcagagctcgtgccagagctgatgtggagattttgttacaaggagtttgttaagtctgtgaagtcgtaattgacttaacaacttggttgttgcaaccaccgactatgggattcatttcctaaatctataaatattaccatcctcttctttagaaatacaacacaggagatgattttgagagcagaggttaagagtgagattgagaggtagagagagagaggggggtatagagaaaaaagaaagattgagatttgtatgaagaatattttgttgatgaagaagcttcttgggtaagagtgtgagagataaacagtttgagagaatttcaatagagaatcaatcttgactgtaatgtacccttgttcttgctcaatcaataaagacatcttggtggtgttccacaactggagtaataccataaatcacatcgatctataggaattgaaccagaatatatcttggtgttgtttttattgttttcttgctttaatcatttttggttttaattactctgctctaccatgttatatctcagattcttagttgtagttttgttaattgtttgttgatttgttttaagttttatttgattctgcatattagttgtaattttcccacattaatatattgtgcgtcaatttttccataatattaaattgacacactattattgtagcaagttttttctaaagtgaagagtaatgtatggcataaatacttaagtttaactctcaattattaataaataccgaagtttaatttttggcaacaataatacttaagttatatttctggaactctgtaagtacctaattgttaaataagcaaattgccacatggaaatccctcattggtccaagtcataaatttttatatatttttttttttaaaaaatttaaatataataataagaaaataacatgtagataattacttaatatttaacgcccaagtacctacagagttttaaacatataacttaagtattattaccataaaaaattaaacttaagtatttatttgcaatcgagagttaaacttagatatttatgcaacaaattagtttgaattatatatatatatattttttgcaatatattactaatttagtacactactggagatgctagtatgcataccctctcaaaaatgtgatagaaatgttaaaatttaacaatttatacagtaattatgttaatgttaggtaaactaaatgaccaaattagagaaaatgtatattgaagattactttgtctttctcaattcacaatactaaactcatattttaataatgatcaatttccagaaaaaaaaaaattgtaaatgggggtttaagtggtagaaatattttattattaatctaataaacttccaaaatatacaaccaagagactcatgagtagcacctgtattttccaccacttttgtttttcaaaaaaattcaattaatcatatgaaagccacaaaatgtcacattgatagtgcagcagcaagcatttaaatagttttgtttgaaaaataataataataataattagaagaaaagttgtctatcatgcatgcacgcagtcatcatatacaaaacggcatagctctaaagaaaaagtagtatgagaattaatcttcataatgcatatgatatatataaccaacattcattagcacaaagtatgtttttttaacaaaaaagagagccataaatgtttcaagattacctgtaatcaatcattagagctgtagtactactacttttttgaccttttaaagagtaagagagtgagagacgacaccataaaaaaaaaaaaaaaagatcttttcttttagtgcgctggaagtagcagaaacttctcacacccgtgccattttgtttctctttataatattcctttttcttgcctttcagcatccaggaacaagaaaaacagaggctaaagataccatcttttttgccctctatttccctttttccatttcatttcttactaactttatcactttaggaatattgctccacttaatgggcaacttttttagagtaagacaatctgaaccagctcaccagatatagctttttctaagcatgaaacttctgtgaattatgcatttgggtctcttcagattccaacaataatacataatgctcttccttgcgggccattagatgtttgccattgttcaacaaacttatagcatcacgtaagagttgtctgtattctgaacatatcacctgaaaaatattacatcgttgcttcaagatgcagtatatactttcttaatattccagcctttacggtactacttttttaaatactcaatagatcaaatcttattatattaactttccagatgttaattctcatatcagtaattttcattcaacttgtatttgattattttacaaaaaggtgaaaaactaccaataatcattgcatgagcatgccccctctttgaaagtgtggaaacgagaacgatctctgataattaattctctattataaactttagatatggccttcatagctgaatgacaatcatcacatgtccttagattttttacaatcctaattgaagtcccaggctcggtactcatcagcccaaaagccacggctaacttctcgctatggttagtgactgcttgttctttgtcttcttcactcaaatcaaaggaaacttgacttgtatttgaaatatagcctcctaattgagctcgtttcagaacttcacctaacttttcccgaatttgtgcaattcgaggatgtgatcggtcagcaactctaaactcgttaattactccattgacttcaatccagctatgccctgggctgcactggtttcttttctcccctattaaatgcctcagttctgcaactctctcccatttaccaagagaggcattcaaattagagagaagcactttgccttcagtatgtccattatggtctaacagctcaatatgccttgcaatttgctcccctagtttgacatcacgatggattttacaagcgctcagcaaagacctccatataactatgtcaggttgcattggcatactcctgataacttcgtacgccttttccaaatgcccagcgcggccaagtaaatcaatatagcagccatagtgctcaatcttaggagtgattccccatgagctttccatacgcaagaaaaccgaagagccttcttcaactaaacctgagtgactacatccatttagtagtccaagaattgtaatgccatttggcataacattttccatcaacatttgagagaagacttgaacagcatctttcccacgtccgtgaattgataacccattgatcatgcttgtatagttaaagacatcccgtttgggaatcctacaaaaaacttggtttgctcggtctatttttccacactttgcatacatatcaattagagcagtaactatattattggtcaatgagattgcagtagcatctatatatttgtgtacccacttcccttgatctaaagcaccaagatgagcacaagcagacagaactgaaacaaggatagcctcatttggcttcaccttgccttcatacaacatgtcatgaaaacatccgagagcttcaatatttctatcgcagccaacaaaacctgatatcataacagcccacgacacttcattgcgcaatggcatctcatcaaaaagttcacaagctttgttaatctcccctcgtttcgcatacccacgtaaaagactagtccacgtaaaagcatctctctcagacatatgatcaaacactttccgggcatctcccgttcttgcaaaaacagcatacatgttaatcgccgcattgcccacaaacaaattggactcgagcccatttttcaccaccaacccgtgaaaaatctctccatggagtgaagatatctgatgagaacaggaagtgaggacgaatgtaaacgtgtaattatcagggaaagaagaagccagcatttgactgaaaagagaaatggattcttgggagttgtgtaattttgaataagctctaatcatgaggttccatacaagagtgggggctaaagaagaagggtaaccatcaaatagtgttctagcactgttgaggtccttcaaagagagataacagttaataagagaggtggttaaagaagaatgagatgaaagtgccacggtgaaaactctgccatggatttgcttaagctgagggagttgaggacgctgctttagtagctgaaaaagggtttgcgggattggatggtcaaaaggaattctgataagacttggtttgggtatggcggacaatgtagttgatgaagacgagaaagggaaggagggaaaatgtttgaatttggatcttgctgtgatcactttcatttcaaatttgttttttggtcagctcatttcaaccttgtacaatgttcgtgaaacaagaatgacaatgttatagcttttttttttttaaaaaaaatgtaatgtcgatgaaattcaatcccccttattttgctcattgcatcttgttcactaaattttatattttgaatctagttcaatccctaaaagtgtagtcttattttacattgattattttttaataataaattatttaatatttaataaaaaaataaaaaatcacataactaatagtaaaataaaataaattataaatataatattatacaatacaatattatttaaacaatatattacactatttattaaaattttcagaaaccgataaaatataataaaatttaatgaaatatattatagacaaataataagaccaaagattttatgtggttgaaagattaataacctctaatccatgaatcaatattattatgataagtctgaattttttttattgatttacacaagtgtttgaaccctaggatttgcctgagcactcaaggaatggcttctaactctttgcatgaagtgattttcttatatttatagtgttaggattcttgtatgtaaactttgcccactgatggggtaaatacagataattcattgacttcgagttcatttagtgaagtccagcccattaggcattgatcttctgctgatgtgaatgctacatcatgttgatagttgtcaaactgtgtcctacttttgtgaataataaaaacacataaatacttggttgacaattattttatttcattattcaaaaaatacgaatcataaacattatcttagaaataaaactttgatattgtaaaatttgacaataaattgttgtgatacgaagttagatatctggatacccattaatcactcatccagaagatttgtatgatgccatccagagatacactgtgcaagaggtgaaacttgtctgaacaaatcatctattcaatatctagaaggtttgacttcattaatggatccaatccattatcttggttggacctgtgattgggcctggaataattgagctaaaaccgtctagaaattgcacgtgtcccctctggaaacgcggatagcacaaataaatcttagtacaatggcattcgagagaaacttaaagaagaccaactaagcactactattctcattattctaaagagcattctctctctattactaagcataagagctactcgaacccgtaactttgagcttgccaacccatagccctgagttacgtgattggtaaagttactccttttctagttagaaggaaaaaaagatagagttagaagaatgcttttataaatgtattataattttaaatttgttataaatatttattttgtacaataaaggaggcaaatatgttaaaatgtgacataaaattgcaagaaatgtgtatagaagatttcaaggtttcatttaaaaataataattgaatattgccttttcggaccacaaagcctgtgattgtgtttgaaaatctacaacaatgcctgtatgtttttaagcgaatagaaaaatgaacaatttgtgaggtttacaaacatataatgtcagaagacccatgtttgatacagacaaataataaagacataggcacaataatcacataaatccctgaaagaccaaataagtttttcttagttcatctatcaagaaattaagacatgaatacaaactcatagctgatagcccccttggttgagatatcattatgatgttgttatgcttatattttttggatccatcattcataaacttctgtccaataaatgattacagacagaagactttaaactttttgataagcctcaaatcagaaacacataagacatttttgcctaacactcatgttttattaaaactcgctcattaacacattcaaaatttaacaacaaaatattttttttttttaaaaaaaaagaaaggaaaacggaaaactcaaatcaaacaaagactattcttgtacactagaaacaatttgcttttgttttaggtcgagaaaatccacgatcagaggcagatcacggtacggatcaactactcggccaccacaggcactgtgttctcagtcatccctttcacatcttctaccttaacatcttgtattttcacatcttcatgcttgtcaagttgactgaagtttccctttgccttgaagagttgattatggtgatgcttacagtaaagatgatgctcgtgcgctacatagttcgatggactgatcacacaaccaccatgtgtgcatctaaaacagcctttatggtatgatgtaccatcaacagcaacctgaaaacacacacacccctcagttacatcttatagtttcttgaaatttaagttgattgtcttagaaaacagaattggcaaaacaaatatctgaattatgtaaaaacatcaaatactaaattctttaccttctcaatgggataaactgttttcttgcaagcaacacacttttcttgtgtaccagcaaacaagcgtgaaactttgctgttagtaacctgaaaagttaaatcataattagttgcaactaaagatgctttatttcaagtaccaaatgtgatttggactattgaaatagataagttagcatataataacaagacattgtacctgatttgcagttctgtctctaacagttttaggagtacctacaaataaataaaacacagtaaggattaagcttcaacatgaagaatttgattaggggaaattagtgactcatcaccttcgaaacttttatccaaactaccagtcctcttaaagagttgatcaaagtgaggcttgcaatacagaacaccctcaaaagaggaataatcactcagctgaaaaaatcagaaagacaaaatgattagctgcagcaagaacacaaattccaaaccaaattatacctctatcttttaggagactaggcgaaactagtgttttaaatatttgtttccaaatataaagaagtgattgagctagaagttttcacttatcagctgaacattattttataaggctaaattaagtatgatatgataaactccttaaaaatgacatttttttcacatgtttcttggatcatttgaagatttctaaatcagtttctttataaccaaccttttatgtttcattaaaaaaatataaagaggaaaaaaaataaccttgtaagcttaaaaaagaaactggaatatcttttttggttttacctaaaaaaaaacggatgtaccgtacaactataaacacaccatttattgataaattgctttccaaaaaaaattaagattaaaatctgatttatttttttttttttgatagagaaaattttgatattttaatacacaatccatgacaagattgtctagagccatagatgatgatgatatgcagggcaatttgtaataacaaaaccctctttcttgtctgaacggttggttatttattgaatcaatagtcaattttctaattttttttttttttttggtataagagatcatacttgtcatccaaaaatacaaaagtaaagcaccatgatcctaatctcaaagccaaaccaaacccagatagaaaaaaccatgatcgagctcaatcaaagtacctattattatataaatatacacaaacaaatatatgatcaaaatagaaagaaaccatgattatgattatgattgttttgtgggtaccttgagggtgcgtttgcagtggtggcatctaaagcatgccttatggtaaactttattatcagcagtaagctcatcaacgaaatatacagtcttctcacaagccttacacttctgggtagtccctccaaatgttgccatccttaccataaccaaaacccaaaaaatagaacacaacaaaataggtcttattgtagtttatattgattaaagaaagaaaaacactttcttttttgtctttctctttcttctctctctttcaaaatttgagcttgaggtttacagctcagacatagtcagagcaaatatatataatgtgaaaagaaaagaaaagaaaagaaaacacttctcatttcattattgaaattgtgtgatgggcttattattgttttcgaagtctacacaacaaactatttgtacatgttttggacaacatggtaattatgtttgtaaagtcatgttgacttccaccttggctgtggattct

SEQ ID NO: 14502 - DNA, 17899 bp, Cannabis sativa
  modified_base (1407)..(1415): a, c, t, g, unknown or other
gtagaatcaccctaaatttttttaatatcaatagttagttttattttattttcatattttttaaatcatgtatgattttttgtaataaatttttatataattttttgttttgatattaaaatatattttatttttattttataagtatattttttaagaatatgataagaaagaaaaatattctaaaaaaatagtataaattaaaaatatatattttatataaaaactttataaagtgccaataaaactctcctaagaacattctatatatacttcctaagagtttttgtttagagaattatgaatgattgaattgatagtgactacaaaaacaatatcatatgcagttgtatcaattgtgtgtgtaaatttaagttctaatactaagatcgtaaattattatatataaaaatttatctttttagagcaactctaacgagccactaaaaatgtattattgttgtaattaatgcttcaagtagacaacaaatggtgcactattttgaagctttttttagagtgcatattttttttttaatatttaattaatatttatatgtatttataattatatttatgaaataagaaatttatttttagaaaattctacaatgcacctttttaaaagtgatgtaagaatgtatttttatttgtttcggtacctaacaaactttataaatattatgtaaaattttaaaaagatttaaaaaaaaattaacacgccgaaaacaattttttttttttttaaaatagtacactgatatactctgcctgttaaattaaattatattaaattgactattttatcaacagctcttaatttagcattagttgtatctaaacacaactaccaaatgttaaaaaaataaattgagcacatgattttgaagggacatgataaggtgctttactggttggaagcatgcttaatggaatataatatgatatctacatgggcaagtgacagattataatgagtattgactgactgtattggcaattttaaaacaaaattcttttagaactttaaaataatgatgattatttaatcaatttacattttgatttgaagcgtatcaaattagattatgtagggcacttgactcaactgcgtgtgtacggctaattaattactttctatatccaactcattccatcgtgtcagtgcttatcttacatttttttattaataccatttccaagtgaacattaatattttttaggtacaagcaaaaagtctcttgcaactaacgtttttattaagataaagaaaaaacgtttttattaagataaattaaataatctatgaaaatgtcggctctatatattttgtaaaagaatattggacaacagtagtgcctaacacccttaagacgtgtcgccttacgattagctagcgatactccnnnnnnnnnattatattaaactatatgagacccaatacaaaattaaactaataacgatattgacacgtaagagggtgcttgacactattagtgccttttagcatttctctttgtaaaagcaaagaaacttcatagatataacgatcaaattaattttcagaaacaaaatgactgccttttgacatgtacagagaaacctgttaggtcatacgcgtagtactaattttgattttgttaatagaacaaacctcacaaatgtttcaccaaaatatagtgtatacaactgaccgatttacatttattattaaaaagtcttgaataaaaaatacaaaattgtagtataataccgaccaaatcccaccaccatgtgaatcaagacaataaacaagaaagtagaaaatcaaatgccaaaacatatttaataatcctttattcccgagattctaagtgaatattcaccatagtaatgtctttttttattatttttttgagaattgttaattggattgtaaaagaagcaagaaagaatgaaatgtattatatctgtcttttgagtcacatcaatgacactatttgtcagaatttataatttccaagcccaagtacaaaaattcaaaattaaaaaagttaatgaaaatcatagaccataataaataacgtagtttacttttattattattaaacttcgggggcattaggctacacaacatgaaagtagccctttttcctttttctcataaacaaacataattaaagaactactacttagcacaccaccaacacaaattatcctatatttacacacattggtagtgcgtgtctgtgcgattcaaatgtgctccgttgagataatgtgtctaggctcccacaatggccgctttgagtctcctcttcaattcagtcctattaaaaaagaaaaaagaaaaaacaagtgttaagattatatttaatactaaccaagtaggctagaagggttaaaggattttcgcaccaccaaatgacctagctagtgggtcactctctcagattcttcgccaataagtctcaaagaagacttgattgagtgaagtgaatggtcaaattatatcttctttcctttcaatccgatccaatccaatccaacacgtcgaataagtaaaatgatcaccgcgtcactttagtccgaactccggagggagttaatccacaccgtttttttccctaatgactatttctctattaggataatgaaaaaggaaagcaaaatccgaaaaagaaaattacctcatgagttgcctatcaagagaggaagcagacaagaggcccctattctcttcagccctacgaaggagataaggcatcaccatatcaataggcccaaacggcatatacttgctcacttgaaaccctgcgtttcgtaaaccaaacgacaacgactctgacatcccataaagctgcgcgaattcaagcctatgattcactttaccaatccccaaatcatgggctttaaccgcggccagtctccctgtcgtttagccaaaaaataacacacacatcaaaacaaaacttttacgcacgccaagtgtttgattaaaacttttcatgtttttttttttacctgactcaacattatggctggcaagcaccaaagcgccggacccattagcgatattttcgagcatgaaagaagcacagtcgttgtaacagtcatgagtgtcctgaatagtgttgtgaataggagattcatagcctaaagaagaagcaattctggtctcactcgacatataagctcctctcacaactttgaaccccatttggattcccttatcctcggcggcgtttgcagccaggagcaacctatcttttgcgtccttgagataagcttggatggttccatacacaatagggctattatttttgttgtactcgaccgctgcagcgtacgttaaatagtcaatgatgggctgaaccgaagtgtgctcggcatcgaccgagagaggcacattggcctcggcacatgattgacacaatttgaggagtctctcgtagcctaattgtaggtctctttcttcttctggggttaatggttctggctttttaagggtatggtacattgggctattgtctgcgaaaataggcaagctgtctagcttccatgggagctcaaatgaagggtcttggtgatgccatctaagcaagtcactagctcgttccaacacactcatgggacaaattgccgtgattttaacaataatgaaactcgcctgttaagatcaatcacaaaaccataatcaaaaaaggaaaaaataaaataaaaatagattataggtcattgtcacaaaaatgaaaccaaacttcacgtgactaaatcaaacaaagattgacgatatttatattgataactattggaaaaagtcatgatagcttgttttgatttgaattttaggttgcgtgaaataaaaaatattatttaaaccagttttgcttgtgcctacacattaccttaaaattaaaggtgttatcttaaacagtcaaagccaccaatttccaattttaaaatattttacatatcataccatattgttggagctttgattttatcgatttaacttttataataaaggcagaacccaacttgtttgtcaactaagtagtaaggctagtacggatcgaacatcctcgacaacttgacacggctacttacctcgtagctgtaacaggactcttacatatatcccaggtgtgtacatgcatgggtatgtatatatatatttatattatatatataaacacaacaacagctgtgactactttaatcaagctcatgaggcccacaagccacgtggcaaaaagcacaaataacatatacgtggttccacgtattaaaaatttatcttttataataccctttaatttcttacctactcatataaacggtaagagtccccacttttctttaaccgcggttaaacggtaaaatatatataatccatttatttttgttttcattggcctaaaatatatttaccttttttgattaagaccacgttaatggttatatttatataatttcatataaaagaatatgaaaaataaagaaactaaaaatagtaacaactcacagaagatggaggaagagacttggttgattcaacggtttgaagaaagccatcaagattacgatcgcatgactcgttatccgcagcgtactccaacgcgtacacaagcatacctctcaaaccagcttctcgaagcttcaagatcgtttttccggcggctgcggtgtcttcgccggcgcaaaaatgctcgtaaaacgtgtgacgtattgtctccataacgatgttcttaaccaactccgtttccataagcttcgatttcatcacccacattcccaagtccaccaccggctcgatagccgcgacgtggagattcgccgacgctctcagcagcctcgtcgtgggaatggaagagaaaagcttctcggtgttgtaaacgtcgaacacaccggggcttccagtttggaattcgtcggcgacggcgacggcggatgtctcagatttctcagcgaaattgagcggcggaacgcccggagcagagaaggccgaggaagaggccgccgagtttagaggccttgagaagtaacgtaggcttttcaggagatttccacggggaacacggcttgccataaactctcttgttctttctttctaactcttttttctctttctcttttcttctaagagctctgtttattttcaaggaaatagttttggagtttttctttaattgctctgcaaaaatttctgttgtgaagatcaatggtaggaatggtgcattatatagaaaaatatttcgtgatttttaagtggtatgggtagttttgtaatttccaaaagttcgggaaagtgtttaagttggctttatattctctacgactaaggtgtacataaattatgttgaccattagggaggatggtgtttgactttttgacttcaaatcagatattttgattggtgaaggtttatagtagcgttatattgagtagcagtagattatatcccccgtaccccattggtttcgtaattgttactaaatgaaggcaagaggcagtctcatattttcacgcgcggaatttgtaaacgtgggatggcacgaagatcccggttgagaattgacgatgcagcgtgttcgtcgggagtgtttgtagttcacgcgcgtatcagagagtgaatgtgtgtgaataaataggtagctgtcaaatttgtatacttacgtggatccacggaatcttgatcaagtcttaagattccattagctgacgccagctttcccactcttctacgtggttctaaaacttattacttaccccttctcggtacttacccgttctctcttgtttttttttttttaacttaccctttcttttttaacaagttaaaaaataaaaataattctttcaaaaaaataaaaaataaaagataaaagaaaataatgaaggtctctcttaaatgtaattcaaattatgctaataataataataagaataataataataatgtaatttaaatttaaatacatatctaaaaaaatatctttatattattacttttttcacttatcaaaaaaaaaataattttataattataatagatacaattaatattgctattattattattattattattattttacattatttaaccgatcccaaaagtaaaagaccattaattaccaaactccctttcttataaaaagcaaacaataataaagtaggaaaaaaatatgttttgcatttaaatttaaaccctgtttactgaaagataacaatttttacgattaaaaaagagagataaatatcataataatgaatgcaaaattttgtttccattaaaataatcctatttttttaagaaaaaaaaagataagaattaaacaattatggaagttactttattcaaatcacccttcgcttcataaaaataaataaaaataataatctcaatagtaataaataaataaaatacttaaccatattataaagagggaaagataacataaccaatatggaaatttattactaaagatctagaaaaattcacaaatctggtaaataatatttttaaagaatacaatccgacattattcaactatataccttttttagctaatgttactatatgtatactattattcaactacttttttttagctaatgatattttcataatttaggaaagtttgtatttgttgtgtacgggtaaagacaaatattattaatgaatattatacacgtatatatgtattagatggatagatattatattaatgtttggcggtggtaataattataaattgttgttgggtgtgtgtgaatgtatgatgacgaggctcatctcaatatatatggatcgaaggttaaggtgcaccttcaatttttggtggatcgtgtttggtaataggtactagtaaatttgcggattttaaggtaattattaaaatcagtcttgtaaaattgttcaaaaaaattcagtctaataaaaagcaactacctaattagttaaagtgatcactctcatactcaatattaattcctaattaaataattatactcttctctcttcaaattattaatcatcttaattattagagccaactatataatgatcgctatatatgctgtcaattcttatcccaaaaacacacacgcacttgtgtgatgatatgaaatgatggttatatgtacagcaattggattggataatggattgtatgtagtttaatttttagtggtgcacaaagtgtaacaagtaattgttacaacttgctcaattaattgaagggtccatttatttattttattattcagttctcccgaagaatttggaaagtgtaaggctaattaatagtgtttcctctcattggtttgtctatattttgaaagttgaaatgcattaatcaactcataaatggagtatcttctttgattcgtttccactttttagattccatgcatgactttaaaatttgatattaaatattatacaattacgacacaattgaagaaaacactatattctctcataaaaaaacactatacattataattaattaactggattagatatcagttaagtcccgatagatttttattattaatattattttttaaaaaaacaaatcacgataactaaatgtgggattgtgcttttaattagattatgggtaaaaataacatggaatggatggatggatatgcaacttttgaggaaatgtactaaaatcgatctattatttaatttgaattataatgtaattgatagggagatagtttatgttggagagagatgaacacatatacatgggctatatatatatggccataaaaacaggatcataatgtacaaagcaagacaaactttgtggtgggtggccagttgctatataatatatatatacaataatttgctcatcatactaactcatgcaatactacagcaaaaagagtacttagtcattttcttaagttagaaaggatatcaatatatattgcaattgttcgcaatcaatgtctatgaaaagaaaagtaaattaacactctttaaaaacaaaactattatataattaggagtgctaacaaagatttagagcctagcctttgggtgtgtttttagaatagaataaaatatttttttgtcattttaaaaattgaatagtgtttggctcatatttcttaaaactatttttagattttttttattgaaaaaaatatcaatattctataccataccacgatataaacttaatccactttaaaccagactttaaattcagactcggacctcgtacctgaaccccgaccctggacagaacctgtgtctgaggtttgggatcggggattcggagtccagatcagggtatatgagcaaaatttaaaaaaaaaaatatgttcaaaaataaaataaaaaaataacattttgatgttatttgttttcacttaattcagtttatagaaatctctgtttttaaaaaatttagctaaacacatcgtctagtttttaaaagttttttttattttctgttttaaaaattaaaaacaatttttagttataaagtcaaataatatcccttagcatccatttataaaatttatatataatatgtaattatatgcttagaaaaataattaaaagttattttttaattaatttaaaagcatttttgggagaaactagtttttttttttttttgaaatcaaaatcaagttacagcttacaaaggattaggcatgtctcgctcaatagcaagacttgcacaagggggagaaactagtttattcctatataatttatatataattcttaatttattaatatattttttttattgatatctaaatagttggaaataaacttttcatttagaaaagatttttatataaagagaaaaaagataaactcttacttatctcatacatgtaaaaaaacagtaaaagtttaattaaaaaaaacataatcttcttattaatttttatctttcgtttttttatttttactaagtttaattttgaagggtttaaatcctgagaaaagagacgtaacaatttaattgtttaatagtaattcttcgaaattactattttattgtgaagatacattatgccttataagtagcctaggctgcatggaaatagctgagaaggacataagcaaaaagaatttggttttgcctttaatttgcttgggaaaaactagcttattactaagtcattttgtgagcatcaagtgaaatgtgtatagtgtatgtatacgtattttattaaatatatgggtggaaaagtaaggtcttcttattctaagtcaatagcaaggtgatcctttgttagtgaaactctgaaacaaaccaataatcatagcttttgttgtatattgattttagagtagaaaaagcggctcttgtgatgaatattcaatattctgtctctgttattaatatagattggtgtttggaaattgccaactacttttctcatgctaaccttattatttattgtgcaagttgaacattataaagcagctgtcattaatatatgtcatcaatagaaaggtatgagtacatctttccctaaggtctactcaactttagtgaagttttcatttggactgattttgagaaaaatagaaattatttaaaagttaattttttttattgctttggggttatgaattttttttatttttttttatatttctatgatttttttatacaatatttttgtaataaaagttaagaataccatattttaagtttttgtattttttttatatcacatttaatacacttaaaaaatattaaaaatatttaaaaaaagatatttacaaaaaaatatgagaaaataaatagaagttttataatatatataggatgtaaagttgatgtcactaaatatgacattttataaataaactaactaagtatatgagtatttaaatagaaaatgctataaaaaaatattaaaaaagataattcatttttcaaaataggatcacgctttctccagtcacacaaattttttttatctcgtgcgattcaaattacttagtttctcatgcgatcaaaaccaattaccaaagattttttattaagaaactgaattttttattacaaaattggtttcttcatcaagttttttgatctaataaaataaaaaaataatatgacaaatatataataaaaataaaaggcaaaacactaattttgttgagtagctttgacagttggagaagaaatttccctccccttgaaaactaccagcctctaggctagctaacctagcacttcaagccagttcatccactactggagaaatcaaacaacacttaataaaataaaacttacaattgttcaacaaattatctaagtctaacacaacaagagagatatggtagcacccccaatcaggagcacattttagctttgagaaagccaacacaacaacttgacaattaaagaaaatggaaacatcatcccaagaattcctttgagttcaagagagagcaaggtagatggcttgcacttcggattccaaagctgaagcagttgtgatgcattgagtaatgtaattaagccgaagagtgatcttcattgttggtaaaccatgaagcatcagtaatcaaggagtacttcgttggttctttcttggtgttatcaattccctcccttaagcaatgagtttggcagccatgatcaacgtccaaggagtactccttgaacaacacaacaatatgattcttacagagagcccagatagggggtctgcccttaatcctggtactatttctctgttttcaaatctcccaagtaacacaaccaaaatacaagatgagtgaatacaacttgatctcgttaagattagagacaaggccttctaagaactggattaagttgtcgtatggaattttatcaatccgaagtgggatatcgcaggaaaactaaacagccttagcaaaagcacagtccctgaataagtgcatactattttctttcccatccccgcagaggagacactccttctcttggttattgtgatgctatattattataatttaatctagtaacagattttgctggtgtgttttttttttgggtgacttacggttagagacaagatcccagttataatgctagctagttttggtagcaagagcaaaaaaatcactattaaagtataacatgttagcagaaagtttattaaggctcttaggtagatgaccaatctgtctacataaaaataaaaaataacaaggattattatattaatgaatgataatatttgatttgaaattgaactaaaattttcaattgtaataagttcttacaaatgagaagaagttgaaagaaacttttgaattctcaattgatagaggtttgataaattggaaaatggtttttgaagactcatacggtgttgttgtaggtacttgtgttacttttgaagacttagttgctacacttgattgagaaagtaatttttgtagagtactcattgattagtcgagatgatttttctttctttcttaaaaaaactttgtcctagatactctaaattttattttagaacgggttctatttaatttatgtctcagtgttgttagaatcaatttttttttaattgaaaccgatttctgaattattgtttgttatttatttttactcattatattatggaactggttctatttcaattttatcagtatttttggaacctattccctcttattttttaattataattggtttatgagctattgtgtgtcatttgtttttagtcattttcttttggaactaattatattttaattggtttttgtgtgtcagtttttatcttgatttttttatatttttataaaatatcctaaaagtatggaaaaaaaatgtaaaatttttacaaaaataataatttatgtaatttttcctttaaaaaattatgccataaaaaaaacataaattcaatttttttaagtgtaaattctactttcatttttcactcaaaaaaaaaaaaaaaaaattctactttcatttactaaaataaaaacaattttaaattctgaaatacgagtgccagaataaagcagtcaagtggcgaagtgtatcgaccacagaccttattcctctttgattaaacgaataaagctctttcagccaaaacaaaaaaagattaataaagcttgaacaatccgccattgaagctttttgaaggtaaacatgtcagcctctaaaaatgaaaacttgtctttccatttcatcgattaaagcttttcagtgctgcgctgctcggtttaagtttctttcattttctttttgtgttgatccctttgtctttggttttagtttaaatccaggtctgaaccatttggagtttcgttaatccgaaagatagctgctttgagttttaaaattacatactttttcgtatattttagttcttatcatccaaattgtgatcttaatattaatatttggtctcattgaattgcttatcttttcaaccttgttgcagaatttggattgttctgattggctctactcttcaaactgaaaaaaccatagttgctttcaacacagagaaggtcagtaaaccctattgataaccatgagtaatcaacaacaggtaaagaaaagagtggcatttgtgctgattgatgggttgggggatgtgtcattaccaaggttggggttgaagactcctcttcaagcagcaaaaatacccaatctggatgctattgcgtcagctggagttaatggtctaatggaccctgtggaagtggggttgggttgtgggagtgacacagctcacctctctcttttgggatatgatccaagagtatattaccgaggtagaggtgcatttgaatctatgggtgctggattggcaatgtcaccgggtgatattgcatttaaggtgtgtctatataaatgttatatgtgaatagtttgcttattgtatttctatattaattatcatgtttttagtagggaaaaggcttttagtttatacttatgctgattatgcaagatttaatatgttgggcattttgaatttttcatttgttattagtgtgttcaacatagtactcatgggcaacttttgatctgcagtctaattttgcaactttggatgaagaaactggagttgttatcagtaggagagcggacaggcattttgaagaagaaggtcccgtactctgtgccgcgcttgatgggatgaaactaccatcatttcctcagtatgaagtaagagtcaggtgcaatgtttattactgctataaattttctttgaaattgattttgcttctttttaagttggtaattaaggcttttgttcacagcaatctccttttgtttttgagcatacgctatacttttttgtattttttttagtgattgcaaagaactagcttcactaactctactcaaactttgtagtgtgtgtcacaatgcaataacaagttgtagcgatccttaagttttcacttaaacttgcacttctaacatacgtattacatggagcaaaactgatatacagtataataatttcttacaggtatgctacagaacataggtgtggagtggtcgtaaaaggaccaaaattaagtggaaacatatctggaacagacccattaaaagacaaccgcttgcttttgaaagctgaagctcttgatgacaccgatgaagcacgacatacagccaatgttgttaacgagctatccaaggaaatatcacggattctaatatctcatccattgaatgcaaagcgggcctcagaaggcaagaacatagccaacattgtacttttaagaggatgtggaattcggattgaggtttgttgtctcaaaacttgtaattgaattatgccctactgatgttaataaagaatcggtcttgtaggaatcgtcatcctttgggaagttttataaacttgtactttgtttttaaaattctaaatcctggtaaattatttcatgttgcaggttccttcatttgaacagaaacatgggttatggccatgcatggtggctcccacaaaaattattgctggtctgggcttatctcttggcattgatattttggaagctcctggagcaactggagactaccgaacacttctaacatctaaagcaagtgcaatagctaaggctcttgctgcgcctttgcagtcatgtccaaatgtttttgttccaggagcggatgagcacaaaccaggccgtccagatggttatgattttgggtttcttcatataaaggtatcctttactgttctacttcttgcttcttgttttctacttgcattttacttaacccataacatggtagtttgtatttaatttactagaatgaattttgagtacgttaatagtatgtcgatttgctgaaactgttaacatttttttttttaatattgtaggcaatagatgatgcaggacatgataaggcaagtcttttcaaagtcaaaggattggaagctgtagatcgagctataggacagctagccaagttcctgtgggaggctgaatcaactggggaatttcagtactccttgtgtgtcactggagaccattctaccccagttgaatatggagaccacagttttgagccagtaccattcgcattatgccgattgaaagattttgttggtgcagttggattagaatccatcttaggaacttctactgatccattcccacttccaaccattgaaaaaggagaagaccttgcagacaacgtagcagcggaacaagaggaggcaaaaggaccatttcaagccttcgctggtgattcagtttatgagctgaatgagattgctgctgcaagaggatgtcttgggcgttttcctggtggtgagatgatgggagttataaagcgatttcttaagctagatgcataaaccactttgaccaaaacctcagtgaattatgagtggaatcaattcaccattaaaggttacccaaataagttttctcttagcttgaattttctgactaataatgtcctttaacgaaggtttgagagttttctctattcattgttcaagtaataatatgataagttgatgcaactttttttctttttcttttcccttcataattttttattgttgttttaacttttgctattggaaacctgcattatcggctgaaccagaaattaactccaaaaaagggaaataataataaaataaaatgaaaaaagaaaacattgtatatttcctttcagaggggctagactaacaagggtctaatgtatcattctttgataggctgaatatgcctgatggtgctttcaataatgcatttcagttatgtcacaaaaggaggttgctttatctatttgaaattaaaaatagagaagaaaacagacaaaactctccgtgctaccaacttttgatatttgtattgttttctcttgtcacatttgctttatttctcattatgcaaaataatatattcataaataaagttatgaatgatttctataccgtgtgtatgagatttctctggaaattgtaatgtgtttagcaaaacaatattgtttaaacatattacaaaaagaaagtggtaaagatcaacaaaagcaaggtagtctttctttttcttttcccctatctactttaactttattaaatgaacaccattctagcctcttgaaaatatatttctcttatgaaaagcagtagtgttacacgtacatggtacaacaaactccactttcctttcttaactcacaaggaaaaataagcttataaacttcagagacagaagaagagtaaagaagatcaactatgtatgtaactaggcctctttccatgtacaggaaatctccaagcacccttgagatgaaaccgcctgatggaccatattcaggccttctggttattacagatgaagaagctgattcacaggacatgctgtgttggggtcaatggggtctgtgtggtatatgcaagcgtaagagtgtcaagaagcttccctttccacaggataagattttgtcgattgtttatacatctgagtatcatgaaacaacaaccaccaacgtctggttcatcccagttccagatcaacctctctcctccaactgctactatgttatcagagcaaaaggcagacataaagggtaagtccatttcttttccttggggtttttttttcctctttgtttgccgtagcttatccttatatatggatttccagagaagaaaagagtacatacccttctgaaatatactctcaattttctcagccaagtcaccccaagacataaccagacaagtttcaaccaaactttttgttcataattctcaaacaaatagcttagagttgttttcttcatctgatcttacagaaaagcatgcacgtgtgcaagagagggagacataataaactgttgctttagagatgtcttaagggacaaaaagccaaagcctttaaactttaaaaatgtataccaacaagtaaagatctaccaccatcatggtggtggttttttcgccaagtcagtagctccagatggtgttcctccaaagttcctaagaacaaaaggttggacagttcatagctcaagcttaaaccgtttacggctaagcgaagctttgggtttggaaacctctcttcgggctcaacttcccaacttcaagttccccatcttcaacttccactcatcccctgtggtggttggaaaatggcactgtccattcccttttgtcagagataaaacaacaagtccaaaaagccagatgaaaaaatcaatcttttacactttgacccttgagcaatggtgggaagagatattctcatgtgggaatgttgaaacaacaacaacaataataatcaagggaattcagtgactgtagatgcttatgtccaaagggaggtgtatttggtggctggaatggaagctgtgagggatgacagaagtggtcatggtgggttttcttggttcaaagtgtataacccaaatggaagaagaggggtggtgttgagtgtgggagtgagttcggccattgctgaacatatgaggtgggttttggatgcaggtggttgggttagtggagatgaaagagaagtgaaggtggagagagttgaggagaatactaatggaaataacaggtggaggaagtttgggtgttatgtgttggtagagagcttttctttgagaagattggatggaagtttggtgctcaaatgttcctttaggcacacccaaaggattcaatgcaaatgggaataacatatcaatggttttagatgtatagatagtttatataagatcccttttatgcgtgtaataatactttaatacaacgttaatacaatgtaaacaaagactcacaatgaattgatgttagaacgagtgagtgtatggttaaggaagtaggaataagtgagtgtgtggtaaggtgcatgggtttttatctcaaatgtccttttaggcacacccaaagaattacaatgtaaacaaagacgctcacaatgaattgatgttaatatgcggaaatgtatggttaaggaagtaggaataggtgagtttgtagtaaggtgcatggagtttcatcttaaaaccaattagcaatgaaaggattaacctatgtatcttatgtaatggtttatagttttcacatattatcaatgtgagactctttaatatctcccctcaagatggtggttattttttttactcactaatcttgcacgactcgatcacaagtggcacttttagctcactatctccgaattacaaataattctctttggctcgtttttttggactgattgttggatttagatcagatacttgttagagttttctttgcatgaggttccatttgcacagtttgatcacaagtggtatttttggaacgtcttttgagacttatttttggatttagataagtgagtgtatggtaaggtgaatagaattttattttgaaactaattgagaatgagaagaacaagac

SEQ ID NO: 14503 - DNA, 4134 bp, Cannabis sativa
ggtctgtagaattgcatttagtagcaataattttttgtatatttttttttggtcaaatcagtttgacactccatatttgatgggcattggtgaatctcttctggggtgtttttttttttttttggatgtaatgaatgttatgtatgtatgaagtttacttattcttggatgctgagagtattggaaaattcattcttctttttcagccaaactcctgttctacttatgctgatttctatatttatttttcaatgcttttttatagtctcatttatgagtgaattagttcattcaagaatgttctccaaatgctgcaagaaaagaagaatgtttttccaaatatatattaatttgggaatggaaaggactccaagtagagatacacttgtatcttggttataattatcaatgcagatagagagagcaacttgatatactctcattcttttatagtatgtggctgaggattttgtagttgcacccacatttaactgagagaaatttcagaatttttgaagaaaaagagagttcattagtggaagtatgggagaaaactaaatttttttgagtggcaacttggattttaatatcaaaatattttgagaatttctcctatttagatttatccaggtattggggaaacatttgtataattagatatatcctatgagggagttgtttcagttctgatagtagatgtatacagaagtaatgagctccctaaccattctctattacaagttgaagctcattttttaagactcacttcctattttaatttttatctaagaaatgtaattagagaacataacccgaaatgcgtatagataaatctactgccagcccttggattaacttggttataatcatcaatgaggatagatacagcaacttcataacatcatgtaactttcatttagtacaccttttgattattgtatgcttaataattgtcaaaactatggagtcctcataagatactctcatgcttaatcatgtcatagtaacatggtaacaccaaaagccaagccaatcttatagtatgtggctgaggatatgggagaaaatgtggtttatgcagtgactggggtgacattttgtatgattagatttatcctatgaaggaattgttttagttctgatagtagatatgttatgttttgtattaaaatatatttgttaccacggtttttctcagccactagtgaggtttctcaataaacttaagtggggtcagtctaagacaagtgacctctgtctctttttcaaaaaaagaaaaaaaaacttgtcttgacaatttcatttgaatcccaattattgaatggactgaatagatgcctgatgttgtaggtttactaattagtgttgttagtgttgttttctttatgttcaacttcacaaaaatggcttgtggtaaaattcatagttaattagtcaacattttctagatttcctaaacttttatgtttttggggtaaggtaggtttggcaaaagttgtgttgaagaaagggaagacacaactcttcaaggatggaagtccaatggtttacagtggagccgttgatagaataattggtagaccgccaccggggactggtgatatggtgctagttgctgatggtgaagaaaaacctattggttggggcatgtataattcttcctcaatgttctgtgttcgattgatgcagctagaagaagaagcgaaaaggtgatactttattttaagctttaagagcttgctaatacattttcgtcgcaatgacattccattcttgatttagagacccttcatgtgcattggacatgatgaaactacttgaaacaaggattgatgcagcaatagaattgcgtaaaagcttggggcttccttcagccaatacaaatgcttatcgacttgtgaatagtgaaggcgacaggtaataatttctgcccaatagtttcatgtttacaaacagttattgcaaatccattcatattgatggtgaaatggggatccaattggagttgaatgagttgtacagttattttaggacatattagatttcttgttaaatatcacatcctggttagatatgccaaatgttaagccttgtcaaaattatagatgatgaattataacttgttggggttcttagttttagtaaggttagtttgatgatgctattatactgtgtgggaaatccttaagttcatattttacagcttaatattagtctcattagtataactgattaggattttagagactgaattgtcaaattcttagtggctttaattgagctatcctatagtcctaaggtgacttggtataaatagagggctaggaggcatgacacagggagataccgaactgtctcgaaaagttggaaccttagtttatcatttcaccacctttacttacaatgtcatattactttacacaggttgtcaggactaattgttgatgtgtttggggatatagctgtaatagcatcatcagctgcttgggtggaaaagtacaaaccacaaatagaggcctgcatcagtagaattagtgaagttaatcacataaactggagaccatctgtagatattttaaaagaagaaggattggatgtgtccaatttgaagcaaatgaattcatctacttgtcctcacagaacaaaggtgtgaaaatcttattgttattgtctcagttcatgcatggtgctccaaactaaactatgtagattcttgccatataactacaaatcgcctatgttgttctatcaaatctgttcttttgtacccgtaagttaagatggcttgacttttaatgccgtcttgctattcatttaggttgttgaaaatgggatttgttatgcaatttcacttgaaggccagaaaaccgggttttatgctgatcagcgggagaatcgccatttcatatcaacaatctccggtggtcagaaagtgcttgatatttgctgctatagcggtggttttgctttgaatgcagcacgaggaggcgccattgctgtcactggtactaattccaatttgttttgctcttacaattcctcctgattgctccttatttcatagattatgttgctaagaaattagttatgctaaaatatgactttactagtatggaattgatcagcaatgttaagattttatcagtaagctgatacaaacagtggctcactctttgatggcctactctgagcctaatctataagttaccccttccgtgacgtcgatctcaccagcatgactctgatactacttgatacaactatttgggtaaaactcactcacgaaagctaactgaagagaaaaagctacccaagtaattatatactattaatcaatctcatgcatgcgagatcctaacataaacatgtttacttttattcattattcatagtaggatataggaacaacctgaggtattctggattttacataaaacagaatgaaattagatactcgttttacagcgaaacaagattattcttacagcatctgttttcaggtatcgattcatcattgccagctctagagttagcaacagaaaatattgttcttaacaacatggatcgagaacgaatttgtttcctaagagaagatgcaactgaattcatgaagggtgctctctctagaaatgaatcatgggatattgtcattttagatcctcctaaactagctccccgaaaaaaggtgtaatttttcatcatctggtttgtgcttctcatgatatggctcgtcttgttttcaccacataatcaacgggttctgaatccaggttttacaaagcgcaacaggcatgtatagaaatctaaattgcttggcaatgaagttgacaaagaagggtggtcttcttatgacttgttcgtgttcgggagccatgacacaaagcgggatgttcttaaagattctccaggtaacttatccaaaaacgtaatcattttctgcttacgtgcacaaaagaatcgatcttgtacgaaaaacaatttccatacatcgaacaaaaggcgaaactcaaatagaccaataaactcaaagggcacctatagtgtcaagcaccataataaggtgtcatcttgttgctcgtccaattctttttttttcggtaaataatatgttggtccaattcaatatagggtcaa

SEQ ID NO: 14504 - DNA, 13352 bp, Cannabis sativa
  modified_base (1281)..(1285): a, c, t, g, unknown or other
  modified_base (1437)..(1440): a, c, t, g, unknown or other
  modified_base (12910)..(12915): a, c, t, g, unknown or other
ctgtgtatatgtaacggtaaaatcccgaagtcgatacagtagtaatctagttagtatttaacggtaatatctaactaaaactttaaatttacaaagaaaagtaaattgaagggggtttttccaccaaaacaaaagatagagggattaagtgtataaaaattaaaacataagagggtttttccatcaaaaaaaaagataagggggttaagtgtattaaaactaaaacataaagaagttttgccacaaaaaaaaatgagagagttaagtgtgtaaaaattaaaacataaaagaaattcgccgtaaattactcgtaataaaataattttagtccaatatttttcgtgtatcatatataagatatatatatttgaatttatatatatatagtattttatatgtgacttgactaagcaacactacttatttatattaaaataataaacattgacatacttgtttatgtcatattttccaaggatataagtagagttaacaactttgtttgtgtaacttttataaaatattatattataaatattttttcttttgtttttgtttttgaaaatggaatatttttttgtttataatatccaagttttttttttttgatatattatccaagttttaatatttaataattagtaacacttatttaatatttatagattgatactacaaacaaagaagaataaatatcttaataataattaactatagcataaggaatcgtaatataattaactaataataatgtgacctatccatttcatgataataatcataatgtgtattcatgtctattatctaatgttatatacacttaaattatacacactaattacacataataatattatttactaaatattaactatttatatttttaggtggagactacatcatttttaattatatggttaagattaaatatatattattatatgtaattagtgtgtacagtgtatttctaacattactcatattttaaacatacttgaattttatagggtgaatttggtaatacttatttaattatttttttgtttttaaaattagaaaagtgaaaatattttccaaaatcatgttctataaaactgtttttacttattaattttttatttaagaatctattttttttttttaaaaaaatcacttttaaatttttttaaacagtttctttttattaatattttagactctgaccccaacttagatcttggagcccagacttggacccgtccccgattccaacctcatacccgacttaaataaaatcaacannnnnaaataaaaataaaatttacaaaacactcttttattttttgtttttaaaattgaaaaataaaagtgatttttttttttttgaaatggaaaaataaaagtggttatataacacatttttatttttcaaaaataaaattttaaaaacaaaaattnnnnttttatttttgtgattaaaaaatataaaaacaaaaattttactaaacactaccataatattttattttattttttaaaaaagtgttgtaggtggcaaatcatttcttagaaccgctaaaagaaattattgatacctagtattttataattaaatatcatgtttcatataacttaaaaaaataatactaatacttcgtaacaatgggtttttttttttatttaagtaagagcattaaatgttagttcaaatcttacttgaaaagattattaccaaccttactgttcaaatatttgaaaaaaaaggtaattgtttaaaaaagggaaatattcatctaaagtttaaacaaaaaaggaaactaaatgtgatatgtgaaagaagtcttaaaaaaccaacctttgccaatcctctcctgtctcctccatatcttcctatttttttttctttccactttcttcacttataaattttatttagatatttaaatttttttatattttttataaaaatctaataataactaacagagtaacttaaactgtaattaaatttcacataacaatttatataaatattattaaaacaattcaagcaactcgaaccataaatttaaaaaatagtatataagtattttatattttttttgtacataaatattttttgataaataaaggatttttttcaaaaaaaaaacaacaaatctttatttgtatatatttttcttaattaaaaagataaagaatatatttttctttatttgtatacatatttccatagtaaaacaaatcttctagtgcactgtttggattgctaataggtatatacttcattcatgcttgttgtaatttgtatgtgtctctctcttctctctctctagtctctacaacatttgaatttaaacttttattaccataaacaaaaacaaaataataacaataaataaataaataaataaaccaaaataaaaaatttgagtgtggaggaagaagaagaacaagaagaacaaggcctttggagacagagagagagaaatctaaagcaaagcaggttgaagttgaaccaaacttacccatctttcaaaactactctcattccaacaaatgtggctttaaggttcgctttccaactctttatttgatcttaccactttctctctgatctaatctgacactagaaatctttgttcatccatttctgttttcatttcttatttatttttttattggaaaataggaacggagttacgaagtgggttcgttgagatctggagggaaggagaatgaggcagtcattgctgggttggatttgaaaatttgggatatactttggtgctgcctttgagatttttgcttatcccattagggttttattcacgattttttgaagtgtggggtttttctattttctattattttggtagtcatgactaccaagcgcgcttacaagctccgtatccttctcctattgtttttcctatttgttcgtttaattcttctattttgggtttggtttgttttttgctgggttgggtcatgaaattttgttcacatttgattgatttgttccacttgtcagctctataatggagtttgttagccttaaccagagtaaatttgctaacagaggagtttgtagcacattctgctgctgtcaactgcctcaagattggcagaaaatcctctagggttcttgtcactggtggagaagatcacaaggttaatctttgggccattggaaaacccaatgccattctggtacgcttctttttctttgccctcttcttttcccttggttatatatatatttcgtcttgtgctgtgattctcacttctcagtgtgatttttttcgttataatttatctgttggcttagttgaatatcgtttttttaaaagaataatttatttggaatagtgatcttttactgttagcgatgaatgaactgtgaatggtactaccatatttttgatttaaagaaatttggatcctcaagtcaattgtcaaatgagcttcatggtttagtagcgttccaaatcaaactggtcgaaatttacggcaatgtagctttctcccaggataatagatatcttgtttgttttaataactggctaccacacttttgtatccagagtttgtctgggcataccagtggcattgattcagtcagcttcgactcatcggaggtgttagtagctgcaggggctgcaagtggtacaatcaagctttgggacttagaggaggcaaagagtatgcttttggctctacatttcattcctttaactgcacggcattctaaatagttgcaaactttttaaagactaagacaagcatgcttatttgtttagtcatgttgtgctatcatttaatcattaaaaaactttctcttgctatgccattttttgtatagttgttcgaacacttactggtcacagatccaattgtatatctgtggacttccatccttttggggagttttttgcgtctggctctttggatacaaatctcaagatatgggatatcagaaagaaggggtgcatccacacttacaagggccacactagaggagtcaatgccatcagatttaccccagatggccgttgggttgtatctggtggagaggacaacaccgtcaaggttagagttgcaaaaaaaaaaaaaaaaaaaaatcaaaattaagaaagggcattttgtttcattctgggtgattgtactgtactattttcagaacgtaacagtgattaagtaatatgaaggtggaagtatcattagggtacttgatttgctgtctggactctggacagttgtgtttgtatgtgtattttgttggttacatgtagcagaaatatgaaggtctatatgtttttaaaaatgaaaatttctttgcaaggcgcttgtcatattttgtattaatgcgctgtaggaaacttagagaagagaaaaaagaagtaacaatgagaagtaaagtgagtgattttctgaataagcctgtagtttcataaataagtgtttaggagacatacgaatccaaattcaactaggaaaaagataaactttaaatattcacaatataaacttacaataattctattaataaaatattatgaaatcctacgtgtgtgttatcttattccacatcagagctctcattttgtgttgaagttttggtttcaatcttgaatttatttgcatccctagctctagatgctctagtcttttatgttttggcatgtatgtgtactattaagtgttttgcatacaggaagaaacaaaaatttatagtggttttaagaatctttccttaaaattataaaccgtcgaaccctactgtactttaatccttatcaagaagctctaaaagccttgaaaacacaaaagttatttgctgccaagcctttcaataaacaagtgtttaaactttttagcagatagttgattttggaaatctaacattctacacaaatgcaaagatttatttctaagtttccaaatttaaatcccagtgtcgtaagtaaaggttggtagtgtctgtctgtattttctctacgcttgtcctgtagaagtgttgctgttatttatttatttatttaatggctttttgatttaaaaactgcttcacatcacatctcttcttgctgtgccgtgtctggattgacttgtctaaaatctatcacatgaacacggttagttttggcacataagagatccaatctgtcaatgttactgcaaacatacacatgtgcatgtaactattcaaacattaattttaataccaaaagaaaagaaaaaaaaaagaggttcgagaagaatttagttgatcgtttgtagcttcattttcaatgactggacactattgtgcactatgtaacagttgtgggatcttactgctgggaagcttttgcatgatttcaagtatcacgagggccaggttcagtgcatagattttcacccccatgagtttctgcttgcaactggttagctattctctcatttcaactattagatttgtattattcagtcatacccctgttcccaccaactatgagtttatgatcaatcaatttttaaatgctgatttggtttgataaatacgtagaggttattttcatttgatgcatcaaaagtgctactaaagtcaaccttgtttgtgtaaagctagtaagaaaggaacaaaatcaccggttaagttaaccaaaagaactaactgcctcagccaaaacatgttcctcagcctatacaaatgagagccttgaattaagctcaccattaccaagctgtaaatttaagcttcatttctactatttcgtacttcttatttcccattacttccactctacattctaaaccctcttagacactctgctgatcatgaaatgtttcttctactggtctggaaaaataatccaatatactctgacgaagttgactacattaccagctacttcatagtgcaagaaaaagtggttgacttgactgacatgtcttccatttacttattatcaactttctctaactatgtctgataaaacaagcagcaacaaaatctgcttgtcatagtcaatctgaaaataatgcggggaaggcgaaagagggcctgcaccagcttataccggtaattgggctattctacattgtcccatattaaatttgatgacttggagattgcatttaacactactcccagatatcataccgaaccctaatcccaagcttggactaatcttatgttagtttttactttcgctccaaaatttaactcactttcctccaacactaatcctacctgttgtacccaaattcttgatgatgagcttcctttttatgctgcctcttcttcacctaaagtttccagtacagtagatccaccagaagttgcaaatttaagtatgagggtaatcacctaaagtttccagtacagtagatccaccagaagttgcaaatttaagtatgagggtaattgtactggaaacttgtagtagtgtgactctactgtcttttcatgcaatatatttttcatttttttctcaggttcagcagataggacagttaaattctgggaccttgaaacttttgagctaattggttcaggtggacctgaggtacttttaagttcttaagaaataatgtaacctaagtttcaaatttccaagtgaattatgattctttcttatgaagggaacttatctgattcatttccttttatatcagactagtggagtgaggtgtttgacttttaatcctgatggaaggaccctactgtgtggattgcatgaaagtttgaaggtgcgagcttttagctagtaaatattaattggtacaataagtctatgctcactgacattgtcattattttataggttttctcttgggaaccaattagatgccatgatggtgtggatgtgggatggtctaaattatcagaccttaatgttcatgaggggaagcttcttggctgctcgttcaatcagagttgtgttggagtgtgggttgtagacatttcggtatttttcattctctttgtctaccttattcttttctagctttcaacatatttatcttgtgaagctggtgtatcactcacaagttcctcttgtacagcggatagagccatatgcagttggtattgatagcagattaaatggtcattcagaatctaaatcatcaaacggtggcaatctgtcagtactaagtgagaacacttcaaagactagtttgggcagattgtcccaaagttcagatcctttagctaaggaaacaaaatcacttggtagattgtcagtttcgcaaaattctgatgttaaggaaacaaaagttttggcatgtgagtaaatgttggaaccccatctctctctctctctctctctctctctctctatgctgattttgtattttgttgtttggcaataaggtgctggagttcctatgagctctcttcttttgtcttgtttgtgtttttttttgtttagttctcctgatacttttttgtctttttctgttgctgcccatcctgagtgaagccactggaaatgtacctggtactcctcaaaggataaacttaagcaacagtcccaaaaaaattcttccaagctcaacagctgttcctagtgcaacaaccacaaagagaaattctacgagggtacactcaacagctaatgtttcaactttcaacaaatcggaagtcatccctgttattgtgccaagaacggatatggctcctgaaccgaagaaagagcttggcttagctggaagaacaatgcctttctctttacagtcaaaggcaacagagttccgaaggtttcctgctgtcagagaagaagtggataaacagactgcatctgtacttgctgattccactacttccaagggtgctgaattcaatgttgctgagagccagaggaatattttctccagagttacaaactcaacccaaggaatatcttctgaaaagaatgccaaggatgacagaggcattggatcaggaaaacatgaaatgagttcacagacagagccaagtgctagctgccagcctgacaattgtaaggatttaattcagaaaagtttattttctaactttcttttttcctataaatattggtaaaaagattcctattctgttttttctgtattatttgatatttgataataacaatgctagcttaaatgatcataaggttttcttgtcaactcaagaatctctaatcatactactttcttgaatgctcgtaagaaagtcaggttagtatccttccttttattggggaaaggaacaggtagtgcctatccttgaagcatgaaaattataagtagaatcgattacactaggaacaacttattcacactaggatcgtaattgtaaatatttttcactttgttaagtacatgagcttgggtatactattgttttgattaattctttatacatgtttttttattttctatttttttttcagatgaaactcgcgggaacaagttgaacagagatacatgtactgttggaggtctaagatcaggtagctttatttccattattaatattctctggtatcttttgcaatctaaataagtaatctaagttcattatggtaattctaggaagggccagatctattgctgtaaattgggagaaaagagataggttttcaaattatgaggggcctacttccagtatttcctctggggcggtatccacaggcaacatgcccccttcgaatgtgagttttgttttgactttgtgttaaatgtttcttttaatatttgttttgacaagcagtatattttggttgaaggcactagctctagtttttgttgcttgctactgttataaagttctgttatggaatgaaattcagcatcatttaagcctattggctaaaggcgcttgcttgcttagatgaaaaagtagtcacttcacattcaatttaaatgccggttatcaactctctttttttttctcttatcaaaatttaaagtaaaaggtctctcctttatgagggttggtgagagtttagttcgtgggagaagttttccttcactttgtaacacacacaacacatgtgacatagtgctcctttttgaagattctctttctcatggcatataaacgagattagaaactaattgaacttgagttctaattatataaaagacatttttttgtttctgtatgtatgctggtcatagttattcactgctgaattgtaacgtggattcattagctcattttgacttctaattgagttttctttatcttttacatgactgaagtccaagcagagaggatatcctccacctgttgaaaaagagtcggtgcctgccaccgatgaggatgccattgctgatgttatggaacaacatacccaatttgtgagctctatgcagtcccgttctgctaagttacaggtggtctttctactacttgtttattgtatatgatggtttttgcacaatttgcattgggttttgcttcacatggtttttggtggaagaatgtcacaatgttaaattgacttcagaaagcaatttcagttactaatgaataccggtatttttatttggctaattagtattaataaataaaataacaaagttctgcactgtgacgtaactttccagggaatctacagatactgggaaaggaatgatgtgaagggggtgattaatgcaatggaaaagatggctgatcatgctgtaagtattgtgtgataatgtcctatttattttaatttgacttgttcctgtcttgaacaaacagtccattgagttttgctctctgatttgggatgttcatgttaattcaggttgttgctgatgtagttagcattatggccgagaaaattgacattgtcacgctggatatttgcacttgtctgctgccacttctctctggccttctagagagtaacatggataggtaaaatacttatgtttgttgactttgtttcatttgtgttattttaagtttaaatataatctcatagaactggttttgaggctggttttaatgcttattgggaaggttatttgactgcacttttacttgctctatgctctttctcgatttatcatctctttcttctcattttcctttgttaagtaggaagagttctagtttgtttctatgagctcacatataccacagagttaaatatttatttattttggttgatcttcttttacatctactattatcagactgtttgatcagtatataacagaatgaacattataggcatatagggatctctttggagatgctgctcaagctggtcagaatatttggttcgatgatctattctgcaatatcagcatcttcgtctgttggtgtggatattgaggcagaacaaaggtatgttactgaaactcttccacattttctatagtttatagttgatgtattgtccaaatcatttttcattttgcatataacaagagtgcctttctaatttttttaacttaatacaatttttttttaccttgttcaatccacagactaagtagattcatttaaacaccattgtaggatgtttggctatctaaagagtgaaatatgttacctatgaagaaatgagaaattaaccacttgaggctagctcaagtggccataggtaggtgtgtgtgttggaggtcctgggttcgagtcccagataaaacatggttgtaatatataaacgcttaagtcaaaaaaaaaaaaaaaagaaatgagaaattgaaaaatcattaactagtaatatcaaaaattatacatatacattaaaaatgtaatttccattttctgtttcctccattctttgtactgtctctcttaaagttatcatgtccccataaattctattccatcaagttctctcataaccttagcttcatgaattcttcgaaatgaatcctcaaatctcattttcctcaagtgggtgtggatctctccagaacctgaaccgccgtcaaaggtgtatatgagggtatatggcagcagactcaacctcctagaaggaaaaaaaaaatgaactttgttctattactagttgcttataaatatattgaagaaaatttgctgagaaattcagtaagtagtttgaaaggttacactgagttataagttattcttttttggtgtctgtgtggagtcagtaagtagtctgaaatgaataaggttctttggcagaaaatcacattttacattattttagtgcacgaaaggcagtaataatttattagttactgacttttgctgcaccaaattggtctaaaatgtgactttttctaccaaagaatatgcttaggctatgtttggaagttggattatagcagggaaagaataataaggaaaatgtgggaaaaatacaacgtggaatattaaaaaaatcaattttttatgttcaatatgaaattttttgctgaattatttttttttccaatgccattctttctatacccaaaactgaattattttttttttccaatgccattctttctataccaaaacatgagattatttttttattttattttatttattttttcaccctttttttcccctacattttccttacctctttctttctccaccaaaatccaacttccaaacatagccgtagtgacttgagggaaacattttaaactacttggtgattttgttgccaaaagattacctagtgacttggatgcaaccttttgagactacttactgactgctgtcattattttccttattgttttagtataacttcagttggcaattagtagtactccctttttgtctagtccgattcgcacaaagagaattgccccaacattagtgttctcccaaaagatggtgtggaacccatcttgaacctggttcttcaccctaatcacgagggtaaactatacaggaggccttttgtgccaagcctcataattgattggccttattgtaattattcttaatgtcccctatatggaaccaaaaggcttcaaggataatcttgtaatgttattaattttacttggtcccatttgaagttgaactgaataacttgatacagttttaaaatttaaagggtttatgttgataatctcttaaactagaaggcagaatgatataatttacatatggagttaagttccaaagctgggagatattaagctcattcattcttgcaggttggaacgttgcaacacttgctttgtggagcttgaaaaagttaaacgctgtctacctcccctctccaggtttttctttttgaactgctttagtttgcttgggttctgcttgttgttccatttgaacctattattcaccatttgacaccggtttccttctattcacctatttatttgtagaagagggggttcaattgcgaaatcagcgcaggagttaaatctagctcttcaggaagtttcttgaccaacagcatcggcaagtggatgtgttcaagtttttctggcctgcaaaaggttatgtttgctttagggggagtttatgcattttaagttatataaacctctcttcaatgcagcacctgaaggttcagactcttttggttcgtgtcatgtctagtcctgacttgggggctctgtcctgtctgtacattcgtcattagtgggagttaactacaggctaattctactacatttactaaaaatcgaaaaggcttatggatctgtgaaagctctagctctacctgctgttgtttggacagttttggcaacactattatacagttctacttctatttggtggaggagggaagtctaccactccatatcactctaacacaacatcagtatgtgccatcatattataacctttagctgcattcacgttgattcaattatttttaaatactcgtgtaaaagattggtgatcattaacaggtgtctttccacaccttcctgtgagtagtagtggctttttctaatatgaaattcttttggtatggcatcactgtctgttcttttctacatttttccaattaacaatctctctctctctctctcnnnnnntctctctctctctctctcattgatagttgttattatgttgcatgttgcagttcttaatgacattcttttaaataacaaaactaacaaaatatttatgttgtaattttttctattattattagtattttttttttattcctatttcatttttttaatgtcaattttgcaatacaattcgcagaaattgaaaatcaaaataatctgttggtggaatgagattgtaaatcaaaaatactggtaagtgacaaacaaattgcaattgaataactaaactgatctttaatgtatttataattttttgtttaaaatcaaattacggaaactagaaaacttaatggacagatattatctcatatgtaatagttatgtttgttattagaactgaaaatggttctatatctgatcacatgttttgttcatatagttttttttttttt

SEQ ID NO: 14505 - DNA, 4941 bp, Cannabis sativa
ttgtcatttaacaaaacacagggtctaattggtaacttttgcaaaacagagggtctaaaatggtatttaccttaaaaaaaaattaaaaagatattgagtttttaataattttaccttatttttttaaaaaaacagattaatagaaaattagaatttttttcaattaataatttagtgataacaaacactatttggtcaaagttttgggataataaaaaaaatcaatatttaccattttaagggtaaaaaggagtaggaattaacatatgagtataagagttataattgtataactgttatatttaatttttttaataaattgttcaaaaaaaataaaaatactaactatttaaaattaaaatcatgcgtagaaaaacaatgagatcaatggtgacaacatgtagatcaatttcattccttaaacatttaaaaatgttatgtttacctaaaaaaaaataattataaaggcaaatatgtttttcactcttgcatctctaaatattagaggttttcttatgccaatgttgtgtattattgatattagttgtcttatttgaaagtggaatttttttgaactcaaatcttctgcctatcttattatttcatacccaattaacaaattttgatttttaatatatcatccagaaaagaaaacatatactatcgtataagtttctagttatgtttcatagtttgaattttaatgtgatattaacaatatatctctttattattcaaaacaattagagctaaagttgtgattatatggtcaaactcactaaattatttgtagcatcatgatttccatggatttagcataccatatatttggtccataattataccaagacaattgttattaaataccaaatataattcggacccaaaaaattatatattttagtaatgtataattcatgtaacaagacagctagattctaagattgattgattttacttattggcaatattatgctaagatttcttcttctgacaaatcagtagaacattaccagacaacttgactatttcaattatatattttaagaaactagaaaaaaaaaaaaaaaaatggcatactgtttatttatttctaaccatattccttaaaaagaaaaaaatgtgggctaaaaaatagtcacaggcgcataatttcctcttttagttatttaaacttatgtataagaaaaaatctaaaaattaatttattaggaaactactgcaatttttttcatcacccaattggacagtatataaattttaaaaaaaattaaatgaaatttaggaaaaagaaaataaaataaaaaaaataaaggggtgtaggtgtatatatatataaagtgtttgattatatatattattatattcaagtttgacgttgtttggtattaaaatgctttactcacgccttaatcagaggcttttgaaacttcagtttttgctgttaaaacggtacgatcttttcgatcattctcttatcaacacctcatctcatatcattccctagtctttgttttacaattacatacattattattattattattagttgagtaaacccacttaattctccggtgactctcctcggatctggtcggagagttttaccggaaaaccaggtcttacgtaatgatatcttttgggcttataaaaacccgaaatgggtctgtctctatatttttatatgtatattctaaacacattttaagtactgtgaagagcaagttatgagaatcttagagatgggttgattattttactctgttttttttatgaattcaagaaaagttcttatttttatttatttatttgtttgtttttacattttctaggtgattagtgcttcgattacgtaagaagagtcagcttgtcttgtgctgagagcaagagcaagagcaagagaagataaagatttttgttaacattattggtcattgatttgatctgtttagattaaattgaatttattttttttagcattgtcatcttctactactacccatttagcttaaggtcgcctctacccaaactttttggttctttctgtgtttgtctggttcttcaagggaaactcattttaaagctgtgattggtggagttcagccctttttggttggtgggttttgaaaataaaatgtgcagagtaggagagtccaataaggactgtaattacaaggaagagaagaagaagaagatgggtctcaaatttttgcttaagcttgagaattcaaagattttaatgggttcaaaaaccaggatgagattgtggatgataagggcttttacgactgtttttctctgggcttgtgttgttcagttaatgatgtttggggagctatggggaccaaaactgttgaaagattggccttcttgttttactacttatcaggatttgcctttggctaatacttatttgtcttctattccacccaaaactgtttacccaccaaagagtgagtttctgatttcaaacacagaatctttctttacttaggaagctcaaaatctcaattgggtttcttctcttgtgtttcagggatttacaggaacaatggttatctcatggtctcctgcaatggaggactcaaccaaatgagggcagcggtgagaaaactagctacttttataatgattatggacacttcatttccattttatgaaaccacattgttatttatttgtgcatattctgcagatatgtgatatggttgctattgccagatacctgaatgtcactctaattgttccagaactagacaaagcctccttttgggcagacccaaggtgggttgggttggttttatctttgtacatttccatagtttctttcttcaaactgttattaaattgcttaagcttttcttccttgttttttgcagtgagtttaaagatatatttgatgttgaccatttcatctcttccttaagagatgaagtaagaatattgaaagaattgccgccaagggtcaagagaagagttgaattgaaaatgttttactctttgccaccagttagttggtccaactattcctactatgttcaccaggttggtgcaaaaagatagaacacttcacttgcttgtgaccttttttcttcttcttcttcatatttttcctgaatattgaaactaatttccaaattttggttcaacagattcttcctctggtgaaaaagtacaaagttgttcatctgaacaaaacagattctagacttgcaaataatggcttgcctactcaacttcagaagctaagatgccgagtgaatttcaatgctctgaggttcacttctcagatagaggatttgggcagaagggtcgttaggatattgagagaaaagggtccttttctagttcttcatctcaggtatgaaatggacatgctgtctttctctggttgcgcgcatggttgccgccccgaggagatggaagagctcacaagaatgaggtaatcttggtccctatctagcttctaatacttacactcttacataacctttttatggccaaatcttatcttatgaaatttctgcatgattttcagatataataatccattgtggaaggaaaaagctataaattcagagttaaagaggaaagaagggctgtgtccattaacaccagaagagacagcactagtgttgaaagctattggtattgatcgtaatgttcaaatttatattgctgctggagaaatttatggtggagaaagaaggatggcaagtttgaaggctgcttttcctaacttggtcagtagacaaaaacataagatcaataacctttttcatatatatatttataaattacagagccataaaatttatatttttttatggagcaggtaagaaaagagactctgctggagccctctgatttgaggtttttccagaaccattcttcacaaatggcagcactagattatttggtctccctggaaagtgacatatttgtgcccacttatgatggaaacatggctaaagttgttgaaggccatcgcaggtattatatataatacatattatgattctctatattattaatattattacattttttgttcttgatatcataaaactttgatctgaagtcaagtattttatacaactacagattcttaggtttcaaaaggactattttattggacagaaagcttgtgattggtttaatagatcagtacaaaagtggctcattgaactgggatgacttctctttgattgttaagaaagctcatactgatagaatggggaatccaagtaaaagagtagctataccagataggcctaaagaagaaggttacttctactcaaatccacatgagtgtttgcaattgatagatgatgatacattattattgaaaagctcatgattctttctatggttggtttctcctgattaattatatggtcatttacaaatgatcaagaagactgttctttcagtcaactcaactcattcaatgacagggagaataaaactcagtacagcaaaatatgtagaaagtaacttgtaaatgaaacctttcatagcatttaatttattaaaagcaaaagcaaaaaaagaaaactctggagtgaaaatgaagcctgctatttcagggtcatttgcagagccagctagtgaaaggtttgggttctcttgctgtactaattcaattcaactcttcattggattgattgtaaagtaatttttttatgccaacaataaagaagattatgccagctcttaaagttaaacatcaatggtggtcagtttcttagtcaaagtattattttaataaaagttgtattaagtacacatttaagcatagtctgactaattatattctccaagagagacaagaattatgatatgcagatacattcacagaaaatatagctgtcttaattcttatctttataatataaataatattgaagaattattttagcacctggaaaacatcatttg

SEQ ID NO: 14506 - DNA, 3061 bp, Cannabis sativa
tgtgtcaagtaatttaattttttgcaattatttttatattctgcctgttttgttctatctctgcaaaaactgatttctgcagtaacaaaattactttctgttgctgcagacttatacagttttatatacagtatatttctgtaataattattggcattgaaaaaaactcgatttttttagtatttatttcggtgtcatattattattagtgtaattaagtatcaagtttcatgtaacttaaaaaaaaaaataacttttaagagatatggttaaacaatggcacaccacctattatctttaagtttatttttgaaaaactgtcccctcaaattaaattctgcgtacacactaatcaaaataacttctggcttgctggttgctgctactttacttcacggtaggccatattatgtagtattgtggggcttccagaccacttgacaaatataaaaatccaatattacatgcaaaaactcgcaacttggcacgtctttaatcataaaatatagtaacttcaattattaatatttattatatatttagattaataccacaaacacaattacaagctgagtgtaaagacatttatataatataatatttaaaagatgattgttagaggcttagccaacctggccatacgatgtaacatttcttgatatcaactaaaacgataacactatgttgcaacttttatggagttttaaattatatacttgaacaaaaagttacaacaactctttctaatagtaacacataaagatagtttgatactaaagacaaataaaaaaataaataaaataaaaagcaaagcataaaagggggagaaaaagagcccgcgcgcatcgacttgcaaagattcatgtgagtgaaactaaaagtgaaacagatcttcatcgtgattcatgagacactgttcttataagtcgatatcctaatctccagggaacttgttcataataataataatagtaattattggttgctggtaaagccatcggggacaactctacttagctttgtctcaaggacttctgagcaaatttgacccatcatatggtaaaacgacatgagatcagataactgctctacagacattttgcccatcacatttcgagccactgtttgtctttcctcattcaacttcaacttctttatataagaattggcattcctaacggttgcccccatttgtttcagcctattctcttgttgtaaactcaatgctgtattcgactgtacacatgcataaaaaatcatccctttagtatctatcattatacaaaatttgtttcaaataaagtagtaagtgtgtaatatttatgtcgacatactttgaggaattcggctcccgcttcaagttcagattcttcctttgaatccatttcatggccggtggcataaaggtttctagcaagtgagaaacttctggcaataacttttctctttttctccaattcttgatcgacctttaattgtttggtaactgttgtagagcaattagtcagcttcttttgataagcaatcaccgccttaacaaattcctgctcaaacatacaaatcaattagcttgtataatattaataattacatattaaggttaaactaattaaaatatgtacctgataagcagacgggcagcccggataatcaaattcttcagaatctggctttctcattctttctgggtgaaattgtagacccataataaatttaccctcctcgggattgtaagcgtctgggtcataaaacccttctattaaaccatctggggaaaacgccatcggcacaaatctttgagccaatttcttgactccttggtggtgataactatttacccaaatctccattttctcttcatccaatgaatctttgaaccattcattcaatggggtgtcttttacgagtttgacaacatgtctatgatcatcatagttatcatagtcaatatgcataactttgttattgtcattagtgttattactttcactttcttgtttattgacatttttagagagctctttctcaacgtcctgataaagggtacctccacaggccacgtttaagacttgggaacccctacatattcccaaataaggtatgttcctctccaaacaaagcttagcaagactcaactcaatggagtccttttcacggtcaatggctgtgtcactggcatgaagattcttaatctcttccagttcttgcggcgaaaggtccgaaggttgatccaattctcctttgtacagagacgggtcgatatcttctccttcgcatagcaggacgccatggatgggctcaaagcttctcaacaacgtgtttaccccagaaactcttgggattattacgggtaccgcaccataattcactataagatcaagatggtattctcctgaagaaaagaagaaacaaacacataagaataaataaaaacagaaactaataattttaacaatgaaagagaaaaaaaaaaaaaaaaatcttaacgtacctacgaaatctacaaatttattctttcgaacgctacgtctggatacgataagcacgcgagggaggatatcagagagatcggaagacattgccaagggtgtgatattattgttgagttctttgatttgtgatcccatggttaagggctctctctatttatagaatttttgtataacaagacagagacgcaagtatggggtaactggtaaggtcgatttgggtaacacttaattaaaatatatcattatctatttaaagaccaaaacaggtgagatatatcctaattagaagacgattatgtattattttattatatattagaccggaatttacagcctccttgcgccgcgtatagagaaatttttaattcatccttatcagtgtgattcgtggaaattgagtctttctatatatctttaattttttaatttcttttttcttgattattctctaagcgcttacatatatttttttttgaaacaactaagcgcttacatatttagatataatatttttaaaaaaacgctacacttaaattttatacatacagtaaatatcttatacattaaat

SEQ ID NO: 14507 - DNA, 4574 bp, Cannabis sativa
tgaaaattattttcaaaaaacaaagccaaacaagtcaaattgttttcaaaaaacaattctgttcttaaaaacaaaaaaatagttttttagttctaatgccaaacatgcactaagtttctaaacttttttaagaattttttttactcttaacaaaaatttttttttaaaaaaaaaaaaaagaattctttttaccgctagttttaactgcaaaacttcactctctttttctatttttggccacacaaaaatattatgttctttttttttttttttgaaaaagaaaaaaaattaagtacttctttaatataattttggcaccaccatttattaaaaaaaaaatagcaccaccatcaaaggaagttgagatcgaacttcatgtaggcaaaagtggctgtatctatctcatctcgacagtaacgttgactttctcctcagaaaaaccgcgttcaggttgactttattttcttccctctttatttttttccaaggaaaatccaaaaactcatgtttctctcactttgacttaagagaacaagtttatgacagatagattgtaccttccaaacattcaatagaatcagtacccattttttcatttcatttatttatttatttattatatatatttatatatataaagtcttcaattttgagcttcaatttcactgggagcctccttcgcctcctgattgatgatctcattcataaccgcagcaccagccagccaccaggtacaattcattattcactattctaatccaatctcattctttgattcgatattacatgaactcaaacttggataacgattcaattctatatctttcgtgattttctgtattgatcttgttctgcaactgcttcatctaaagtaatcaagaagatgaatcagaatcattcaacttgatcctattataaaaaagtagaattgtgtctaattcagtaaaaaaataatgagattagtcaaatatttggggctgttgaacctggcaacgcaggaaaaaggggtttctcagttgggtttggtaaagggtaaagttaaattcaaaaaaagtttgcatttttatttttctttccttttttttgtaacaagtaatggtaagtaaaggtcgttgtcgtgtataaatgtctacccaataattcaatgccgacaattaagttatttccatctagaattgtattcattaattaattttattcctaaaaaattgaagtgggtctctctacgtacaatccatctgagcctgtggggtgggatctattgatctatctatcccaaaggaggaccatttaaattcaggtttgtcttcaattctcaaactttgatatatgaaaagttttattaacaaactggtgaaatgaaggagacaacaaaaagcccacttgatttcccacctaaatttagtgtcgtttggttgttgaaacctttcgttttcttgtcgtttaatgtgaattcagataatatgaacttgaaagtagaaaccagaaagttgatatgggattcatggaatgaaactgaactaccctttaaaaaacagttgaccattgtttttggtttaaatattcattatatttcattttgtggcacaaaagaaaaaacagatcaaaacagagaccatggagctgaaacagagtatcccatttcttcttcttgtaataatactattccgaacttcaatggccgatccacgtacgaaaatggtgagcatcatgtgcgggaatcaactagagcataacagcacccaattcgttccaaacttcgtggcagtaatggaaaacatcagtgaacaaatgagaaccaagggctatggtagtgcagtggtcgggtcaggacccgacgccaactacgggttggcccaatgctacggtgacctttcactcctcgactgcgtcttgtgctacgccgaagctcgttcggttcttccacaatgtttccctttcaacggtggtcgaatctacctcgatggttgcttcatgagagctcaaaactacagctttttcgacgagtacaaaggacccgaagacaaaaccgtttgtgggaacaagacccggaaaggatccgggttcggggcttcggttaggcaagcgttgagcttggtggtttccggggctccgactaataaagggtatgcaaaagcccaaatggggtcgacggcgaatgattcggcttatgttatggccgattgttggaggaatttggatgagaaatcttgcagggcttgtttggaaaatgcttctaagagtataaggagttgcttgccttggtcggagggtcgggctttgaacacgggttgttttttgagatatgatgataaagaatttcttaataaagaaggtggaagtggtgggaattcaagaggtgagaaaaattagttgatgatggattttgtttttgttgtgttttcttaatgattgtattaaggttgtttggttttggttttggtttttgcaggaactagagttgtgatcatagtttcggttgtgagttctgttgtggttttggtggttgcagtggctgttggacatcatatatggaggaatagatatatacaaaagaaacgaaaaggttagtagaagagacaatgtatatgggaatttacatagttttgatttttaagtcattaaaatttttttccaaaaaattgttaaatttaaaaactttgttaatatagcgattgtccataaattaaatcatgctcccgaattttaatatatattaaatcatgtctcctaaaattgtgtctctaaattttcattcacaataggttttctttagttaaattagacaaaagtctttaaatccaacaatcttaatagttcgggaggaatttttaacgacttgaaaagttcaaaaggcataatttagtacatgtcaaaattcaggaggcaaaaattaaaattagccttagttgataattttggtttctgtgtaaatttttggtattttaggttcaaacgaggctaacaagttagtgagaacgttgaatgatagtagcttaaatttcaagtattctacattagagaaggctactgaatcatttgatgacaataacaagcttggacaaggaggttttggatcagtttataaggtaacctgtccatttttaattgctttttccttgaaaagaatttgtaataattaattacttgcagggagttttacctgatggaagagagattgctgtaaagagacttttctttaacaacagacatagagcaggagatttctacaatgaagtcaacataataagcactgtggagcacaagaacttggtcaggttattgggttgcagttgttctggtcctgaaagccttctggtgtatgagtttttgcctaacaagagtctcgaccggtttatcttcggtatgacacagttcatattcactatggctctgatcactgaaaaaacatgttctaacacttttgaattaaattattagatcaaactagaggcaaaggactgcattgggagaagagatatgagatcattgttgggactgcagagggtttagtttatcttcatgagaacaacaacatcaggatcattcacagggacatcaaatccagtaatattctcttagattccaggcttcgtgctaagattgctgatttcgggttagccagatcgttccaagaagacaagagccacattagtaccgccattgcaggaacattgtgagtttatcttttttagtaatactcttggccttttttagggaaagattaacatagttcatcttagaaaatgtactaaaacctcatatgatttttggttttgcttatagaggatatatggctccagagtacctagctcatggccaattaacagaaaaagttgacgtttatagctttggagtgcttgtgttagaaattgtgactggtagacagaacaacaggagcaaaagtgcagaatactcagacagcttagtcacacttgtaagttttaccaagcacatactctaaattggtgagacaaaaatgtgaattgttgacacttagtttcatctgatatgtttttttgtacttggccgaaacagacatggaagcatttccaatctgggagagttgaggacctttatgatcccaacctgatgttacataactatagagacaatcaggcaatgaaaaaccaaatatgtagagtggttcatgttggacttctgtgtacccaagagagtgcctcattgagaccaacaatgtcaaaggcactgcggatgctaactaataaggaggagcatcttcctcctcccaccactccacctttcgtcgatgaaaagacgatggaactcaatgacaagtacgaggacccgtcttaccctctcaatgcggacgatgatggctctattgctgatgttactcatagttctttctatccgagataatggcatgtgctcaaagacagaactcttctctttggtgagtcctgattcccaagatttcaacctgttctcacttcagactagtacaaagattttgctaaccatcttttgatggtaaatttttttgaaaatgaagtgaaaaaagggcaactatagatttgtacatatacatatgagcgtagatgaaccacatt

SEQ ID NO: 14508 - DNA, 14470 bp, Cannabis sativa
tggtgcggagggcgatgaaagatgcagcaaaaaggctagaattggcagaaatgagaggtatggttccggcagaggacaattccatatcagggatagagagagggaaagatgtccgagcaggaagaggacccgagattgggatgatgtagataaaagagatagggatagggatagggattcttttaggagaaaagagcattacaacaacaacaataataggagagatggtagagagagggatttgagagatagagaagtaaaggggtattgggagagagataaatcaggttctaatgacttggtatttagacatggtgcttatgaagttgatcgtgaggcaaaggttgttatcgacaaaagccaggattctaatgggaaagaggagagtaaatctgaagagactaaagagaagatacccgaggaacaagtccgccaatatcaattagatgttcttgaacaggctaagaagaaaaataccatagcttttcttgagacgggtgcggggaagacgctaatagctgttcttctcatcaaaagcctttcatgtgatatgcaaaagcaaaacaagaaaatgcttgctatatttcttgttcctaaagtaccacttgtttatcaggtaatgtgtttattttatgtgctgtaatttttttttttctgatgttgtccattcattttcaatgttttcgaagtgtaatgtgttgtggaaatgtcatcttagcaagctgaagccatccgtgagagaaccggttaccaagtgggtcattattgtggtgaaatgggtcaagatttttgggatgctcggcgatggcaacgagagtttgaatctaaacaggtagcttttaaatttcacgttgttttgaaacttttttttttttcatatgaaatgtttcttaggacaaacttacttagttatgaatcacactataagtttagattttagtttattactggattgtcaatcacaaagttcttagcatagattatttacacttgagcgtttgtattatttttcccatcttaagatgttttttatttgtatgtttatcttaaaaatatattgtattgttttcctaatttgtcatatgatgaacatgctgtttaagtaaagtatttggactcgggttgtgtgcaaatgtgtcggtgttattcaaacaagcgcaaggatttccttttacgcatatatttctataatttcatcattattgctcactcttgccagaaagataaccttttataaatttaggtaagaaatcaagcatatcgtcatctgatgtaaaagtgattattaccattcaagctcctttcattggtttgacttgtatagtgtagttagtttaagcttaaccaaggtatctgaaagaacaattgggtataattggcattcacttgctcattacccgcaatttatgactttcattctgtaatttacaggttgaatgtacttttgatttgctgcatgttttatcgaataatgattttccttgaagctgtaaattcccatgtgaccatgtcacatccttctcttccccttctaagctattgttgtgtgctgttagacttgttgcttgatgttttgattgatatgttactttgcaggttcttgtaatgaccgctcaaattctcttgaatattctgagacacagtataataagaatgaatgcaatcaatcttttgattttggatgagtgccatcatgctgtgaaaaagcatccatattctttggtgatgtctgaattctatcatacaacagcaaaagagaaaagaccatctgtatttgggatgactgcttctcccgtcaacttaaaaggtattttattactttttacagtgttttcattgacagttcttcaactgccatatgttaacaaatttttgtaattgtgttttattcaggtgtttccagccaggtagattgtgcaattaagattcgtaatcttgaaagtaagctagattcaacagtttgtaccataaaggatcgtaaagagctagaaaaatatgtcccgatgccctcagaaagggtggtagagtatgacaaagctgccaccttgtggtctctccatgagcaaataaaacagttggaagtagaagttgaagaagctgcaaaatcaagctccagaagaagtaaatggcagtttatgggagcaagagatgctggggccaaggaagaactgcgccaagtttatggtgtttcagaaagaacagaaagtgacggggctgttaatttaattcaaaaattgagggctgtaaattatgcacttggtgaactgggtcagtggtgtgcatacaaggtaccatctatcattaactatttgtgagatagtgtactaattgtatgtgtctttgtgaacttatgtactgtgtgtggataatttctcattctgatcttttcacaggttgcacaatctttcttggcagctttacaaaatgacgagagggctaactaccaacttgatgttaagtttcaagagtcttaccttagcaaggtggtctctcttctacaatgccaattatcagagggagctatctctgacaaagaaaatgtcaccgattctggtagtgaagatcctcataatgtaactgatcctgatgagattgaggaaggagaacttcctgacagtcacggtgagtctggttgtttactgttttcacttgcttgaatgcatggtttgtttactaatacttatgaaaaatgaatacctaagggttatttaagaataatgaagtataaagttttgaaattgggtttttgctcaaatctgtaaatatgaacccaatcagttaggaaatggtgtacacaccagttgtgaaaatattttaagcacagaatatctggttcttcataggttcgagggtgtgtgcatcctctaacattttgtaaattctctgttttgttagttgcaagaggaaaaaaaggaactgttcttgtaggaattaccatttattttctttattactttttcatggaataaaatgttgtgaattattaatttttacatctagatataactcatcagtctttattgtgcttaattttgttataagttggaatttgttgttaactgctcttcttgtattgcttagctgtgtctggtggggagcatgttgatgtgattataggagctgcagtagctgacggaaaagtgacaccaaaagtccagtcacttattaaagtacttctaagttatcagcatactgatgatttccgtgctatcatctttgtggagcgtgtcgtctctgctttggttcttccaaaggtttgtttacactataatgcttattgtttatgtatttcttcttgattaggttttatattctcgactccttacttgtcatgttcttcaagcatgcaggttttcgcagagcttccatctctgggttttgttaggagtgctagcttgattggtcataacaatagtcaggaaatgcgatcttgccaaatgcaagacacaattgctaaatttcgagatggtcgtgtatgttcaacttctattgttgacttgagcctttggggtaaacttatttactaggtgatctgagaaagttctttttcttatgttttgcaggtcacattgttagtggcaactagcgttgctgaggaaggtcttgatattcggcaatgcaatgtagttattcgcttcgaccttgcaaaaactgtattggcatatattcagtccaggggtcgtgctagaaagcctgggtcagattatatattgatgtccgagaggtaccttattttacgggaatgaatagcgttcctggaaaattcgattgatattctaggcttgtggcacccctatctcttaaagacagttccaaattaatatatctttaagaactttagcttttgatcccagttttattagtttaaataaagagcatgaaatattaggttaggattattataaattagggcagaaatatttaaatgactgaatgcaatagcagaactatgattaaaaagaagtaaatttaactgaaatttaaatctaaaatgaaaaaagaaaagtgtaaattatatgagaggattggaatgtactaactgcaaaataaagattagaaatgttagcaaggaatctaaaacttaattggaagcctcctatttgtaagaagttgaaacatggggctgtgcccctcttaaggcttcatctccaaaagactgaaagtaactcgaggtcctattcattgaaactcagaaggttagccctcttcttgtttaaggtctttaccacctagcaagtatccctgggcagactgcttgccacttggcttctgatttttcccctaacccattaatgtaaaaccccatcactaatagtatcacagttttggacatgacttgcttttatttttcaagtaaagttgttctttcctgtgatcttttagtatggcaattgtccccgccttttcatcatccacttctaacccttcaaatatataaaaaaatcctaggaaaaaaaatagtatcatagctttggtaatgacatgattatgattttgcaaataacgttgacgaacagaacttatttttaaatctctgaaatatatacattttcttcaggggaaatctatcacatgaagcattcttaaggaacgccaggaacagtgaggagaccttaaggaaagaagctattgagagaactgatttaagtcatttgaaggatacttcgaggctaatttctatagatacaacaccagatgcaatgtaccaggtggagtcaactggtgctgttgtgagcttaaactctgctgtgggactcatccacttttactgctctcagcttcccagtgacaggtacttcttttcagtctaagatttaattttctgatatgacccatgggacacactcaaggaaatagagattctaccctagttgtggttgtatcaatttcattgaaatgagatagtggcaacagtgtttaatttttggtgaaatctctgttgtggtctcatttgttttccaggtattcaatacttcgtcctgagtttgttatggttaggcatgaaaagccgggaggtcccactgaatattcatgcaaacttcaacttccttgtaatgcaccatttgagacacttgagggacctatatgcagttcaatgcgcctagcacaacaggtaagcgtcatctgatgaaattcattttagttttcatcttaaagcattctagaatgttcattttatttcttctttcttctgcaggctgtttgtcttgctgcttgcaagaagcttcatgagatgggagcctttactgacatgctgttgccagacaagggaagtggagaagaaaaagaaaaggctgaccagagtcatgaaggggatccactttctgggacggctaggcatagagagttttatccagaaggtgtagctgatgttctcatggtaagcccctcttgcttgttcatttagaatcatattgttttatttataatttttgagtataagaacaaagctaggagttcatcaagttttgggaattggttgcatagtttctaagctacataagatttaaccaaaattttgtagagctttcttgtgtcttgcttttgactttatatcggtagcttatttaatgaaatatacttgactaaacttcttagcctaactatttaaaataaaacttcacaactaaggcacttttccaatttataagaagttgtgagattgagaattgatatttgactttctgagcttaatgtcttttgtagttaattctattgagatggaaatgaaacagttttaatagtgctgctttgactttcccttttttttctttacagggagaatggatcttatctggaaaggaagtttgcaacaacccaaaattgcatctatttatgtatgatgtgaaatgtgtaaacgcaggctattcaaaagatccattcttgactcgggtttcagatttcgcattgcttttcggcaatgagctggatgcagaggtattttgtttcattttgcacttcaggtgtggtaatattcattgtcactttctttaaccataatcttgtgctaataggtgttatcgatgtcgatggatctatttatcgcacgaaccatgactacaaaggcatcacttgtcttcaggggctcaatagatatcacgcaaagtcaggttaaatattttattagcctactattgtctgattaatcacacaagcttttttacttttagattttcaacaactgatgcttgaatgaaaatttctattttaaacagttggcatcccttaagagttttcatgtaagattaatgagcattgtactggatgtggatgttgaaccttccaccactccttgggatcctgcaaaggcgtatttgtttgtccctgtggttagcgataaatctgtagatcctattaaagaaatagattgggatcaagttgagaaaataattggtactgatgcttggggaaatccccttcagagagctcggccagatgtgtaccttggcacaaatgagcgtacactaggtggagacagaagggaatatggatttgggaaactgcgtcatggtatggcttttgggcagaaatctcatcccacatatggcatcagaggagctgttgcacaatttgatgttgtgaaggcttcaggattggtccccgatcggggtgcagttgaaatgcaaagacatgtagatccttctcccaaaggaaaactaatcatggctgatacttcgactagtgcagaagatttgatagggagaattgtaacagctgctcactctgggaagaggttttatgtggattcaatatgttatgatatgactgcagagaactctttcccaaggaaagaaggctatctaggcccgttggagtacagttcatatgctcattattacaagcaaaagtatgtagacactacacatcgtcgaatcatttggcctttttagttcctttaccatttctaaatatttggcttaagcagaatgtatttcccctttcttttctggtcttggaatatattgattctaatttatgggctggatagccacaatgcacttatatgttgtgtctgaagaaaaggaaaagctaatgttattctgtagagttacttcttaagtctctgctactgtcaagtgaaaaatgtatggacatagatttgttccagacatttttcagtgacaatagctgtggatacctacagattttaagctttttctttcttctcgcacaacagaagtgtgtgcatttggttggctattgggttcctctttatataggtatggagttgagttgatgtataagcaacaacctcttattagaggacgcggtgtttcctactgtaagaatcttctgtctcctcgatttgaacatgctgaaggtacggttttgccatttctactttcgaactgattttactccacgttcttataaattcttaagcaaatggaccaattttgttggtgtaggtgagtcagatgagagtgtagacaaaacatactatgtttttctccctcctgagctgtgtttattgcacccactgcctggttcactggttcgtggtgcacagagattgccctccataatgagaagggttgaaagtatgctcctggcagttcaacttaagcacatgataaactatcctgttcctgcttcaaaggtgctctttttttcttttccttttgtggatataaggaactaattttaaattgttttgaactgtaaattgatgaatagacacctcttttatctgtctgcagatcttggaagctttgacagctgcttcatgtcaggagacattttgctatgagagagcagagcttcttggtgatgcttacttaaaatgggttgttagccgatttctttttcttaaatacccccaaaaacatgagggtcagcttactcggatgaggcaacaaatggtaagtaactttgtcttataccagtatgctttgagtaaaggacttcaatcatatatccaagcagatagcttttctccgtcccgatgggctgctcctggtgtgctgcccgtttttgatgaggatacaaaagatggagaatcatctctgtttgatcaaggcagatcaagtaataagaatacacatgagaagaatcaaccttgggatgaactcgaagatgatgtaatggaagatggggagcttgagggtgactctagttcatatagagtcctttctagcaagacccttgcagacgtcgtcgaagcattaattggggtatattatgtacaaggtggaaagtatgctgctaaccacctgatgaaatggattgggattgaggtagagtttgaccctgatcagattgactgcccaggaaagccgtcgaacattccagaaactgtgcttaggaatgtcaactttgatgcgttagagggagctttaaacattaaatttagagatcggggactgttggtagaggctattactcatgcatctcggccatcttcaggggtatcctgctatcagcgtcttgaatttgttggtgatgcagtcttagatcatctcattacaaagcacttgttctttacgtacacgaatctaccccctgggcgattgactgatttgcgagctgctgctgtaaataatgaaaattttgctcgtgtagccgtaaggcgtaatcttcatgtgcatcttcgacatggttccagtgcccttgaaaaacaggttatctaaaatattcttcttcactgattaatgtttttacactggaaagatatcccatggaatgctatatgctgttaaatttaaaaccaatactttctggtgtgtttacagattcgagattttgtaaaggaagttcaagttgagttctcaaggccaggtttcaactcctttggtttgggagactgcaaagctccaaaagttcttggtgacattgttgaatccattgctggtgctattttccttgacgctggacgtcaaactgctgtagtttggaaggtcagtttctgaaggaacattccctcactctttcattttctttttttgtgcttgtaattgtggagctaaatttttttggacatctatcttaataggtgtttgaacctctgttggacccaatggttactccagagacacttccaatgcatcccgtgcgtgagctgcaagaaagatgccaacaacaagctgaaggtttggaatacaaagcaactcgaaatggcaatttggctacagtagaagtcttcgtcgatggtatccaggtcggaattgcacagaatgcacaaaaaaagatggcacagaaactagcagcaaggaatgcactagttgctttaaaagagaaggaatcggcagaagcaaaggagaaagaagatgagaatggtaagaagaagaatggtgcccaaacgtttacccgacaaaccttaaacgacatatgtctgcgtagaaattggccgatgccattttatcggtaagagaagaatgaattcaacatctactaacatatataaagcaaacatgttgtatgtatttccgaccatgctatttctgttctgtatttaggtgcgtaaatgaaggtggccctgcacatgccaaaaggtttacttttgctgtacgagtgaataccaccgacaagggatggaccgatgaatgtgtcggagaacccatgcccagcgtcaagaaggccaaggactctgctgcagtgctccttttggagcttttaaataagttgtactcatgatcgaaaaagaattttggtgttcccatccttaatttttacagtcggatgagtcaccagtatcattgctcataagatagagtttactatattttaaaacggataaaaatgatttataagtggtcttaggtgcctttaggtgacaaatcaagtgtcctttgtacgtatgtattaaatttattaatactagagccttatacctcattcatttaataaattatcttcttttttttactgtcaaaaagaaaaatgaagaattaaaaagcgtacagaaggaaaagaaaagacaggcttttattgaatcacaaaaactcacaaagaccacaatggggtgaattgagttgataagagaattgggtagggtgtggggtttctacaattgttaaaaaggattgggaggaaagcaactacccaatcttatgcatacaattaagaagcatacacggccaattctttcttccatgcctgataccaaaaggggttcttcccactattcaaattgcaaaaatgaaacacaagacatcatagtttttcacaacgatggatacaccagacttattcaaatggtcaaaaaaagtagtctctttctaccgcctcagagtatgcagaatgtactcagcataaaggtccctgcaacaaatatataacatgaatatagtaaaagtcagatggctggcacaacattatcatgcaacctaagtagaatttttatttttacttttatatatatgattctttggttgtgaacattcctgtttaggaagtctttacagcatggtctaggttgttttagccgtatgatgcacttacattgagtactggatggcttcagtggcagtagtagagggtaaaaagtcattgactgcaacctctttgttctcatttttcttgtctgtgtaaaacaagttaagtagacaaaattcatcattcaaatgtactactaatataaaatgtatcaagtcttctaaatttatagttttaaaggatacagtcttcaaagaagcggcgaatctctgaaagacggtgaggagcaagttccttgatgtcattgtagtgcttgtattccggatcatcagcacagacagcaatgatcttatcatctttctctccctggaaaagcacactaaaatatttggaaaaattgacggtaaaaaatggaaatgtttcaatttgttaacgagattgaaaaagtacctggtcaatcatgggcattaatcctatggccttggctctcagaaaacaaccaggaagaactggctcctgctcagataattagatttggtttagtacttactgacatgatacattgcaagtataattttgaaaggtacatggcatgtttattataaagctatgaaagaaccagcaattctttgtacaaagaaaagaaaaccaaaaaattattgaatatgtggctttgtaataactgacctgcatcaggatcagaacatccagtggatcattgtcttcacacaatgtgcgaggaatgaaaccgtaattatgaggatagacaactgatgaatacagaattcgatcaacctgagaatttattcccacaataagaacaatctcaacatataattcatatgtccgggaagagcagaacgatgcaaattctaccgaccaaggttatactcgacagaagtaaaagtttaaagacccctctttgggaagtattcgtatttcaaatcttacacaagcttggcaataagtggagaaggatatttagcaggactgacatgcacaaaaagctaaaataacatcacaaaggagctaaatgttttgcataccttaatcagtcctgttttcttatcgagttcatatttgaccttacttcccttggtaatctcaaccacctgtaccattgcaacaagaatttcacaagagagactaaaagacagaatacattaagttggtgaacttaaaagcttcaaatactgaaaagagagactaaaagacactagcaaatgggaatatgagatcttcagctgtatttttgaggggaagaagtttgagcttgtggtgatcaacatagtaactttgaaatgtatatacatacatatatatattctatagtggaactaatacagaataccctaagttggtgaatttgaaagcttcaaattagtatgttgttttttggacaggttttctctccagtttatttattttcaatcacttatttaagttggaacaaatacatacacagttaaaaatgtggggagcttcaggtcctgcagagaatacatttgattcatgattagtttcttaatattaatggatcacaaagaatgacagagagagatcgtgatcaacttataagtaccaatctcaagatcatgccagggatgtgcagcaactgatcgcctagataaagatgaaagaatcctctcatttaaacgtgggactgaacgttgtgggtgttggtagggcttctcctcaacctcatggttggcttcgtcactcatctgtaagtacgaacatcaaatacagaaattaactctcttttcctcagatttaagtatcgtttgctcttattattatttattttatttttttttacaagcaaaagaaaaatccaatccaatccaataaatcataatataagtatttttagatgaaaaagaataataatccatggaatcggataataaaaattagatcatgttgtaaggtgaatcagctattcatgccgaggaaaaaaaacatcaataaatgattcaacaaatcatataaagtacttatttggtttctaatattggcatttaataattgtgtgttgaacagaggcagagtcaaaaaaataaaaaaaaaaggttcgattgtcaagctacccatttctaatttgaaaaaagaaaaagacagattcagttttatctatgaagaacaaatgaacaaaggattttaagttgttttttcagtttaataaagcttttacataaaaacgtagtaagcaatctaattccctttattttcactcaaagcaagatctttaaccaatactacatcttcatctaggaaaagggtctgttgtaaatatgattcaaatatgatcagattccccatatggtcaaactgggacttcttaagtgagcccaaaatcccagaaaacaacatcgtaaagcacaagatttgcgtccaaaatagagtaaaatacgatctaaaaagctttttattaataaataaataaataaaagaaggagaaaagtttggcagtattcattgaacaaaatcaagaaaaactcacaaaaacattagagacgtaccttaaaggttaacgagggattcacagaaagtttggtgagaatgtaaaagaaggcgcaaagaataatattttagatgggagcttttgggtttgtgtttggttaattaaaatgtatatttatttatatgtcgtgtaattgagatgaatgcgggtgggattggtcaaaatttgcagtcacatacacgaggtgtctcttcctgagagaagcttgctccccaacccacttgtcctcctcaactttccacgtttgtttgttatttcttttctctttcattttttttaaacaaaaaaaaaaaatcaaaaattggaaagtagaaggaaggggataatgtacttcaaaaattggagaatctctacagcaaaaaagaagggaaacaaaaggagaatatatcaaacaaaagaatgaaaggtcctaatactttatattatttctgatcgtgtatgaagtgtagaattatattgaagtaaatgtatttattttttgagattcaatctccatgagctttagatctaaaagaaaaaacttagtgtaggtatttagacttttaacctctctcttaatctagttattgtaatatcaatttaaacgattttctggtaacgacgccaaaaacttgttacgcagtgcatgtatcaagtaatactcacacaagtgaagtcgaaccacaagaattgaaattaaataccactaaattagaatacttttatttagttaatcgaaataattttagaaagagaataataaaaattgacaaaaattaaagaaagctattaatgtaaatatggatgagagattagggatatgaattcagttgtttcaattacccaattgttaatgttatttatgggcggacccacattacagcaagagagagcagtcgccccctgaaattattgggaaaaaaatgtatgtattttagttagttacaacatatatttataataaaatatgatattcacaaatatatagtaagtttggtgtaatagaggtcaaagattcaaatttcactaacaatactttattttatctttttgaaaaaattaggccccctcactttaaattctggataaataactctaactcttttgagattattaaggtcttaaattatatataatttaataattttgcatatctgagatagaataatatacaatttacattaagaaataatctattggttactcgtttcatatcaaaataatcaattagagcatttaatattcacttttcaaatttcatatgaagattataaatcatgtcaaatatggctaatctagaacatatattaacacaaatatgaacaaatcacaaaaatccaaaaagaaaaattaacaaatcacattaatatttaataaattggaataaaatcaatcaacattcatcatatccttaaattagaaaattagttcataacttcaacaatcaaatccatgtctaaactaaaaatataaattaacataagaaataaaagggaaaatggcgctttttactggttcggttacaccggaggtagctgaagcaataggcattcgtgaagcgttaagttggatcaagagacataattggcagca

SEQ ID NO: 14509 - DNA, 4241 bp, Cannabis sativa
tgaaatgtaccaaaaaaaaaaaaacaaaaaattaaaaataaaattaaaaaaacaaaaacaaaatcaaaatcagtctttgccggccgaaacgaacagtgactcgttttcggtctcaaaatctcaaacccaaaaacagttcttttctcttctttttccgattaatcgttgttgaaatctctaatttcttggagttaatccgttttcggaaatggtatctgactgttttcgaaatatcagttagtgtttgaacttttttccaaatactgtcttttcttttttatcagtttgactcagaaaccctagagaaggtggaggaatgaccacgacgacgaccaatattggcggcggtggtgccggtgaggacagagtgttggctactgctcagcagatcgtgaagaggctcaatccgtctaaggaggtaagagaagacatgcttttgatcttgcaaagctttgataatcggctctcgaatatcactgatttgattaacggtgaggattcgaggacggaagatcgatttgaagttgctgagaaggtgattcttcggtgggattcgaattcggaagcttctaggcactcgatcccttgggaagactctccggatgaggctgctgagtacttatcggctgttgatgatatactgaatatgatggatggtctttcgatccagtccagtaacgagtttgtggaccgggctgagaacgcggttcaactcgcgatgttgaggcttgaggaggagtttcgtcatatcttgattcggaatactgttcctttagatgctgaggggctatacggttcgatccggagggtttcgttgtcgtttgcctcgaacgacggtgaaatcgatgatgagtttgagagctttggggaagatgaccgtgacgccactgggcgttttcatgagagaggagctagcttgggagatgacctgtgcgtagatttgattcatcctgatgctgtggttgagcttaaggagattgctgatcggatgattaggtctgggtatgagaaggagtgtgttcaggtctatagtactgtccgccgtgatgctttggatgagtcccttgtgattctcggtgttgagaagcttagtattgaggaggttcagaaaatcgagtggaagattttggatgagaagatgaaaaaatggattcaagctgtgaagattggcgttagggttctcctaactggggagaggaagctttgtgatcagattttcagtggctctgaggagactaaagacatttgcttcaatgaaactgcaaaagggtgtgtgatgcagctgttaaatttcggggaggcagtcgctataggtagaagatcgcctgagaagctgtttcgaatattagacatgtatgatgctttggatgatgttttgcctgacttggaaataatgatgactgatgagtttggagtttgtgaggctagaggagtattgggtgcacttggtgatgctgcaagagggaccttttgtgagtttgagaatgctgttcagaatgaggcttctaggaagcccatgcttagtggggagattcatcctttggctcgttatgtgatgaactatgtgagattgcttgtagattatagtaagactctgaactttctcttagaggatgcagatgatgatgggtttacaaatgatgatgctgagaatgggttggagttagaaaatgtgtctcctattgctcgtagattgttgttgttgataaccacactggagtctaatctagacgaaaaatcaaaactttacgaagatggtgctatgagatacatattcctgatgaacaacattctttatatagtgcagaaagtgaaagattctgaactaggaaagcttttgggagaccgctgggttcgcaagcgacgtgggcaggtgcgccagtatgctacgagttatcttagagcttcatggagtaagacattgtcttgtttgaaagatgaagggattggtggaagctcaagtaatgcttccaaagttgctttgaaggaaaggtttaagagtttcaatgcttgtttcgaagatatttatagaattcaaacagcttggaaggttccagattctcagcttcgagaagagcttcgaatatctatatcggagaaggttattccggcttaccgttcgtttatggggaggttcggtagtcagcttgaaggtggaaggcatgctgggaagtacataaagtatacacctgatgatttagagaactatttgttggatttgtttgaaggaacaccttgtgttattcaccatctgagaagaaaaagtacatagaatgaatacaggggctaatgtaacaaacaggtaatccccattgctttatctgaggtttaatggttacacaaatcccatgttgaatgtagttgatctatacgctatttatgttgctggtgttgatgttttaaaacacaggtttttttgttaaaaattatcccccatgccctcctttatatactgtaataatttttgtacatggtttatagattctagtttttttctttctttctcattttcctttcttttggcctttttttttatgtgtgtgcattttgatggtacatgtattttactgacatgatttgccatcagctttggagtgattcttggcttgatcggcctctgtatattataatctctcccggaaagaacaaccaaaatctttactttgtatattgtgatatcccagaaagaatcacaacaagaaccttatactgtttggtttgggttttgtcttcttaaacccattatcagtcatttgtaataattagttttcttaataatggtatctaaagaaacatccaagatatgtagcttgttcaatttgaagaaataatagtgtagttttcttgtccccaaatattgagaagtttttataaacttcttgtatctaattgttagatcatactagagagttagagatctattttttgatttagtcatgtattccatgatcggaaattcgaatttggtatttgttaagaacagagcaaaatatgaacaaggagcctacttcaagtggaaagctatggagtatggagtcttatttaggtgaagaggggataaatataagtttcattgttttgctataaccaatgatgaagcatatcacttatttgaattgaaaatctacctaccaagttacataattgtagtttggcagaaaaagaaaaagaaaagttacatgattgtgctaattatttctaatcccacgtgaatctgtctgtgctctgtggtttaagatgattatatatctgtatgtgaccttgctatatagtacgagtttagatatgtagtcttatccaatagtacacctttctcaatcgcttggtaataggattaggaccagtctagctgtgttgaaaaaggcaattctacaccattttctcacttctctcatagcccaacaacatggattaagctacaaaaccccacttggttgattcaagtactaacaaagaagttcccatgtctggtactgaaactgataactcatcaaaattatgttgttagatggtttttacagttgggattagacaatatggtatcattgttggtgtgcttggtttggtgggctgtctgtgatttgtttttaattacataccaatatagttgtggccaaaataaaatcaagacccatttgtaggatctagcagaagaccaaccaaggccccccaaactcaaagatttactcattaggtttgattgtcaggccataagtcgttttggtggttacttggttttctaaagacatgagagtttgcaccccaaaaaatgaaaaaaagtactttgcctaaaacactagattatgctagttgacctttcataatgaaatgtttattatacaagacaaagtctcaagactaatgacccaactagaaaccaaattaatgactatgataactccgtatcaggtaagttaagagacccagaaacccattattaaaaagaggaaaaaggtttagataagttttcccaagtctccattggttttgatgaaactttgtctagtcacacccgtacaataagaaaagttggcttcttacttcgaaagcattatcctaatagagatttcacatcgtccaatacgtttgaagattcattaaatggactattaggccaattagcatttgacatcaacaaagtatcttcttaaagtcatcgtcttaaagaagaagtagataaacttggaggttgtaacctgtgaggaaaaatatcaaagattcacgtgaaaagaaaaatacca

SEQ ID NO: 14510 - DNA, 4316 bp, Cannabis sativa
aagttttcaacttatctagctgattttcatttatgcatccaacatgatctatcaaatggaccaaaaacaaacataagagaccttccaaaagaattttagcatatacctctagttagtaaagacaagaaggcaacttacatttacgctcacactgagagcaggtgagattttcttccttcatgtctgccttgtcttctttatcttggaacttgccttctccacaaatcccacaacagcaagatggacagaaccagtcaccctctggaatatcctattagaagtagaacaatttcaatctgaatcaacacattgaagttgtcaagcatataatccttacaaaagcaaccaaaatgaaaaaaaacaaaagaaaagaaaagaaatttaacaaacacgtgaaaaagaatggatttagaaggctataccatcagccctagacagcccttgtgaaatgatgatggacattgatcacataacatcaactccccaccatagtggcatacagtacaaatgtagtcattctcaccccgcctccaattgctcttatctctatcatgtaattttgtcgtcgagttttgcatctcacaattattaatgacttgcctttgacagtctaagagagacctgccatcttccaaaaaaatattggcagcaggtgtgttctgcttgctgcaagcatggacttcgaaactagcaagagtaaacaacttctggcaacagctgcacttgatcccgctgcgagttatccttccttcagccatagtacgttggtccttactactaagatattttacttttgcccttggcaacaccatattattgtctattaaccaagaaagtacagttcgtggattttggtgtgaagcattaggaataaccacctcttgcacacgtttgcttgaccttaatacacgtttcggcttagtaccatcctcagcatttcttaacttgatcaatgctccagattttttggaggcatttcgatgcttctttggacaactttttaatccacctcttctttgacgtaggctgatctgtctttcaaatgcatgtacatccccaaccaaatcaccatttctcttcccttgagcttttctaatcctttgaaccttaacttctcccctatatataatttttctaaaccctgccacactgtaactctcggcgaataacttttgggaaggaagttttggttgaacaaagttttgttgaaaggcagtatcacttatcaaggaagatggcacgttacttgaagttgaacatccctcattttctccagtgtcagcacttgtgtaatgctcttcatcaatgcaagctttgcaggcagctaaaagagaccgatatgcccttcctttaggtgacctatatatcacaatctttcttcctgaactatagtgcgtttcaagcttccatcccacagaaaagaggtaattctttgaatttgacagctcctctggctttctcttgtgatttttattcaaaacatattcctgaactgattcaaagccattgtcaggtttattgtcttcaatgcaacaagggaattcagcagtctcaggataaaactcagggtttttactctcttctggtagttcaattaaaggatgctctcctttttgttcatcttgggaggtagtatttctggtagattccttcaagtgcttgcagaccatataaagagaatggaaacatctgttatcaggtgatgtataccgtcttctggtcatgttagcatgtgatgtttcgcatttccaacctaaatataaaagatgcttccaaacagatatctttatagaacttttattttgatcttttccagactttttaaaacgtaggtcatagtactcatcaacagctttggggcaaaattctgccccttgaatcatatctgagctaaaaggaaaccaatttacattactcacatgtgcttgacttttactctttccactgcccttaacaccaacgctattagaaccagcactagagattccaccatgattggaaggtgatattggtaaagcctgaggtaacttacaaaatgcttcattgtaatgcgatacgtttgagtcagctaagaatttcatatttgattcatccatgttcaccacagaagttaattgatccatatcaggttccatagaaagagaacttggagcaatgtcatcacataaatgaagagattcgacctcactacagttatcagcatccattacatctgccactatttcactgttcaataaattgtcaatgggcacagaagtatggcatcccttcatttctgcttcaaggtccatattaacatgcctcctatcagcttgagctgactccaacgcacaattcacaatttcttcttgacaaatcacaccattgttatttattgagttatcaacaaataaagcatcattagaacaattcagtgctgcttcatctaccttagcatctgtaaactctgcaccaagttgaggtgactccaacctggccatcacaattgctccttgatcaatcactacaccactatttacagagtttttaacagggagaacatcgtcagaaccaatcggctctgcttggggattcatgataatatctttatccatatctattggtaacatgttctgtgaaggtgctatcaaagaacgaagctctttctcaataacacaagtataatccccaatgacctcccagaacatcttgttccataactcttcatcagtacaagtccactcctttaccttctcaaaaacctttttatcccgcatatcataccatatttgcttcacagaaacaggaagacacgactctttctcaacctcctcaatcaacttaagaagaatccaatcccctcgcaccttccaatccccagtaacctcattccagacctgagtaacccttaatctgccaatatccatctttatttcatcacccaaatcagggaaaaacaccattctctccggtgaatagtagtcgtggtcgaaaataacaccttcccaccaagcgtcattgtagtatgcatccacacagagtccatagtgaagtccccatggttcaaacttaaatgcaggaggcaatggcctgatattcccacgatcgttctcctttaactcactcttgtccaaatcaatgccgttcaaaatcggtgaaacaatcaccgtttgaactagcttcctagacccatcatcagctaaaagatggttatatttgacgtcacggtaatggcgtctatagctgccagatgcaacaacagaaccagaatgccatgacccaagaaacccatcttcaacactcctcacctaaaaaaagaaaagaaaattcagacgatcgcgactagataaacatgtacaatttcccactatcggaacactttttattcctatcaagaaaaagaaagtcatatttttatataaacacattgccttagcaataccttcatcgctacaacacacatactagaaatttatagaagtgacagtgtgatcatattcagagaaacatacaattctaaaatcaaaaagtgtacatttaactccatagatagattataataatcacccctaactctaaactagcacaatgtaaccaattaaacagtatatgaagctttttccttttaccaaaaaaggaaaaaagaacccttttcttttttagtaatcaaaattagagatgggcatgcatgaaagcaaagacattaaaatcaaagacatttttttacgagagcacaaatgtgtgtgtatacatacatacatgtagatattatatattctttattgtcaccatctttttcgtaatgaaaaagcaaatcgataatcactaaacaaaccaacaatgacgttaaatcaaaaaagaagtctttttagcaaattataaatcgtgtacctcaacttgatcatttagaagaagctttatttggcatttttctcttttacgctttttgttggtaacaggatttgaatattgatggtccaacaccgccattgaggcgggaaccagagatgaccactgtgtgcgtgtgtatgattacgatggcgactaatgaatatgatcaaaaaggtaattacttttcttttgttggtgaacgataatcatgagggtgtgcgtacgttaagccttgagaggtaaggaaagaggtgatatcggaaaccccaatcagaaaatattatatagttgaaactgtatgcaaaaataatgatggatttgattgtgttttagattttttttattattattattattacttttcgaaatcttttttactgataaatactttctcctcaagaaatcaaatatataaggaagcgtcagtaaatactactaatagtcta

SEQ ID NO: 14511 - DNA, 5623 bp, Cannabis sativa
ccccctggaaaaagggtctagagttgataaaaacaaattgaatgctcaataaaatgcacattaattaagaaatattttgacaactaaattaccaaaaaaaaggacctaacattctccatcatgctttgtaatatagtagcaaccaatttgcaggaacaagaaatttggtgagaagtaaagttgcaaaagctctgcttgtcacgggattcagaaaaatttaaacaaggacttaatttcccaatagccttacaaggattatctaccaaatctaacatttccttgcttgatatatggtctttattacatctcttaaaaatatgttcatcatgatgcctgccatcacaatatttcatgcgtttcttcaatataattataataattaaattatttcttttataaaattaaaaagaatacgcagtttttattttttttagaaaaaaaaaaaaagaaaacgtagttactaatagtaataattttttttataacagctgttatgaaataaattttacctattaaaactcttttaatatatatctttaatatagtacattgcaataaaatgcaattactgagataatagacaccttttttcatttcattatacatgtatttttttctctaataaaattgaaattacatacagtaatagaaaatcccttaaaaaaaacgcaaaataaggttatgaaattaaatgcaaagatcataaacaaaattagtagcaatattaatatgttatatatggtaattaagatatttaattttaataccatttattgtgtgattttgtttggctcttttatcttataaatatatatataatgagactctcgtctcaaagtaggaaactattaatattgaaagaaagaaagaaagaatgggttttagagagataattgtaattattatgatgctaatttttggtatgtctctttcatccaatactagttgtgagggagttgggtctgaaaataaattagtaagaattaaaagtcatttggtgaaaagcgaaatcggagataaggaaatttcagttgtggcaacatgtgcatcaagtgatgatacaatcggtccagtgacactcatcccttacagcaactctatgaaattcaagtttaaaacaaatgtttttggtgaaacagttttcagatgcactttcaaaatcgatggtacagagcacaagtttgtgatattcaacaaagaaaggggaatatatggtgaaaattgttggatactagcagatggtggtccttgcctatgcgactgcaaaaatgaaaattgttacgagaaatcggacgatgctaaatgcttcaaatatgattcctagaccaccattattatatgtagttatatatgtcaaatatatatatgtacccatctatctcttccaccaaaaaaaaattattaagaattaataaattttaatacgtactctgaaaagggtaaggtggtttcattttcattttgtttgtattcaagttgtgtatttatatattttgttgctaattgattactataaggatggggattcaccattcttataataggttattttttcgtaaaacttcattctacccatttcatttgagcaacgttgtctttcccccttttttctctagctttctataaacatgcacacggaggaacacacaattgaaccacccacacaactcacgaaccacctcgacctcgtgactaccccacccaaacgacccacggaccattgcgaccacacacaccatccaacgccgataatgtcttcgtcaaagataatccttaatttttttcatgaatttttaactgtagtcgttttatttttttatgatttagggttaaagcaattagatttagggttaggtctgtgtttttagtggtttttaatgaagattatgtgatttttgaagtttttagactcgaatttgtgttttgggaagaatccgtaattttcgtctggcccgtaggttcgacataggtctgatggtagtttaatgttgaaggggttaaatgttgaagaaaatagtcttataggtcccgatagtgaacccaatggtcctcataattttaaattttattatgacacgatgggtccgatacagggcccgatatcaacaaaaattccaagagctcgaaaaggctgagctaaaagttgttgatctgagacagaagctgccatctcattctcatacgattgaatcgaactaaaattagcagcaacacaaaaagagatggatcgtggagtataagaaggctgctatggttgatgaactgaatgaggcattccttgaaacagtaacatggttgtgcagagtaaactcgaagccatcatcaaagccaaagctgaagaataaatcatcatccccacaccatcctccaaccaaattcatcgagacaccacgagagttggagaaagaaaaaactgcatcatcttttgtttcaaataaaaaaaaaacactaatgttctcatgtgcatttgtagtgttagcattagctaggtttttttaaaaaaaaattgttttgtgttagttgttagttggttatggatattactttctggtttgttaccactttctgtgattttacatttttattgacacaaaacttgatggattgtttgactattgtggacatatatcttgtagacatcctttagatatgtttttaacaactatttgggcactctaattacagtacatacttatttatatccaattctttgacagaaagacgtacaaatgcaatacaatacaatgttagtaagttgatataacctcaatttgtaagacatccatagaaacaagtttgcccaaactttgctacaacactacaaaataattacacacttgagtagatcaatcattttctggtacgagatctcgtacccgcatgtcatcccattgttttccgaggagaagcattccatactctattttctttaagcctcaaaatcattgtgattatcaccccaagtcatccacattccattgcataccaggactgatgctggtgacaaattttgcaaggctaaggatacataaacttccatccgagaactagagtcgagcaaactgtttcgctcaggcttaggcttcgactcaagttccctgatattcagactaatgtgaacgatgcactacctatgcacaataaactaactatatatcttactttttcgattaaaaaacaaataaacaaaatcactctgttctgccaacaaatgatttcctccctcttgaagcattttcagagtttggggcagtcatcaagttcccgctatcagacatgtagaagtgattatagttgattctagtaaccaaatctgccaaatgaggaaagttacccacgttcagcttgaaagaaaggacctgcatcaacaccgaacgtgagaagcacatatttttttaagaaaaaaaaactaaaaacttgtagaggcaaaacaaggaaaatgaaagaaggtttactcttaggaggaaagcaatgcaatcatcgaactgtttctcaatacgatcaatttccatctcacacttggccttaatcgcagaaactgctccgccactcagtgtctgctgtatggaatagaaatctaatgctaatccaaggatgctgttgattctactcgcaatgagagcccactgagtgcaaaagaaaacgataaaagtctgtaaatcacactcaataaaagatcagttagttagagaaagagagtatctaagctacccaccagcttatctgggactacaaaacactggcgctgaattgacaataagtaggattcatgtacttctatcacttcatccagagaacgagcagctgccatgccctcacagagttcttgccatgcactgtgatatacctgattactacgtcctattagaaatttaacattttatgctcttatcaaacataatcaaaatgcaaaatgtactaggaactatatatgactctgatggcaatgttatgcttctgaaatgcagaatataattactactacacaacttaacttttcaattagctcgagtatgaaacccaatgccaagttctttgtatttgaaaacttataaaagggacaatgcaatcaaacaggcacatcagtagaattttgacaaccagttgagggggaaaatagtaagaggtaagctgaaacttatagaatagaggtttaaaagtttaaaaagaagccagaatacacaagataacatgccttaagagtgaacaaaactacaagcataaatgaggaacaagactcataaaagtccatagattgcaactaaaagtccaagtttcaagttaatttcacaaaagcttactctgtccatcacatattggtgaaaagcatccacaaaatggagaagtttttgctccaccaaccagtgatgcttatattgatttgttggagcacctttacactgcacgtaaagagaaaaaagacaatgaaacagccaaattacatcagacagctgatatttagtgaagaaaaaatcgagattattcctcatattctaatagttacagtcgttgaatatactagtgtcataataaactatagaatcatgctacagggagctagaaataaaccttccacatccacttccgagctttatcgagtagaaattttgctctcttgaccttcaataagaaccccatcacctacattgtatttaaaacattaatgcctggaatataattaaatcctaaaaataggtgccaagactagaagtggaaacaatacctggttatacttctttatagcctcagtattagcaatgagttcaagtggccatgacacctgttgaaatgtaaatatatacacatttaataaacatgaaaggatacagcacaagaaacatcacaacaatcaatagagtataccttgtatgaaaattttagtaaatcaaggccatcgattccaaagatgtgtgcatgacttctatgaggagttgatggacgggaacccgtactagattgctcatttccatttacaccctgatgttttgtcagggacacaattaatgaatctggagcgctaagtagcacactatcagcagagtttcttatggattcctgcagtattaagtacagatattgtcagtaaaaggagcgaacgaaatgggaaaacagagagaacatataagatcagttatatagtgaaaaacaattacaggcactatcacacgatataactcaattaacacagtaaaatacaatagtgaacaccctcatccaaaattattgacctgtgcctaaaatttcattttgatataaaaagttgatattatatgaatttccagacagtaattctctaagatgacacagtaggacatgtatttccttagggtcggtagtttaacatcagcagtccttactctatttcctttcaaaaatggcagtataacataataataacaatctattataacaatgatgaaatttcaaaagtaaaaataatataatatgaataataaattaataatcaaaaaccatgtcaaaacaattatctgaaacatgcttgcacttctataaatcacgccgcttttcttctcttcaaaattatatccataacagcacacgatagttcttaaaaatatgtccctgcacctgtaatattgagttcaactcaaaatcatcatcc

SEQ ID NO: 14512 - DNA, 2776 bp, Cannabis sativa
  modified_base (2682)..(2694): a, c, t, g, unknown or other
atttacgaatctccaacttacaattcttaattctttgagtaaaattacatgtataatcctttccccaatctagcaacacatccccacaaagtttcactttctctaggatagtattacttgaatacaaattccaactatccttaatgatcttaaagcacaggggctccttaagccaataacagaaagcgcaatgatgagcaaccacgatagaattaacatgaactaaatgaagaggacaatgatcagaagtagatacttccaaattcaaaagcttagcaaatggaaaatagtctaaccattgttgattcaccaaccctctattgatacacacctccacccaatccgtaaaacctctgctacgttcccaagtgtatggatacccatacaactccaaatcgtgcaatccgcagttaaacaatgtatcatagaaaacaataatcagccaattaggatatgggttacctccttttttctcattttgagaagcgacactgttaagatcaccaataatgcaccacaaaacccgaatttatcctttgaaaatcgtaattaatcctaagttcttctccttaaaaaattatttggctcaccataaaaacctatgagcctccacggcccccaatcttcaccagtaattaccacattgatataattaaaaccatattccaacacctgaacctcttcctcaactcgccataacaaagccactcccccactcttcccttagagatcaacttagagcgcaccatcaaagctaagagtcacacgcaacttctccactaaatctttgcttcgacaaagtctcacacaaaaacaaatagttgggcctcttttggaccacaagatccttaatgaattaaaaagcccatgggttcccaaacccatggcaattccaggctataacgctcataacgattggtgggcttgaaaacaaaggcccacctttaattcgtttttttgacccattttgtccttcaactacctggcccatattgcgcctagctaagtcaatcacctcattattatcaatcagctcagtacgtcatcttttactctccaataccataacaacgcatccttattcaaactttccttttccattgcaatactttgattacctacaccaggttggtttccttgaaaatcaacctccccattattattcccttattaaagtatgttttagttggaaagaatataagagtaagagtaatatgatgaagcttctgctattctttcttttccttggccttctgctccatctagtgataaattgatttggggtcatgattcttttggcttttattctaccaagagtggttactggtttgctactcgattactggagtgtgacaaaccttcttcttcacatggtttctttggatggtggatgaaactttggcaccttaatattcatcctaaagttaaaatatttgcacgacaaatatcaaacaattagatcccttccaagtttaatttgaataagcatggcatgctaactgatggtctttatcctctgtgtgatgcgtaggaggaaattactcatcatgttttgtggggttgttcttctctttcacagtgccaaaaacattatgagtttaatcttggagaccctttggttacttatactgattttattagtttatttacttttttatggacttattgccaatctctcaagtaaaataagctattgtcattatatggagaatttagtataggagaaataaaaatgtgcgtaataattctttaatgtctcctgagttggtggtcaattgggctcgtgattttttatgcgattatcaaaagtctcttttgaaaccaaaagagattgtttttgtgtgagggcaacagggctccacgtgtcttctttctttcctcttattgtgccttgatgggtctcccctttagtggactttttcaaggtcaacattgatacgactttacatgtgaagagggtttttgtggcataggtatgactattcatgatacccattggtttgtttttgcctcaattatttggcacatgattggacattttcaggctgaagttgttgatgctcttgctcttcgacatgtgggagttcaatgttaattgtttggtctagataatattcaattcgagattgactgtcttaatgtggttaataatattaacaataatattcctttggattcgtcaggcttagttctttgtaacatatattgtaattttgctctctttaatcatgtgagtcttgctaattgttctacgatttgtggccgacaactttactaagtttgttttatctatggtatttagcaaaatttagtgctctgattatctggattgtatttaaaatttaatcatgattgatgtcatgaatttttaatgatatctctatcttcctccttttttagaactgttgctctttagggtggaatttgggggggttttcttctaaaaaaaagtaagaataatttacaatagaaaagtagactccgtttattttctactcaaagaatagtagaaaagaaaaaatttgtgtaataaactaattaaaaattattttctacacataaaattattcaatttatcaaaattttgtagtaaagtatactgtcatatatatattttgaaaagaaagataaaacttttattaatttgccaaatcaagataatgttggaatatgttttaccannnnnnnnnnnnnctaacaagtatgtttttaacatcataaacatgaacttctaaaatgatataaaataaatacataaaaggtatgagaaacctta

SEQ ID NO: 14513 - DNA, 8360 bp, Cannabis sativa
gacaaaattgttagtaccatctctctattctatacaatatttagtcctatcccatcccattaattgcaacaatcacaaaagtatatcttccttgttctaccagaattttcttccattgaattaagagcaaacaagattcacattgaagaaatggtggtacctttggcattacttctgttatctgcagagcttccactttcgaatgagtattcgcaacttgattccggactaagatcttgataatccaatcgttttccaattgcacggttgttgctgcttacactaggctcttccatccttacagatccctgaaagtggtcaacatagcttgattagtttagcaagaaatatttacaaacatctgcataatgcaaaagaattaatataacaaagatctcataaataataagggcaaaagaaactagtgaagttcttgccagcagaaaatattcatagttcaaactcaaactagaagaaaaagcctgaattttactgctaaagaattgtattataagcagagcaacactaaataaaggaaagcagaaatgaagaagcatggcacaaagtaaataaggaaagttgagtttaaaagagattaaaggaaactactataaatgaaaagtaataatgaagctgaaaaagatcttattctttatacaatttaagcctattagttgttattaactcataaattttggcttgtttaaaactaaaatttattgtattttgagcaagtgtagtgtagtatgatttgagttcttcctactgaaccctaagcctactacaacctatgggaaaccaaaaaatcctaacaaattgatgcgcaaaatcgtacacattaattaatagaatcaaactccatttagagcaaatcatgaatctaatcactcgaattaacccttatatgtacatatataaaaggatttgatttgaattgatttcctttatactacaaattgtttttaacgcttacccaagaggactctttaacacttacatacaatcacctcataatcatatgtgcatgtagaaaatagtgaattgaaattatgtgttttattcaatagaacatcctgcattacgaaactaagtaattacaactaattcctaatttcttagctaatatattctaagagtgcatatatacaaggatttgatttccttcaaactgtaaattatttttaacacttacccaagaagacttaggggtaaaatggtcaaccacgtggtttgctcccgcaaggttacaatctaaggttcaagtctctgctacatagtaattgctatagtttcctagtccctaatattataagttttataaaattaaaaaaatccatttccccttctatcctatatagctcattatctcgtactcatcaaattaaaatgaatagtaagtgtcctacaacattactcatcagaaaattttgaatttgattactatgaaggactcagcaaaaaatggtggagcagacttaaaatagaattctatactaaatttactctagtaccttgttctttgatctattttcttttaaacaattatgggacaatatcaataacctgactctaattgcataatacaaaatgtaattgaaagttgaatatcacatttcactacttcaataatggactcaaatggtttgttcttgatgcagtagatgatcatttcagttctatagatctatgctattaattctgagactgagtaaaatctcattatacaatcataataaatggcggaagcataaaggtttaaattcgaggacaaagacgctaagaaaccaaactgcagtagaaagacataacgaaaggaaacaaccctgccactgctggttcatattattcattgggccatcaacagaaggagaattacagttgtatgtgtcatccctttgaaattgcttgcctcctcttgatgtgttgcttggcaaattgaaatctcgagaaccagatgcacaactagcagaactctcctctctgacaccatttgattgatatgattgaactttagatgctagttcctgaagcttctgttccaaaagtacactcaaggaatcagctcctatcacattcaatccaggggaagataatgtgaagcttttcgagtagagatcaggatctttgtcattaatagagttaaatctcttctccatcatgacttgaccagatgaccaggaatcaccaggggatttcttcaggggagagttaaatgtaaatgaaattacatccatgctttgctttctgttatctgcactcatattggtacatgaatccatagtgacattgcattttattgacctttccccttcactgattggcaaattatctgcaagagaatcttctaaattagaatcctgacaaacagaccttttcttctgggagagttttttaactgtggatgatgatgtatctctctgggcagcagttgcagaacccatctttcggggtccagttttggagtttgctgcacccttattcactgtcttatttgttgactcaattgaaccagtagaggacctagttcttctggctgaatgattggaagctgaacctttttcggtcagcttatctttattggatacagagttctgtttctggttgttctgcctgagcgcattgttactgctctgtgcagaatttcttttctgtgcagatcgatgcaagctagattggcacttgtgtaactggtttgacttcacttccttgtgttccttctgtttcatagagttcttattgtcacatgaagttgacccctcccttctctggacattggtctttgcttgttgggcaagtgataatgatcttcccttatctctggagttgttaaaagtccgtttttcagaatccacagaagcccgagttactagcacatattctgaaccatttgtggttttattcctatactgtgctttattaaaccttaaagagccagactccttgcgattttcagaatcagatgctttatttgcagcttccatcttctctttcaaatcccgaattctcaagggaactgaagaagccccaatgctggtcactttgctctttgaagatgccatgggacttgactcaatcatcttcgcagctgcttccataatgtaagtcacattttttgttggaatgaacccgggattttttataggtgacaacagcttatgatgagtaaatggaattgacttagctgatttcggaggtagaacttcagtttgaaacctctcaataggccggttatgctgcctcaacggcctagattctacggggttcctacaaaatgtatcatgcttgggcacatatccaccctccatggaataaaaatcattccataaattagccttgccatgatgagctgatttaactttaagcaagcacacctctgaaagttgagcagaactagaagagggatcagcaacatttgagcttggcaatgaatctaaccccataagtctagcaactacactaggagctttagtcccaccaccatcatcactagttgcccatgaagcagaagtccagtcattactacctttattactcgaactcgcgtcattctcatccacatctacctgaaaatacaacaattattacaaacaaacaacataagaaacatatcaaaacaatcagttcaagaaaataaggagaaaaagagatgctttgcttcccaccttgtaaacatctgatttggggaaattctcctcatcttctttttcttgtgttgacccttgtgcaactaaaaagacaagatattttagaacacaaatgaatcacaatgctcaaccaaaaaaataacagaaactagtccaaacatgggcatagcataaaaatcaatgagaaaagaaatgttaccaggtaactcttccaagttatttgcaaaaagcttcttacgagatttcccattccaatcaaacaagttaagaaaacccccctttgaacgctttttctcaacttccatgctttcctttttataaacctaaaacaactgtgcaattcaaaatcagcccatatccatacttgggttagagtttgtcatatttgaatcctaaatgtgcaatcatgtttaaactctaaaaaaatattatcaatttgaaatgaaccaagaacaaagcaacaacaattagctataactgagtacaaattatacaacaaaaacacatttaatctcacctacattgctcattcaaattttcaaataaacttggacagcacgccctaatttggtatcctaaaaaagcaattagtatcagaaatggaatagaacacaaacctcaagtcatttcagtcaaactctagtaaaaaatccttaaatctgcaaaaacccatgtatcccaaactccaagctcaaatctttttcctcagttgtaaaaacccactttccaaaatcagcaaaagagacgaaaccagcataaaagaacagctttttttttttttttttcaaatgggcaacctttcaaattccaatcaatctagcaaacaaagcccatttccatttccatttccatttccaaagcaaaccaagctcaaaaatttacccctttcttcaactcaaaggcaatgtacaaagagatctgaactcataaaagccaaaacaacaaaatgtacgaagtccaaaaaccacgatcagaactgaaaccaagaatgaaggaaggacacatataataaagaaaaatgaaattaatttaatggtgggagagtggggttcaggtacaggttggtcaaataggagactgagatgagagagagagagagagaaagaatagagtttgaaaatgggagactgagttgaggtgagtcgagtcgagtcgagtcgagtcgagtcgagttgagtaataaattaaaaaggtttgcattaaaatctttcgttggtcttcttcactgaaaaacactattttttaagatactgaccagttttattgcttatactgcaatgccacgtggcatgtttatgtgggtctacctaggccccacttttccatttcagacaattgtctattttatttgtttagtgtcattgctttggacataaaggaaaaataataataataaggccaaaaaaaattaaaaataaaaagtaattttcaataatttcttctttctttttcagcaaaataaataaataataaaataatagataaataatattcttcgttcttttttttcccaatttgctttggaattgaaagaatatgttagagaaggctaaaaatgttgtaaaaaatatattatcttcttcaaattatacaaaaaaaacttttaattttttattattttaatggtttaagtattgtttttttaaaaaaattaattcattcttttaaaaaaaaattacaaaaaattagttattttcgctgaatagcaagatttatacaaaggagattaacctcaatccacatgacactagctttgttagtcaaatcataattggttaaaatgtgtgctatcctattagcatcccaatatactaaagaaatcctattcacattgtcatacattaacatattccgtatatggtcaagtatatcatcaacgtctcgacacacatcttctttttatatgaattaattagacagcttcaagacaatctgactcgatgttaaatcttgataatttcttttgtattcccaactgtagcccatcttgaataacgagcaattcagcatgaaaatggtagaactgtagtagaggtaaagaaaacgcgtcctctactatctagaatcacacttcccaatctcgtatgccctttaccctgtttaactcttgcttcgacgtttactgtacaaaccccagcaataggaggctgtcattttatttccttttctggtcgtgtcctgttatgtttcacaccaacagttttaaaatattcaagataaagagcacaccatccagccacctcagaagcatgaggtactttacctctatgtttagtattgtttcgtatgaactagagattccaaattatcactaatcagaattcatagtcttctagggtacacattttggacaaccacataagaaaggctagcacgtcctctttctcttctcttcgtaccatctgtttaaagtcacatcttctccaaatttccttgactgcattgcagtgtcacaacacatgaaataaattttcacgcattccttttgagcatctaaaatagcttggatctattgtaaccttcctatgaaccagattcgattgagtaggcagccatgaatttactaattttcacacaaaatgtttgactttagctgggattttcagcttctccatcttcttccaccaagtgactacattactatcatcagattggactatcttattctctatgtcccaccctgttgtgggtatgttcaaaatcatttcaacatcgacttagttgaagttaccacgaataaaaaactcatcccatgatcccatctcccatcatgtagcttcaagtcactcacatcaagttggtccaacaaaggaggtttatcatatattttgaaagtccgtgggcgaggcatccaaggatcctccagtattcggatactctctccattcccaatccaccatcgatagacattaacaataatttttttctccaatgcagactcttccaaataaaagaagcatgagaatcgcatttagccttaaaaatatcgttatttgggaagtaactagtctttaataccttagcacagggtgttgtcgggtgtcgaacacatcgccaaatttatttagtcaaaagagcttgattgaacaactcaagattcttaaatctcaatcctcctttctcttttgttttacacgggctgaccagttacaccaatgaatttttctttctttatcaaaggaacctgaccataagcgggttgccatcttatgtagactttttaggtgacacattcccaagcctagtcctaggctgggttaaggcaagttaggtatgtacttaggacctacccaaactcaaggcccaaaaattttatacactacgaatatgtggagaaaaaaatgataattttgtgagatttttgaaaataggccgacaaatacccaaactcacccctacccaagtcaaacacatactttacatataacacatttctaaggccactttgagtcagggttggccctccttcattgcataggaatccatctaaataaaaatatacacaaagaattaatttatttaaagttaagtttttccttggatgtcactcaccactagttgtttggatgggattcaggtgacacactcccatggctaattttgagctaaaacaggttagacccgtgtctattacccactcaaactcagaattccaaaattttatacactacatgaatatgtgaagaggaaaaaatgataaccttgtaaaattttaaaaaatagacccactaatacctaaactcatctttacccaagtcaaactataatttacatataaaacaattcttaggtccactttgagtcagggtcggccctcaggcctacacactccgtcattgcatgggaatccatctaatatctaagtagaatatttccttgcgggaaaaaaatgtagagcattgatgaatatttcttagcggggttgtagctttcttggtaacatttgaaggaagccataatgatagcccctcatcaaggaaaaaaaaagggttcctttatcctattaagactttgtaaggccatctatttctatggttgattggttcttcattaaagaaaaagagttttggtttggcttcctatggattttgaatagttgttaaaatacttccaaaaagagcaagagcttatagttcacatgaaaagacatttattagaattggttctcaagttatttacttttctaattttaagcatataagttgcatgtgctcatgtgctctttcgtcaaattacgtataaaaattctttatgactttatattctttctttcttctcaataattagattaagatcttaatttttatctcaaatctattttgactttaaaactaactcaatgtgacccatgactaataaaatggctatggtggttgttattagtgtaatttagagcattattattggacataaaattatttaattgatatatatagaacttaatacttaattacgctaatattttttcatattaaacttaataaataataaacaattgttaaccactcataatatgtcatcttattgactaatcctaattatccttaattggataaatggagtttgaaataattggaaccaatagaataagcctattatgtgattctttattggttggaacattgatttgaagttttgctttgcaaattggttttaagacaagtacacaacttcaattcatttctgacactaaacagtaaacactccactttccac

SEQ ID NO: 14514 - DNA, 3161 bp, Cannabis sativa
tgtttcctttaacaaaatgtgaaaactttagaaaatagtaaaaatagttagaaaaaaagataagatgccaccaaatatcttttgtgctttcctttatttatatatattgatattgataagtatacttggtgtcatggtactacttttgtgaatgatagttggcttgaaacttatcctatggcttctttgttccacctaggttattatagttctaaccatagagttccgaaagttgttcttagagataattttaggaagaattaggactgctccaagtttacggttgaaaccttttggttcactgatcttggattttttttaatgtggttcataattcttggtctagtagttttaatggtaataactctgatcaacttaggagttttcttagtaaacagaatttatgtgcttataatattaaaatttagaataaaagtaagaataattttaagtctaaaatttctcatttataaaatactttggaaaatatttactctaaggttcctaattctaagggtgatttagatgaagctagaaatatccaatctaatttagatgcttttcgtgtgaggagaaactttattcgcttcaaagatctaaatctaattgcctcaaaattagggataaaaatactaaatatttccataacagagctttggctaggaaaaaacataatcaaattaggactattaatactaataatggtatctttattactaatttaatgaaatttattctcaatttttaattacttttttttttttttttttttaactctaggggttcatcataataccattgatgatattttagatgttattaattaaaaggtttcttcttcccagttagagcttttactaaggaggaaataaaatatggtatgaatgctcatttttatataaaaaaaactagtctattattaataataattcttgtgatgttgtgttagctattttgaataatgagtctgatattgctaaaattaatgaaactcttattgtattgattcttaaaaataatgatggaacaaagattactgattataggtctattagcacgtgttctattatttataaggtggttttcaagattttagctaataggattataagctggtattgaatgatcttttttctcccaatgaaagtattttcttgtctgatagagttattattaataatatgtatattgctaatgaaattattcatgctattgtttatagaaaaattgttaagattggttggggtggtcttaaattagacatggaaaaactttcgatagggttgagttggcttttgttgaagctattttatacctttattttaaatattataactatcctatttgacttgatctttgttctttgtaacatacggttggttgtcgaggcatttaattattttgatgtaaggttctcgagaaattcgtgaacctttagatgcatgtcttaggtacatattcctcggattacatactgattgcaattttgaggtgattaataggagcaaccttaaataaattaagcctctcatctttaacaatgtcaataccaggaatattcttgaatgccttgacaagcttagtacccttaagaatatgttgattgtcttcacatttaatgttataattatcagtttactctgagaagaacatgcacgagcttcatattgcgaggaggctatttatacctcgactcttaaattcaccgagttaatttatttcttttgttgtacacatgtcatgcagccagacccattatttactactcgaaatatgggtataacactgctcaatcctgttatcatatttaaaatattcttagtttatataataaggctattggcgccctcgagcttgagtccttttggggtcttgattgaaggtactttccctttccaagctctccatgctcggtgtttgcctagtgcctgctcaattactaggtgtagtggtggtgttccgagcattcatgatttttccttggacactagttcccacgtgactagcttgtcgacagggtgtctctctcaccaactcagaaatacctctttcggaagtagttccgtgattaaagcaataagcctctctaatttgttgagacaggttagctctctactgtttctactcaacgcattggcttttgatgttcttccaattttccacgaactagtgttgaaaccattcgtgttgcttattgagagagacttgcacctgttgttgcaagtcagccatagtttggctgagctaagctacctgaggatcgacctcctcagggtcttctgtctccacgcgtggatccccaggtgggatcaggtcattgatgtcagtctcgagagctgctagtggtggtctttgaggatgagttgatgagctggttctgagacatgctcttggtgcttggggcacaagagtagtccctggaccagctccatcaactggcgtgctcccagttgattggccagctgctagagtctgtctgtcaacacttatagaacgtgttgcaaccatccttcttagtgactttcttgagctgtgactttcaatgaaagtactaaaatattgactcaaaaatctagacaagacttctaagccacacccgctcactagattggcaagaatatgaaaagttgtaaagtagttaatgagagacacgacaatttatagtaattcatcccctatgttgagatagtaatggggctacgtctacttcaaatgtttattctcatgagatggtgattacaaaaactatttaataatgagaaacttcaaattctaaagagagaagctctgaccttacgtgtagttttctgaatgtgaaaaatgaactaaaggagctctctttttataagtaaaggagacccacaaaaataggagatatattacaaataaagtgtttaccacatgtactattttttttaactttttttttcaaatttacgatttgggtttctaaagtggttgcaactatagttgcaatagagatttctatgtagaatttcataaaaatacaaaaaaaaaacagttataaattgtaaaaataaaaaaatccctacaaaaaatacaaagagattgaaaaaggaaaagaaaggcgttaataaataaataaaaagtaaaaaaaaaaaaaattaagtaagaataatataaagaaatttttacatgaa

SEQ ID NO: 14515 - DNA, 3804 bp, Cannabis sativa
  modified_base (3299)..(3315): a, c, t, g, unknown or other
attttagcaacccgaactttagattgagttagaaaatatataggataaaccgcccaaaccgaccgatgtacagccctagtaaatacggatttgattttttgatacgatacgaaattggtataagtccagaaggcacgagcatgattaggtacagaaaaatatgagtttaaacatgatactacaaattagcatgatacaacacgaaaaatatatttttaagcacgaatcgataaggcatgagaaacacgaaaaatatgatacataagcacgaatagactatccaaaagacacattacacaacaaacctgaaaagtacaaagcagctactttcgaagtaacagaaagaaaagcaacaactaaagtgggagagtcagagctgaaaagaggattcctcacttttttctttcattcaaaaccgtgcatgaaacttctatctcgcacggctcttaagtgataaatttatactttatataataatataaatttattaattatatataagttaaattaataataaaactttaatataagaattttataattctataattaaaactattaaaatatgaaaagcttatattatatattaatttatgtatgtaatgtgacataaaaatttgagtatttataagtaaatatgaaaattccactgatgcaaataattttttatatgattgtttgtaaaatattgttgaaaaattatataaatctaattaaagttataaaatatacacatactttagtaatggtataaagcagtatgacttgtttaaaaaatactagcccatacaagtaaaatacgacacaaattcaaatacaacacaaaaatactaagcctataagtcgtaacagacttaccttttaaaaatattagcagtactcatattttttttttgtgacagaacatgatacgactcatttttttttaaacactaataaatatgggcaggactagcttggcacaacactattctactctactctaccatacactctctctcacccactaattaacctaaccaaaataattttttttacttctacaccttttctaatttaatttacttcaatttatttttagtcaacagacacatcccaccctccctaaacgacaattcccaatgaacaaacaaaaagtagcaaaagaagaataaataacaaaaagaaaagaaaagaaaagaaaagaaaactaaagatgataagtagaagacacattcattcattgccccacctcttcaacctcaactttcccatctctctctcttcagaaagaatattatcatgaacaacaacaacaacaaatacccagcaaataaaattacaatctttacaagatctatctaataatcttttcttgtggagatgggatctgttggtgttggtggcagcaacccaaatccatttgcgccatacgatacatacagagattgctcccaaggcctctgcagtgtctactgccctcagtggtgctacatagtctacccaccgccacctcctttcgactttcccgaccaatatgatatctcagaccacgaccacgactcttcttccactgacttctctcctctcatcatagctgtaatcggcatcttggctagtgccttcatcttgttgagttactacaccatcatctcaaagtactgccgacgctgccgtggcggtggaaacgacgacgtttcggctggaactgacactgcaaacaccagtaatcctcaccagaccactccttcttctgacccttcttgtcagtctccttcatctggactggaagagggtttgatcaagtcaattaaggtttacaagtacaagaaaggggatgggttggttgaaggttctgattgctctgtttgtcttagtgagttcgaagaaaacgagggtcttagattgcttcctaaatgtaatcatgctttccatgttccttgtattgatacttggttgaaatctcattccagttgtcctctttgccgatccaatattgcaccctttgttactggtgtaatgcctcaacttgagttgagtactgtctcttctgttatggagtaccagagcagaagcaacgaggctgttgtgattgttgttcgggattccgattcgggttttgtacaagaggtggaaggagaagaaccaaagaccccaactggggactttaatcaggatcaagcaacacatcgtggatttggagatgaagggattcagattcaaccactcaggagatcagtgtccttaaattgtcataatttttgtaatgataatcgtctttcagttgctgatatattgcgagctagtgatgatgatgatgatgatgatgatgatgacttgattattcagattgagaaagatcttgaattgttgtcaaggggaattggtacctcatcaaattactcaaaaggagaacaacatttcaaacccattgagagaagtggagttctcaacatggtaaggagtcctcttgctatgagaagatctatttcaacagggagatttatgtttacaaggtatggcaatggaaaagattctatcattcccaattgaaacttttttttagaagttcttctccaaatgtaaaaaaaaaaaaaaggcaagatttttttctcccctcttcagtttattgtctgtaacatattagaaataccaaaagggaaatcctctttctcctttcatatagagttcagactaattggctatgtattcttcttcttgctcatattaaattatttcacagtatagagtaaaggagatgtcgttatggatgatgcttcaatgatattcattgtgttctgttgaggaatcttctttacattttagtccagccaattcagacaagttaggccagcttctactcctagtaaagatattataatacaataataaaaataataaatgaagtattcttaaagctaagcttcaaatgtattaatgtatcttttaaaatttgattaacccagcttagttaaaaagggctttcttgacttgaaagcttttagttttagttaatagtagtttatacaatcaaccttgattcaagtttaagttattgtaactttatactttgagctatatatatatatataaatatcatatcatacgtgagatctcagctcagcttttgtcaggtgggtcattcagattttggttcctgatatccatatttggtgctgaattatcaattacttaaagaaaaagactaactaatacaacaatcaaagaataaacaatacacaattaattgtatactaaccaatgaataattaaaactgaagccaaaattacaattaagggtctctctctctctctctctnnnnnnnnnnnnnnnnntctctctctctctcaagtctcaaccaccaccgaatatgacagcccaactccttgtgttgttttcaacccattttctgcattttaattcagtactttagttcaaacccacttttcatttcctgaatataaaataacaagatcatcatttcatcaccacaaaacaaagcttttgttgagtattaaataatattttctactttttgctttgaaaaagttgtgtgtacattacaaggatgctggaatatgatgtcattttatctatatactgatatctcattcttttttctgcttttaatttaaccacacacacatacacattcactcactcactcataatttatagtatagagtatatagtgtaaatctcaaaaaggttagttaatttactacgtacaagaatccaatgcatataataatttttttattatctattcttaagctaataaggatcaatcatttcatatattaggttggttttttttttttttt

SEQ ID NO: 14516 - DNA, 5991 bp, Cannabis sativa
ctaatagaggacaggactgcttaatctgaactggttttggaattatcatactgctttcttgatcatgatgtttaacaactcataaatatttgtcttattgaacttctgttgcagcatcaagaatatgcttatatttttcttctaatttatccagtcaattatattttgcgtgttctctatctcttacatgtctagaaccttggtgttgaacccgatatggcatcatataacatccttttgaaggcatgctgtcttgctggaagagttgattgggctcaggacatctacaaggaagttcaacatttagaatcaactggattgttgaagttggatgttttcacatacagcactattgtaaaggtatatatatttatataaatttatataaacacatgtttgcaagtgatatctgctggtgtaatgaaatcacaagcttctatgtttgtcataattagttaacaaagcaccaacatcccaggttcttgcagatgcaaaactatggcaaatggctttaaaagtgaaagatgacatgctatcagctggtgtaactcctaatactgttacatggtcatcgttgatcagcgcctgtgcaaatgccggtcttgtggagaaggcaatccaattatttgaagagatgcttctggacggctgcgaacccaattcacagtgctgcaatatccttctacatgcgtgtgttgaggcttcacagtatgacagagcatttcgcctttttgaatcttggaagagaaatagagtccaggacatgcctgaagatgacaaagaaaatagagctagcaatgcaagttcaggaattactactgccaggtctcgatcatctcaattatacggtttaaactttgctaaagagctttcatttatgcccacagtcgcaacatacaatattttgatgaaggcttgtggatctgattactaccatgcgaaagcattgatggatgagatgaacacaatgggtctctctcctaatcaaataacttggtctatattgattgatatatgtggaagctcaggcaatatagagggtgctttgaaggtattataaagattaaattttgtgcatctcaactcaaatatcctcttctgcatgttctttattactcttttctaattcctatatgttgggactggtagtttgaaaatagagataaaaaaaaatgaaaaatggaaaaaaaaaaaaaaagaaaaagaaaaatcttcacatctaagagttcacatatgccttactatttatcatggttgagtttctttgccataaagttcgttatgatgattttacttatattttcaatgcagattttgagaaccatgcgtgaagctggaattgaacccgatgtagttgcatatacaatagttataaaggtttttaagccatctattataatagttgcagtgaatactagaggttaaatttccccttttactgatgcactatatgcctttttggtgaaggtttgcgtggaaaataaatatatgaaacaagcattttcgttgttcgctgaaatgaaaagatatcagatacagccaaatctggtgggaaccattttaaatgttttttttttcctttctcaacactataatattcccgtatgaaggtgacaaatcaataagcagaaattctgaatttaaacatcagtctgtttgtcttttaggtgacctataatacacttcttagggctcgtagcagatatggttcttcacttgaagttaagcagtgcctggtggtatatcaagatatgcggagagcagggtatgttgtcacgttgtgaatttctgcataaagattttctttgtttcaccaattatcttcaattttaagtttaaatagttcaaatgattgggcatgtgatttgctcccacaaaatctgaggttcaagtggacttcctgtctaacacttgtatgggaacagagaattatagcaattattgctatgtgggtacttaagagggactcgaaccgcaaatattgtgggagcaaccacaagacccttttggcttcctagccctccaatattgtaggattaggcatagttgaaacttgaaaattatcttgaagtttaagctttctatcacaggtataggtccaatgatttttatctcaaacaactaatcgaggagtggtgtgaaggtgttatacaatgcgacaatcagaaccaggaagagtttagttcctccatgacagacacagagagacctcaaagtttactgcttgaaaaagttgctgaacatttgcaaaagaatattgctgaaagcctaacaattgatcttcaagggcttacaaaagtatgtgtggttttggtcagtgagctttgaagtcatagcattaaaaaaaaatgttaaaaggtgtctatgattgacctcctccgaaatttattatttgtgtcttcacttgtggcatacaaaaaccaaccgcagttacaacaccatcacaagtacataatataattttgaaatcatagttggcacatatcatgaaatgttgctgttgattattaatgtcaaggcttatgagatatttgttgtattgcaggttgaagctcggattgttgttcttgcagttctccaagtggtcaaagagaaatactccaggggtatgaaactatgaatgtaataattgaacatgatgttgctactaccttgtattttcataaagctgacgtaaaaaatatgtttggttacaggacacataataagcgatgacatgcttatcaccttaggaatcggtaaggtcgatacgattccagatgaactagaactgggggtgaaagatgcaataactaaacttctacaagacgaattggggcttgaggttctttcaaaaggtcttgaaatcgcatctaatacacaaatgtatttagagagtaccaaccactcaacctcaaattcggagtacttgggaagtaatgaattacccactgagagaagacctgtggtgatgcagagattaatggtcacaagaaaatcactgagacaatggctatataaaagaagctccctaagaagatgatgtattttacttttaatgtatgaatatttgtactcactattaattactacatcaatttataatgtatcatatggtagtccatttgaactatctaatgtaaatgaaagaataaaatagcaataaaattgacactcgattcaatgttaatcttacactgactcagtcttttaataaacaaacaaacaataagcaatagaaaaaaactctaggattttggtaggttattcgttaattaaaacaaagacacatgaaaagttttacattgtcattgtttaagacaacatgaaagtacccaacatggaggtggctcaaatggtcaggcacatacatagattgctcccacagagtctaagattgagttctggtacttacatagcaattgatataattttgtgggatccatcaatccaacaccaccacacaagtgaaagctttattcatagccaatcttgctgctgtaacttcaatggcaggtaaacctcagacaagtactggaaaccaaacgtgctgagagcctgaatttcagccttctgcttagtcttcaccatcaaagtcagctcctcaacccagccgggattcttcttcacaaaatcctcctccaacaaatccttcccagtcttaatatcctgctcagtcatcggcagcctacattgctccggtatcttatacttgtccaaatcgctaggcctaatccccaaccacttaatatcaggtgtggtcaaattcgcactgtcataagacatgttcttggagccacacccataaactgacaatatcttcaaaccatatggatcactatccacaagagcaagcacaggtagcttcaactccatcttcatcttcctcaagaagagccttgtcgccacatcaggttgccctttcgcagtcacaatgatacatggaaaccgattataaaacctatcctcagccaatctaatgtaagcagcatccttctcaaccaagagaatgaacaatgcatcactctgcatatccccaactctgtctatattcggcggaatcgctttcccgcccatacccattttagtacagtcgatcatatctccattgtcactgaaaatgagccgacccaccaccacacctttctccgcagcgatcacgttgagactagaccgagtacagcccaacatacaactcacatcgtcgagaaccgagtcggactgagtctggtccgtaaacagctttacatcggtgtagaacaaatctctctttgtgacatggatgctcttgaggcagagctggtgaatgagctgaagaatccgagcagtaatggtggctttccgtacggtggagatgctggcgtagggacgaagcgaggttttgtctcttaaaacgattcgatcgagctccgggacatagagctggttcgcggcggaccgagaggggacgtcgaaggcgaagccgttgccggagaggatggagtgggcgatctttagggttagggattcgatggtggactggacggaggatagagagaggtcggcgacttcgcggcaggactcggagagagctaggtcggcgagggttagggctttggatgaggaggatgaggcttctgtggctgcgcggactgaatcggtgagtttctgaaggatttggaggatgactgggtcgggtttgatttggttcttgaagggttggtggctttcatcgtcagaactcgggtcaggccgtcggcgcttcttcttgtccgccatttcagtatcagtagagagactgtgtgtgagtaggcgggaagaaaatgaagcaagaaaattggagccaaggaaaggtctttattttatggtaactaatgattaggaaaacaccatcttttctcagagaatcaaaaaataccatctgtttgctgtaatttagtgaaataccaaaacattttaattctatgtttaaaaagattctaatgaaattaatattatattttttttagtttagcgtaatcacctatttactaataataaccctaaattacatgaaatatgaaaaaaatttagaaaaattatagtaaatctaatcataagattatgttagtaaatattctcgttttaaaatttgtaataaaatgatcattttaaattatttattatttatattattttttatcacataaaaaaattaataattttttatatatatttttttagggttggttggaagcaaattacttaaagattattattagaccttagagagttagttgtttagtcggttaatctgttaggaattctgttataagtttgttgtattggttgctctcttgagctgagactactgtaatagattgcctatataaggcctcaaatgtaataaacattcattcagttcaatatacatttttcctctctaaaacagagcaaattactctgtatctggtcttgtttttctcataattatagtatgtttatattagttttgataaaaaaaattatttgaaaattatgttaattttcttaatttttatgagttgttatgggttgttggtatataaattttgttgtacagtatatttttgttttgctgtatagtgtaattaggaaataacccgcgttttgctgcggttgtttataagagaaaaatatgtttttgatattactaaaattgaaattgtatagctagaattataatttaaaattagtatattttaaaatatatgataaaaaaattatttaataataattgaacaataaaattatctaatataatatgatacttacatcatacaatgcataaatgttatgtataattctacatatatacatagttcgctaaaattattcattaaataataataaaaaatttatatgtatagtacacttttgcatatattatctcgtaatacattatttttagaaatatttacaccaacaactattattattaaattatttaagaatttacccttatctattttaatactcacaatttaggcatttctttttgataggtataccaat

SEQ ID NO: 14517 - DNA, 3597 bp, Cannabis sativa
agagagagagagagagagtaaggagaggggcgagtgagaagggttaggttaaattcgttttatattattaaggttaggttttttttaaaatgagccgaagcccataattgattctctttttttttttcaattgtttgttgtgtcggtgcacaaccgacattaaaagtgtggatatatattttttaaaatttcatcttttgctttggttttcattttagcatcagatatacaactgacgctaattaattaataattatttgcgtcggtggccaactgaagtaaaaaattatgggtttacttttgcctcagttaacaagtttgaccaaacgcgttgaccgacaaaaaaaattcatttttgtagtagtgatttgtatttaatattctttatcaaaacttggcaataaaaagctataataactattggtaattacactactgaacactaagtaactactttaaatagagcttctgtaggcctcacacacttgttggccgattgtttcaggctagatattatgtgggaaaggactttttgaatgcagaattgggaactaatcccaggtttgttcggcgtagtatctttgaaacaaagctggtaaggatgggggcacgtaggcggttctaaaattaatatagtttcagatccttggctcccttgtggtgagaatctgagaattagttcgaatcatcatgccttgttaaatcaaaatgttgttgctcttatgatcactgattgtttggcctggttgttgacttggtgcgtgatttgtttaatacaatggacactcaactcatcttaagtattcccttaaattcaagtcgtattgatgatgtttggttctggtcttttgagagctcagggaatttttcagtgaaaagtatgtatcggcattcgcaacaaagaaaggaagatgatttgcagctggtgggatctgatttctggggtaaattatggcgtcttaaagttcttccaaaggtgaaagatttattgtggagagctgcctcgaattgtctaccaactaaggtacagctgcggcatagacatgtcaacattgactccattttccctgtgtgttccttagatagtgagataatattacatcatctggtggagtgttcttttgctcgggcttgttgggtcaatacgagactcggagttacaatagattatgctagaactttcacaggttggcttgctcttgttttaaagcttttgaggggaaacaaagaaagatcatagccatgacttattgggctatatgggaggtaagaaatgattgtgtttgaaaagagaaaagtccaaatgtggctgttgtcactcttttggctacaagaatgttggaacaatggagcaaggcgcaagataaatcatctcaagttttcactgttgcatttttgacagcagctgatggtgctgaattgtggaaaacaccagcagcaggggaagttaaaatcaacatagatgtagctcttttttattttatgctaacaggtatagctttgcttgtattgctagggatgcatcgggccatgctttggaagccatttcctgctgcaaacaaggcaccgtgactccagaattagcagaggctatgggcgtgagagaggctttaagttggctaaagaggaagggttggcatcgggttaccattgaaacagattgtcttattgtggttcaagctcttcgtagtccacttcctatgttttcctattttggaagtgtaatttcagattgtaagacgttattgaaagatgtcaatgatgtgtttattttatttgttaaacgatctgacaatggtgttgctcatacaattgctcgagcttcatcttgagtagctaatcgtgtcattaagagtaatgaatttactcatgatatttgtgatgtaatcatgaaaaaagtttactaataaagcttcctttaatttcaaaaaaacagttcaactgtttaagtaatcttaaatgttgtacgttataagtccaattttttcgggattatattagattttccccctctctctttctttcgtgtacaaatcaagaaggtaaaatgaaataaataaacaatggatcgaaggggctttggttcatatcccaaattgtcgtatattagtgagagatgatctcatatccacgtgtgcatagaaacatataaatttatatacataatgtacaataacatcagccatattgacttgaaaataagctgaaattaagcaaaatttgaacacttagttgtacaagaacaaattgaggagatagagcatgaatcaaattcatgctttatttaccaaaaaaaaaaaatcatgctttatttctcagttatgactaatgaggttttagaagaaaaagagaaaggtttcaaattgaccccactttgattgtgctgcaaaaaagattgattttagggttgatattgaataaacctctccaatggttgaatgacatatcaataaaatatatacagtggaaatctaatggatcaccactaggcactagcctcctttacagtccccatgggccatgacatcttcaaaatctaaaccataactccactttctaatgacctcattagctttatcacattattcttctctgtaaataataaaatataaacataaacaattaactaaataatataataataagagatgggggcttttgtagaaaaatggggatcccttttttatttttttaatctttcccttaatggttgatgaccctaatcaccattttaatcaataaaataagtaaagcaatttgcttgttataaataaagtactatggtatatacctctcaaccaacattttattccatataatagtgcaaaagagtgatcgccaataatgtttcctcatattgcctcattcttttctaacatttttattataaaataaaatcttttctgaaccaggcaatcatattgtgaaacgtcttccctagtttcttaaagtgttgctattgattacgtttcttctacttcattatgtaaaaataatattaaggcacattgcaacttgtacattaactaacattttatatattagatataattttaagtgatgtaattaagcttttcaaaatttttaccatatgaccattccattaccttttaaattgtagttgactctttcttatattgaagattcaagagtaagaagttagtactgttacaacaacatatacattattatatgtgaaaaaaattaaaaaaaaaaacttatttataaaaaattgtatattttttaactataagaaatatatttgtgtttttatatacaaatatattaatttaatttaacagtcttattattaattgattaatcttatgatgatggtatcacgattttattatattatatatgcatcaatggtaattatcattgttaagtattaatttttgactaatatattgtaacaacctttcatgatattattgtgacaataataataaatatttattttttattttcttattttaaaaaaacttaaatataatttttttaatactagataaatgttatgtggcaagtcacgtatgttaattttattttagtttttagttttttgtaatatcataattttaaaattaataatat

SEQ ID NO: 14518 - DNA, 3578 bp, Cannabis sativa
gaatgttggagctccaaactcatttatagagcaataatagaacctcctttggtgtagttatgtcactaaactaaaaccccaagtgtgggtcttcaattctactgttaaggtctccttcaaggttacagtctccacaactcaccaaatgagtgctgggtacttgtctgggggcttaaattggtcggatagagttcacacacgaattcccttgcctttgaggattgagatgtttcaaccttatgttgaccaatactgaatctaatccatgaagtagatattgcatagagagaggatgcagttcttttatttttacccttttccatatctaattttctgctttgctatgtcacacatggctattttgcccatgctttagttgctcttcattcattctctctccccagttataaatctctcgcaaactaaaatatctccacctaattgagttgaataagatcatcatctgctaatcaatcacaaaaatgttccagcaaaaaccataaactctaaaaagatacatcaaagaagcgtgagtttctacgttccataatatttgttaagactttatatctggttcaatcctccaattgcaaatgtggccaaaacataacaataatatgaatcagataaaagaaacagacaaaatattatatgataggataaaaatcataggataggtgatgctgcagagcatagtttgtgcagatattaatcatatacacacaaaattaagcaaaacagcaaacaagttcgatacaagatagaaatataaatcccaatagacattgtttttagacaccatagtcaaacacatcagtactcctcgccatcatcaccatcgtcaccctcagcagactcagcacccacttcttcataatccttctcaagagcagcaaggtcctcacgagcctcggagaactcaccttcctccatgccctcacccacgtaccagtgaacaaaagctcgcttagcatacatgagatcaaacttgtggtcaatcctggagaacacttcagccacactggtcgagttagagatcatacaaacagctctctggaccttggccaagtcacctcccggaaccacagtggggggctggtaattgataccgcacttgaatccagttgggcaccaatcgacgaactgaattgtcctcttggtcttgatagtggccactgcggcgttaacatctttgggaacgacgtcacccctgtacatcaaacaacaggccatgtatttcccatggcgagggtcacatttggccatcatggaagatggctcgaaagcgctgttggtgatctcagccacggatagttgctcgtggtaggctttctcagccgagatcacaggggcaaacgacgagagcatgaaatggatccttgggtatggaaccaggttggtctggaactctgtgacatcgacattgagtgctccatcgaaacgtagagaggcagtgagagatgagataacctgtgagacgaggcggttgaggttggtgtaagtgggtcgttcgatgtctagggatcgacggcagatatcgtagatggcttcgttatcgagaagcacggccacatcggtgtgttcaagaagggagtgagtcgagagaacactgttgtaaggctccaccacagatgtggagacctgtggagacgggtaaacggtgaaacccaacttcgatttctttccgtaatcaacggagagacgctccaacagaagggatccaagcccagatccggtacctccaccgacggcattaaagaccaaaaagccttggagaccagtacagttatcagcgagctttcggattcggtccaaacagagatcaacaatctctttcccaactgaacaaaaaacaacaacgcaagaggaaaattcataagtaaattgcatacacgagtcgaatcaagaaattaaaatcggagaaagaaaactgatgaattactggtataatggccacgggcgaagttgttggcagcatcttctttgccgctaatgagttgctctggatggaaaagctggcggtatgttccggtcctcacctcgtcaataactgttggctccagatcaacaaacacggcacgtggaacgtgctttccggcgccagtttcactgaagaatgtgttgaaggcatcatctcctcctccgacggttttgtcaccgggcatttgtccatcgggctaaaatgaaattgaaacaaaaacctccattaacaaccatacaaatcgagaatcagggttcacaatcacaaatgaatcaaaaatttgatgatcattttttttacctgaattccatgctcgaggcagtacagctcccagcaagagtttccgacctgaataccggcctgaccgatgtggatcgaaatgcactctctcattttcacagattgaggaaaagaacaaatctgagaataagaagaaaaaggagaaagaaaatgaaaccctagatcggcgtttatcaagacgcctttggtagtggtgaagtttatcttcgcattgtgagaatatatataccagcccaattcaaatcagggaaggccgttttagaccatggttagttttttgaaatttaactgtggttagttgaccagggttagagttgccagctaaggaggtgggaccaaaactagttggattggtgggttggggcatgccaatctggccatcctaaactaaaattaggtaacggaaccttttaacggtgttagcagaagactaattatcatagtggtagggacagaatagtcttttcatcatacaagagacaatgagtaggacttacggcaccgttacggttgagcaatctcttaaaattttgcttcagtctcacgtgttcatgctcctttttaggctgcaatcattttgattgtttcttataaataatgtaattggatctacctatcgaatagaacatgatatattttagggtgcttttttggatatattaatacattttcgtttaggtatatatatgttttcaactttaatattttgagattttaaaaaaaaaaaaaaattatactttgtttacaatttaagatttacaatttttatttacaagaatataaatttttaaaaaatatgtatataaaagagtaactaaaaaataataaaaaatcaacctcgctcacaataattataaaataacaaaaaattgaatagttcattgaaatccataattttgtaaataattaaaagacttcaaaccataaaagtaaaaatttatctttattaatgttttgtaatatttttaaaatttttagtttgttatgtaaaaaaatttatatattagtgtatattataattattttatggtaaggtgtatattataattatttaaaaactataaaaatttaaaaaaaaaaaaatcaaaataatctagattttaatctctttattttacacacgtatctgacaaagtgtttgaacttcttttctgatacaataaaatttaaatttcttaaaaatttatagaatattttaaatatttacatgtatataatttagaataaaaaataaaattaaataataattaagaatacatacctcattgttctatatagcaataatttggatttggta

SEQ ID NO: 14519 - DNA, 7000 bp, Cannabis sativa
ccagataaagtagccgaactttctcgtgtgtattgaggctgcaaaatggaaccaccctcaactcgaacaccctcctcagttttagaggctaacatctttttcctcttcattttctcctgatcctgaacaaagatattattacaaaagatacaagaaactagaattaatcagttgtactagaaaacaaactaatttctttccctactaaggttcctgttaacaaaaacaaacactcctttcaagcaagaatttagctgtcacggaaaatttattacctgcaacagttttttcctttttctctttttcttttaagttgtagaagtcttaaattaccatgcaaaccatttaacagaaaagacttcaaatgggtaggaactaggaacttggaaataaatttaagaccttatattgtcaagaaatgcagacgaatacataacatataaatacaatgggattcattgtattaaaaataggacttctaaatgtgtcaagatcagaaagggcaaaagaaaaaaaaaatgcttctagcaagaattaactccgcaaaaaaggacacggcatgctacacactcaatgtgtacaggataggaacatacctttttcctgccatatagttctcttcgcctctcttttgcccggcatattgcacgcttgatcccatggttgtccatgaaaccattaggccataattctgcaagctgtatttacatgagattggacatgttatgaaagctccatgatgttgaaagaagtttgactaaccacagaagtttgatacaaagctcttcacacagataacctttacaaaaaatggaaagaaaagttttatagcaccacattcatgaaaattaactagagtgtgtgacgtagcttttcctgggtaaaattgagagcttccaaaatctactttaaataaatagaggggacgagatgtataaaaggggaagaagaataaagaagcataggatcctaaaatttgtatttgggaattcaaaagcaaaccattcagaaacaaaagaatagattaggctgctttaatgatcaaacagcttaggaagtgctcaaaagccctaagtaaaacaaattaaaagaaaaaaaaacatcgaggaaatacctctgcgtacagccttcttacttgaggacctgcgtcatcatccagaccctgaaaccatcaaaccaataaagatcaaagaataacatataacaacaagaagttccaaaagagagaatatcagagcaagcattgcaagcacataacagtacatcaacataaaggtcatagagatcacagatcttgtcctccaatgcagcatccatactatactttcttttagaaacttctttttgttcagtaaatttcttgaaaatcgtctgatgctccagcttgtttctccaaggcctgaaatacatattatgtatacaaagtcaactttctagagttagcttttgataagaattgtgaaaggtttctcatatctagaagaagtaaaaactagaaaagagaacaaaaataaatgatgtagcacttttaacaagtagaaatcatacctttgactccatagagggtgctcgcactttaagcatctctatgacttccttctttacacgttgaaacctatcatttgtctcctgtttagctgacaaacccatgctaatcatgactttcaaatttctctgcagcaaaattacattaccgaaagataagtgacataataattgcagccctaagaaaatactagtcaattgaaagtaagcagcccattatactcataaggcagttaagtacatcttaatgatactttcataccttcaatgttctcagttgaattaagtgaccaagaatactcataaggcggttgagtagttctttcgaaacttttccatggctagcctgctgcatgaaaatgcaaattcctttagaaattttaaaaagtgtaggaccactatgagagtctcatttaggaatgttaaaatttattgaagtatagaagaactcaattgtgcaatttcagtcaagttttctgaagtaccgctaatctcgcaactttggcaagcttcatttttatttctctaggcaatctccttttaatagcctgtgacgaattatctgcctcttgattttccacattaggcggccttgctgtaatattgtacataaatactagtccagaagaaatatcatcctaaaataactagcccaatataccatcaaaataaaaataaatgttgggagaacattaacacttacattctgcaaccattttctctaactcccttatagccttttcaagtattgaacctttcggccttgcattagaaccatcctttttgtgcatgtgcggtgttttctgcatcaataaattcaaaattaaaagattcatcaagcatcatagataaaacatatgagatgagacaattgtcatagatttctgtataaccatgaaatacagagatcataacaagaaccttcaaattttccacaataattaacttatctgctcatcctcaaatacactcagacacattccaaatagtaatacatagagaattatggggataaaggaagctatcttccctctctgtggcactcaactcactctcagataacaccaagaaataatgctttatttatcccgataaactaaactgctttcggaaacgtacatcttaccaagaagccataagaaaataggaacaagccagaagactaaggttgaagcaaatatatggctgtgtggctggttacaagcaattcaagcccacgtttaacagtttttaattccatggtacaggcagcttctcacatattatgtgactgatttgacttgagatgcttattacaatgcttaccatttgttataaatggaagggaaggaaaattagttgttcaacaacaatgacagaagactaacaaactatgtctattacatcttcacaagcgctaaatgttcagagttgcaatatcttgcaacctatagaatgtaatcttttgatgaaacacaggttgttaataacctaattgatgttcagagttgcagtatcttgcaacctatttgatgactccatctgatgtacagaatcaatggtttgaactacacattactttaacaatggaaattaacaaagagattgagaacaagaaatactaacagttgttggtgcagagtactttccctcaaaggtgttaacatcagaaagttcacggttgccatttttttccctcacacgaattgatgaatccaattcatcagcaccactagatggtctcccagattgggatttggattgtacatagacatttttatcatgatgtttagaatgtgaagaatcagaggatacagccatttctttgaacttgctacttggatctttagataagagggatcctgtcttctgcttttcaatatcctttacctcagctaatatcatagtagcatctccatttgaaactttcagaacagaaggatctattattgtttttgaatctgaagatttcttcttagggcaaactactgtagaattcaactgactctgaaattgtatatcttcaccggatacagctactgcttgagtagtggtagacaaagtctttgcaagtgctgatgtattcttaccactagccattttgcctggttttgcatgtttattttgcaaacaaccatcatcattttcaccattaccctttgccaaatcctttcttcgccttttctttggttgctggctaggtagtgcagtggattcactttttcatagaaaagagaacaaaataagaaagaaaaaaagtccaaatgaaaatatcgaaagcattgactagttattataccaaggaatcaatttctctccatcatttagaaaaaaaaaatatctatacatccatacaacagaaattactgaaattacttaaaaaattataaaatataaacatattatagtgacctaaaaattgttagcttgttttgtgcatgatatttagatagtgtctacataaaattctagtgcttgtgtcatcgtgtggctaaatttatatcattctactcttacaaaaataaaacaatggtagatattcattattcaagcaattaatattgatttaaaatttctaaaacaattccttcatacagaaacaggaatattcaatgtttgttaaggttttttttttaactgcaatgtttgttaaggtttagaagataagatagccacaaagaaactaaaaaaccacttaaataaagaagaagaaagacacaacacagtagaaaatttaaacaaactcacatgcgttctaattgtcctctgttaacaaaaaaaccgccatgctttatggctgaattatcaacttcaaagtattcatcctgcaaaaacaaaataaaatgagagatcgttgttgttaaaataatatatgctacaacattaagttgctagtgcagcaagaaaaaaaaatcaatatagatgtgataaaatagatgtgtagactaaccaactcagcatcatcgatgaaagagtcttctgtatcatactgatcatcatcagggatgtcattgtgatcttcctcgtcactactgtctttcccctgacataaattatattacgcattagcataacatacacaatattttgatgtgagaaatagtgatataagaaaacgttgctagcaagacaagtttttcaatgaaattacataccatataaagtcgttcaatcttctcaataacagcactaaaacgactgggagcagtctcatctttaacttcttcaccatccggttgcgcctaaagtgaagcaaaatttaaaaattaatgaataataatcattttgtgcttgatttttcaaatctctatgaatcagctcagtaaacaagcttatagttatatgatggaatagaacttttttaaggtgatgaatattgcagtaatattatgcataacacatgcaattaacattttcagctacaacctataaacatgtcattagtaagaaaacaaactacagattgactagcatgcacagaaagggaaatagcatattatgtcataaacctaaactcataattaattaagaactcaaagaaaattccaaatggctcattttcccccaaaataattatagatttaaagagtgaccacaaaaaacataatgtaaatagcatatggtgtaaatcagcataagttgaacagctttgccctcttcaaaaatgtgcacaataaattttctagctagttatttcaaacatagtcaaactacataagtaacaaaaaaccaaggaaacaaatctagtttgtagcaattgaattgaactgttcagtttaatggcatgtcaaacttaaagtgtgagacgtgaagaaagataaacatcatcagccttcgtcatctgactaaatttggtccttcaaataaacgaaactaatggttagtcacaccaatgattttctcacaacatttttcacgtaacggtagagaactataatgaaaaactacaataacatataccaacccaacacatgaaattcaaaacatattaacaaaaacaaaataaaagcgaattcagttcttgacaacaacccaaaaatcaattaaaacgacgcaaatatagaatcataatgtctcaccgccacaggagcgatacgagactcgagacggggatgagcattgacaggaagctcgagaacggtagtagaagaagacccattgaccttattagcgtccttcatgagcttcttccacgagactatagtagtctcaccaggacgaagctccatcgtgaacatttgacggtcaccggacttgaaaaaagacgacgaaaccctgcatattgattcaccgccgcgcttctcttcctccatttgaaatgaaagtttcagggctacagagaattctagggtatttggggatcgaagattcgagaattaagatgcgagcaacataaaattcgtataaaccccagccctagaaaaacgaagacataatgatagtaaaaagggattgggcgggagtagagtagaagggaggaagtaggtgttgaactgggtaatggatatagacaaattttctcgctctttctcgctctttctcttccgagaaagttaagagttagaggaggaaaaagagggtccgggatatgagtatgacgggtagacttgtccggatcggatcctaacccgtacagttccctactttaaaagccaaacggttgccgccctcatatctattaattaaggcttctcaattagccggtgattgacgggtattctactctactaccattacgagtaataaatacaaattctcacataatacaccaaaaaattataaaaatacattgaaacttttatttttacctgttgatctcccttctagtcaacgatatagagttaattaaagcgacaagaataataataaaataatagtaaaaacgataaaataaaacgacacacgatatttctcttttagttgtattacttaaagaaaactactaagatcacaaggtctgcccaaataaatttcttaatagcctcgagagtgtacaattatttttacagggtaatcgctaattaagagcttaaaaagcagttcctttcatagtgaatggtttcactatttataggggagagataatacatttaagtccttgaaaaatagaagtagtaaatcaaattccccattctggtagaatcagttgaaaattagctctagctccaacgctaggttggtaatctcacgaattttgatctggcgagttaatctcgaatgaatagaaattctagttgctattttcgtagaagcaattaaagaaagaatctaaagaagatcttttcccatcgtatttatctatacggacaatatattcaacctggcatgcttagttgcacgacacatcacgagatactagctccgttcaaagaatggttgcaggtaggggtgttcataaaattgtccacaccgagtaaaaaatgtggtttgaaattctttacgatacggttgtggtttgtaattttttcaaaccgcg

SEQ ID NO: 14520 - DNA, 6152 bp, Cannabis sativa
ttaggtaaaagacaccatttttacttacttagctcaacagagaaattcaatcacatctggttccatttttactgttcaaacgaaaaatagaaaagaaaaaaaaaaccctaataaattcacaaaggaagtcaattgatttaagcatatataaaccctagcaatggtgatagtgaaatctattaggtaaaagacaccatttttacatacttaacaaagaaattcttgttacttgagagaagaatttgacaaacgaaatttttaataaaaacaaaaagggggtcaatttaagcatatataaaccctagcaatggtgatagtgaaatctaattaggtaaaagacataatttttacttacaaacttatctcaacaaagaaattgtggagaaacggccggcggtggagaggttggagtggcggtcgtcggagaaagagaagaccgattgggagttgggagcgatcaaaaggagtgaagttagagttgctgtttggcaacaaggatagtgataaccattcacatggatagagaattaccctattttgtgtttggtaagattgtggagataatttttattttttattttttttaattacaataataattttaattttaaatatatttatcttaattttgagcttcgtattttctgaaaaaaaaaaattaaatttaaatatttaagtctttatagttctaataagatttagtaatagaaaatctataaatagatggttcaagtctcttatttcattttctcaaaaaaaaaaaaagaagtctcttatttcattcaaaactcatagtcatatttctcaaaccctccttaacacacaactctttcaaagttgatattagattacaattcattttataataataaaaaaggcaatttacactaatatatacattagtgaaggtaaatattatttcttttcatttcaactattataattgtttgtgttattattattaatcaataatatttatttatcaaaactttatatttggctcattcatgaatattattgtgaatttagagataataatataaatatttgatttatttatatcctaaaaataactccaagtaagttgcggaaaaaacttttttatataatttaaatttaaattagagttataatttatatatatagttatcttttgaggcatcgaaaattctcgaagaaataaaataaaaaatctaaatgttttaagattttattatagttataataggattaatgaagtctataaatagatttgcttagcctctcatttcattcaaatcaaaactcacatttcattgctctcgaacactcatcttactttgttcttaaaaaaaaaacactcatcttacttaattgttctcaaattaatataacaaattaattaaatatatatatatatatacacaagtcatcatataataaatagtgaagtgaaggtatgttattgctatttattatatatgttaattattttacacttcaactctcacttatattatatttgttatatattaaacaatattcattaatattattggtagacacaagtgagaatttagagataataatatttttattttctaatattaggagctttaattttttaaacgaattttaatattacttaaacaaatactatttaaatatcaaatattatttgttaattttatatatcttctaacttaattgaatatatattttttaaaaaaagtttatctattcaaaaatgaaaaaaagaatataataaccaaatattatttgttttttttttataattattatttaaaatttaatttcttaattttaaaattattattcaaaactcaattgatctattattattatttaaaaataaaatattatttgttatttttatcattaatttgttaattttatttatttatttatagatagtagagaagagagtatagagagagagagagagaaacatcaaagacgggaatggcggcagccaaccaagttccctaatcggaataccaaaacaacaatcagaaaccctaatcccaattatcaatcccaatcctaacccaattccaattatttcaacaaactacttcaaattcaaattctcacatacattgggacactggtcgatactaaaagagaaggaaatatgagtaatcccaaggtgtgttttccttaattttgatataaagatatgatttttatgattgttattttttgatattgtgattagaaagttgagtttttttttattgggtttgtttagatttttttttttatgattgttgtattgtacaggtgtttttatttggttcttttagtgaagatgagactaagtctttgatgaagcctaagtcatctaagaaggttgttgagaaggatttggagaagaaagtattcaaatttggatctgtagattttgtctctggaaaatctactggtgctgctttgaaaggaacaacacaagcatcatatggtgttgctgaacatacttctcttcatagtaatggagttaaggataggaaaaggggcaatgctgttggaatttctacacctgagttggagaatctaaatgcccttagaaatggttttgcttgtttgaatttgcagaatggagtacagaatggtggtagtgtaggagatttctcggtatctttggcgaaaatagaacctaataaagttgctaatggacaagttattgttgttgctaaaaccttactgcgccggggattagtcaatttaggaaacttgtgttttctcaatgcaactgtgcaagctctgttgtcttgctccctttttgtgcagcttttggaggatttaagacactcaaacatcaccaaggtgattatttaatggaacttaagacatgataagtttatcgattttacttggtgttttcgctttatctgttgttgttgcttatgttgaattgttttgtaacttatcaggctgaatatccaacattgtctgcatttactgaatttgtgattgaatttgatatgccgagctgttcaaacacaaggaagaaagataccaatgtgattgatgttggtaggccctttagacctgccatgtttgaacaagtactgaagaacttcactccagatattccaagtggtatatcaggcagaccaaggtatattatgtgcattgatttttatgtttcttttcttttatcttcaatagtttttgtttatagaatttgacttagaagtagtgcctttagtgtcttaagcatagagtatggcttgatctgtagtcctttcagctatcaaacatgtaatatcttagcttgtttcgaaatattcacgggttagatttagagcataggttgatcttcttattgtcaaatgttctgtagtaagttcattttgtaaaaatgaattgtgccccgtttagtaagcccgacatttattgattttttgagagctgtcaccattttattttagtgattatcacgggctttgttagaactaaccatttgacacaatttactatgttcagacaggaagatgctcaagagtttctgagctttgtgatggatcaaatgcacgatgagctgctcaagcttgaaggacaatcacctgttgggagcaaatcttctcttatatcttctgttgaagacgatgagtgggaaacggttggtccaaagaacaaatctgcagtgacaagaacacagagctttattccttcaaaactgagcaatatctttggaggagaattgaaaagcgttgtgaaggcgaaaggtaattttttttttgtctcgaacttattctttgttaaatttttgcaaagtattcaattatcctgatgagttttatgcctttgtttcggtattatgcaggcaatagggagtctgctaccattcagccgtttttactacttcatcttgacattcaccctgaagctgtaaataccattgaggatgcattgaaactgttctctgcaccagaaactctcgagggttatcgagcatcgacaactgggaaggtattataagcccaacacacttttatgttattgcattggattttaatggcattacttatgtggtacttacttcactttatggttttctcagagtggtgttgtgactgcaagtaaatcaaccaaaatccaatccctttcaaaaatattgatacttcacctgatgcgattcggttatggaagccaaggaagcactaagttacttaagcctgtgcgctttcctcttgagttggtattaggccgcgagctactcgtcccttcaccatctaccaaagtaattatcactaccctacacctccacaatcaaatgttgtattatggctttttttagctgtgttaacttatgtttatctttttctcatgttcgaattcttagggccgaaaatacgagcttgttgctacaataactcaccacggaagagagccatcgaaagggcattacaccgcggatgcatgccatggtagtagtgggcagtggctgagatttgatgatgcatctgttacaaccattagcacaagtaaagtgttacatgatcaagcttatgttcttatctacagacaattataggaaaaaggaaaagggttacaacagaggagttttttttgtcattaacttccctctaaagaggggcttttgtcccattcatgtatttatttatggatatgttaacactaattaaatataattagccaaaattaaattttggctagagtaaatggccttttttttaactgttctttagtgccagcggttttgtaacttttgtaatataattaaattgttgattagtttatgaaatactttctttttattattattggattttctctttaaagcttaaaacattggtttgtgataatattattgcaattctcttttccacgggaaattttcaaaaatacttaaacttttgaaataatatatataaaaaataatatattacaaaaatacaagtttgtaaacattttttatatctttgtaaacaagttggtgtgtttagaaaggagaaattagatttgggtgtaatttgatataattacataatttgacacatttataattatattgtaatcgtgtaatttaagttagttacgagttttaattaagtgtaattactcttaatagtgtattgagtgtaattactaaaaaatttccattataaatattaacttctaaaaacaattatcgttatggtaattactaactattatcagataagtatattattgtagctgtaaaatttaacgaagttaagagtttcaattacgcttgagtgtaattacacttaatagtataattactataaaaattctattataaatattaacttttgcaaactattataggtaattactaactatgtttctaaacaaaattttaagaatttatgtgtaattattagtttatatggtataattactagtgtaattatacgatttaataattacactgtaactttcacattttcacatacgccctatatatttgtaaataacttttatatgattgtaaacattattatgaaaaattaggtattgtatttttaattaatttttttgtggtaagatgtaccttttttttctttctaaaaaatggtgcagaatgttgttattccaaaaattagtaattttaatcaataaattatagttagtccacataaaataaaagggtatttgatttgtatggcataaagtgatttattagttacctatagtttattttaaaaggaaagaaaatattactttaattcaaaactagtggaggagaacaatcaaacaattacactaagagttaattaattatttagtgtatttgatccaatggagtttaataacaaaagtataattaactgcaataattcatttatagatacctctaataagctagtaatactagattgttacatccaaccctaaatgattacacaattaggcaaatctaagatgaaagtaaacattctcacatgcatagcataactagttggacatgttttttttgtctttacaaagtttgagactcgattttttctaatcctaccttacatataattatgatcagtcttaaaatttagtgagtcataggaaaaaaaattatttttggatccttatttagaagaatatggtattttttaaaatcagtacctaccttacatatagggtcagccctgaaatttagtaga

SEQ ID NO: 14521 - DNA, 8150 bp, Cannabis sativa
aaaaaaaaggaagacgtcgttttgaatttaagatctttaaactatctaatataaattacaatatgttctctcaatgtttaaaattataatataaaagtttttttttttttgagaaaagctatatatattaatgaacaagttcatttgtaacaatagcttcaatagggtttggatagacaatcctccaaataataacagtatccacccgtaaaacgaatttatgcgcagcagagttagtactccgacaaacataatttagagagacacctgagaaagaggacatatgatagataatatctcgaataagatcatgaaatctaccataatattgttgaggattgttaacactttgtgagacaatgagagcataagtttcaataagatgaacctcacaattaatatcacccaaccattgtagacagtaagagattgcctttgcctcaatttccttgacagaaaatctccccttaattggtttagaaattgcaacgataacctcatcacaagaattatgaacaatacctccagtacccattatttgaccatcattatctaaggctgcatccacattaagtttcaacttatcagtgggtgggggttgcaacgattgattgctgacaagtaaattctgagaaggcttggcaggcgagctgttggttatgcggaactcatgaaggtatgccatagcttttccataagattaggttgaggaagagctcggagttttgtgacatttttgcatcatcttttaattataaattttaatgttatttaatattcatctaataatttattaaaaatataaaataataataatatacaaaggtaaatataaaatttaataataattatgaaagttctttaatgcaaagcagcatggtaactaactttagtaataaaatattaaaaatcacataatggtaattataatagtataacatttattgtaatataaattttacatcatgctatattgtaatttaaatttggatcactttttattatgtagtaaatttgcattataatttaacaccctattaaagtagattttttttataaaatgagctatattttatatttatatcacttattcatctccattacaaatgctgttatatataaacaattaatattagtttacattgttgtgggtagtggtggattcaattagaaataatttttatgtaaattaggatttttgtcccaactttaacttgtactaaatagtaatatatagagtgattataattcctagacctagttggtaacaatgttctcttaattttttatgatctcacaaactgccaatcttccattctgtacttctttgcagaagctgctcaattgtgcaaaagctttacaagcacacacttttatagtacggaaatccatattggagtcatcacctttctctgtttgctctccatttctatctttctttcttctcttttattagccttttcccaaaatttcaatctccttttcttttattgagcctcacttgttttcttctttttcagctttttcttccagaaggccttttacatgagtcatgaacatttttaaattgaagctgaatggagacttgagattttggtgtagcataaattttggaaggtgggtgtggcaattcaatgattaatgacaggcagaaatcaagtggcttttgtaaactcaatttatgtgtattaaagtaaaagtaaacagtcaatgcactgtctatcttaagcaaaggaaaaatgctgtagtttatttctcatcaaaactaaagggctctacataaacaaatatgcattcatgagcttgccaacatcaaattccatacttttaaattgaaaaaaaaaaaaaaagaaaaggttgaaaatgataagcatagtgcagtagagttcaagaaaaatgttttgtttgccaaacagtaaactagtcagaatgttgtctaagaaaatggtcaaccttgtaaatatatatcattcagatacaacaatgagattcaaaattgactgattatgcatttcactgaaatttgggtcaacacaatacattatgtcatcaatgatgcaggaacaatgtgcacacctgttttgcttttcacaccaaatcttattgacaatgaaagaacactccctaagaaatggaactttattaagataaaagcaagaagattacattaaggttcagagataggaccaagcacctttgcaaaaataagcatgcttctctttgacacttcaatatgagtatattatattcgaacaggataaacttcagggacaagacagaaagtctatgcattaatgaataaaccgacccttggtaaagaatcccaaatccaagattttaaagctagtagctttcaagtttcaacaatcaatatttttttagaagaaaaatcatagatagaatatgtatatttttaaactagaaatgataaaagtagatgacattctaactttctaagtgtcattctatcacacacattttaactaatatggaagataaataagatcaaaaccttaagataccgatagagtaaagaatgactctgcattggtggatcatatcgtaagtgggttagtggagccgatgatggagaaggtggtggcaacaatggaggagttgatggtcttatggaacaagcaaatgtggaagagcccaatacttcttccctttctttctctcagtttttctcacctaaaaatgaggaaaatgtaatcatactttcattgaagaaaatgatttccctcaaatttttgtacctttttcgtactgaaatccaaggaccaaacagagccttagggtgtaattgtaaacaacttacagcatagatagttagtcctattcataaacaattaagatttaccttatttcatccaaaagtaaaaagctaatgttctggactatgagaaactgctcaaaaaaaagagagcaaattactaccaatgaaagaaatttagtcaacatatcacaagctaataagtataataaggtgaaattcaaaaagcttaatagaaacatatataaaaataaaaccactcaacaagcctctgaaagatgaactcaaaaaatgacattaaaccattcaaaagttagtcatgggatgttagaaagaacatacatactaatgccataaaaagcactaactaaaatttcatatgaaaatgaaatatagctcataaattcttttggattactactggttgcaaagaagaatctatttcaccattacataacattttaataaatatctctgcagttgatgaatcagcagaaaaacccttttccaccatttcaattttcagctcaactcctcttgatatttcacaattgttgacaagtcctcggatcattatattatatgtccaactatttggggggcatccattttctttcatctctcgaaacaaatttaaggcttcacctacaagaccttcacttagaagtccatcgatcattatcgtataagcctttacatcaggttccaagcctttcgatggtagtttgcgaaagagatcctttgcaactgtaaaatttctagctttaaacataccttcaatgatgatactgtagataacaatatccagtggtaacttcttctcttccatatcctgaaatatttccattgcctcctccatttgtccatatttgcatagcccattaagtaaaatagcaaaagtttgaatgttgggaagttggccggcaccctgcatctctgcaagtagctctattgcagcatgtgttctccctacagtacacaaaccaccaatgagagtgttgtaagtaacaacatcaggaattaatcccttcgatgaagacatttctcgaaacaatacaagagcttcctccatcctcttgttcttacaatatccattgattaatatattatagctatgcacattaatgttgaaacccttcttaagcatctgaaacattttagttgcctgatcaatttctcctcgcaaacaataaccatccataaccgaacaatatgtgaccaaatcaggttcgatgcctctctctaccatattatcaaccagtctttctgcctctacaacatcaccctctttgccaaacatatcaaccaaaatattgaaagtatgtacatttggttgaatattttcaccaaccatttgattaaatagcctcattgcttcttgccgttggcctagcaagcatgccccatgtatcaagcaactgtatgtaatgacatttggaacaaatcctttcttagtcatttccgagaagagatccaatgcatcaacaactcgaccatccttgcagagaccgctgataacagtgctaaaagaaattatgtcaagcttgcataactttttctccatattcctcagcaattgtacagctgcagcagtgttgcccatcttacaaaaaccatttattaatgtgttataaataacaatattaggcttcaaaccttcaccaatcataagatgaaagtattcttttgcctccttcatttttcccactttgcagaaaccatttagtagtgtgctataggtaaatatatcaggcctaacaccacctgcaatcatatcattaaagtatcgttttgcctcatcaattttctcgaccttgcaaaaaccatttagtaatgtgttataggtaattatatcaggcttacatctttcttctgctaacataatgtgaaaccattcttgtgcttcatcaattttcccctcattcacaaaccctttaattaaagtattcagagtgattgtgttgatttcaaacccaaatttgatgaaatttccaaagacagatagacctaaaagggcatgctttaaatgagagaagcaattaatcaaaatggctagagtataatcatctgggacgattccaagtgaaaacatttggttgtagaaagtaatgacaagggaatagtgtttgaacttcacaactttaccaaacagttgattgaaacttacaacagaaggcaaaggtcgcaagtggagcattttgtcaaacatgttgagagcatcttcaacattgcggacttcttcaatggctacagtctgagagtgagaatgagtttgtgctacagtgattgaaaaactagaaggagaagaagaagtaagacctgtaatgattcctgggttgaacaaagtccgagtaattctagggctagtcctctgcatcatcacctctttccctttggtactaaatccaagcttttcttgggtccaattcaatccaagcaagtaaaatgaattctactttatttaaatattatcattgcataattgtgattctagcagaacgattggctttatttgtagctttggatttgtactcttttttgagtctgattgttgataatgctacatttcttcctcgttgattttgggaaagaactaaaaagagaaagatttaagtcgaaataagtcggattcgctagctttggaggtcgttcttagaggatttaacaggtttgatgtcgaatttttcatgtgtgtttctaattcatgtttatttgttggattatggattaggtccgtatgttcttgggtgaataaaaaacttgtatagttagattaattcctaacttatttcaatgaatcctttctcttttccaacattcaattaaatttttttgatcttacacactatgattactcaatcctcaccaccaaacagaatctaaaacatttacaggttttccattgcatatagcctttaaaacacacactggtcactcatcaattaatatcatcagctcaagcatctgaagctcaacttagacagcattactgtacaaaaacacccaaaatttgaccaaaaatatttgcatactgtttggttcattttattaattgaaacattttgaagcatggacaacataaaatctataactaaggtcacaattgtgtggaaacaattaaagaatcataaactaaaatgatggcctggaatagtgagaatagtcatcctgcaagtttagatatcaaatattattctttagacaaactatggaagtgctcaacaccttacaaaacaaaaacaaacaattcaactaatataacactgcacaaagatctctatggtaatagtatatatgagggagttcgaattacagtctatatgaattcggatggtgaatttgcatcgggctttccgttgtcacccaatccccctggatgctgcaaattctgcaacacttgaagtggtaaagtgcctaaagcaccacctaaaccatcatttggtgacccgaaaaactgacaaagaagcctagccataagcccaagaatctgcatttggttctggcaggcctcggcgtgcatttgcatcatttgcttctcatgctcaatctgcaaccccaccatcctttccctccattccattgcttcttcctctctcttctcttccatcctcatcctcctccgtcgttcatcggcaaaatctcgttccatcctcaaccttctctctgattccctccttgcccacatcatctgcctttcttccaaatccaattccctatcatccaaccactcttccctctcaattctcctcttctccttcctaaactcaatttgtttcctctttgcatccctctctaaatcccctttctctctcttatactccctctctcgcctcctttcttccctcttcagcatcacatcacgaagctccaaaaccctagcaccaactaaccccaatttcctggctactcccacacccttcttcatcttcctcttctgcccaaaaccaatttcccaattttccctctcagtcccaaattcagcctcactcgcaacaatctcctccccaacctcaccaccaccaccgccaccaccatcatcattacaaataccaattccaacatgtcggccattatcggccccatcgcattcctcctcctcctcctcatcaccatcatcatcctccacttcctccaactcttcttcttcttcctcatcgtcctccaaatcctcacaatcaagcccgaatcccaggtccccacaatccccaaaaacatcgatgctttcgcaggatttctttcccttgggctcgagctcaacatcaccaaagacctccttgtacttcaagaaattctcccagtgattctcgccatctttccaattaaaatcttcatcggataggcgaatcttctgcttgacacccaggtactggtgacgcatgttctggaccttgatggagacatcgcgccaggaccacttgaaaggaaaggtgattgggtcggtgaggtggtggagggtgttaacatggtcggcaataggtttgaatttcttctctcgggtcttaagcttggctagagctcccgtgttcagaagctcttcgtacttggtgaggagggtttgctcttccagctccgaccatttctttctcttcatctctggtttatgaactcaccagaaccaagttattgtacaccctgcacatcacaaaaccaactaaattaggctttaaaccttcacaaatcataagatgaaagcattcgtttgccattatatcgggcttaaatccttctcctgctaacataatgtaaaaccattcttgtgcttcatcaattttcccctcatattcacaaaccccttaattaaagtattcagagtgattgtgttgaattcaaacccaaattggatgaaatttcccaagagtcaagacagatagagaaacaattaatcaaaatgcgtagggtgtactcatctggcacgattccaagtgaaaatatttggttgtggaaagtaatgagaagggaacattgtttgaatttcacaattttaccaaaaaattgattgaaaagcacaacagaaagcagaagtgagcattgtatcaaacatgttgagatcatcttcaacttcaacactactgaatgagtatgtgctacaataatgaccgaaaaactagaagaagaaagaagaagaagaagaagaagaagaagaagaagtattacctgaaatgatggctgggttgaacaaatccttgcgagtaattgtagggcaagtcctctttggtaccaaatccaagcttttcttgggtccaattgataatactgaagatgcgataaagctattcaaatcaggttaaagcttttttttttctttcttttttaggaattctcctttctttttttttttcagtctattacatgctaaaggataaagctagtaaaatga

SEQ ID NO: 14522 - DNA, 2205 bp, Cannabis sativa
  modified_base (27)..(38): a, c, t, g, unknown or other
taacggccaaaaaagttcaggggacannnnnnnnnnnntgtcaaagttcggggaaaaaaaaaatcctaattagccttgcttgaaattaccgaattttcgaatttaatttttgtttttgtttctttgaaatggttggtgctagggttgtgattgataagattgtttataatatggtattggttgtcttagcctaatacttttataatacatgaatttgttctataaggaaacactagacggcactaggctgcataagctaatgagaaagggaatctgagtggcgtctttacttggcacatatgttcaccatgtcatggctcatagccatgagttgtataggtgttcaagcacatgatttgcttgtatgtgttttggactttgatttttcatgggcttcaactagcaatatgcttgaattcctttcttcttaaaaactgtagggtctttaaaagattcagcagaggatccaatatgtttttgttaattggaatcctcccaaatctaaaattaacaaaaatgttattggccattatttttttaagggcagaatgtttccttatcacaaattgtctttagagctttatgtttatctgtaagaaattctctcagtaagggactagctagctggtttggtacaggatgtcgattctcatcatgtccaaaatagacatgaaatacttttagttaattatataaatatactataaactttgacatgctctcaatttttgcagtaccaacgatgctgtcttagaagaaatgaagagagaatatatggtccaagaagatgcgaaggccacctcgaaggtatcttctggctaagttcagtttctcagactcagctcggaccatggcaccctcttgcaactggcatatgcacaatttgatttttagtgcatgtgcccataagccctttagatacaaacttccgaactaatagtttgaggttattatgttgcacttttccgtattatcatattcaaggagaaagggataaagatttgtttcaatgcagtttgatcaaatttgtttacccatgttgttttcacccattatagaaaaagctattgcaatacttaacaatccattaagcagtgcttattattgttggcaaaattattggtcattgcaacaaaaactttatcagtttctagagttacaccagctaatattattatttgctttttaagctgcttgcacaggtgtttcttgccttagatgctaagtaacattatgcactgccattgcaccagaaaattgtgagaatttttacaataaccaattctagtatcctacgaagaaaaaagtactaattacccaaaaacattttggtgaactcgatttcaaggtaccatattgaatgataacacattgaaatacaaaatttagtaataggttttggcctatcaattaattcagcaacagaagaaaataaaagaaagaaagaagaagatgaaaatggtactggtattaatgaactctcctggtattcaagagcctgagctctccttacaacttagcaaatccttgtctaaaaactttcccaaacaagctacacagtatttatatgccataccccagctatctactgtaagactaagccacacctaaacacaactcgcataacaaatttacacatatccttcttcctagcatacacataagtgacaggtggcttatcaatatggtttgaagtttcaccttgtcctcaaggtataaatgaggaaattgaacttgaatgactggaaaatcttccttggtagcttcaaagtcggggaggttcttccatttaatttaagcttgaggacttgtcttgtgagtgtcgggttgaatggctagcagcgtttctggttcatgcagccattcgagattagaagtgagactcggaggaagaggagaggcttgttgatggggacctaaagtagcacgaagcaatgatacatgaaacaccaggtggatcgtggaaccatttgtcctttcatgtacaaggtacaaatctccaatttcgaatcatacgctaaccgattaacctccaacttttcatataaaatctagcgcatttgctctaagattgtgtcagttttaaccgtcaatattaaattgcgttcggctttataaatccaattaaaaccctcaaaataccaaatctcatcgtatgatataacatgaaacacaatcgatcttgcaattccgtacaaaaaaaaa

SEQ ID NO: 14523 - DNA, 3253 bp, Cannabis sativa
ttttttttttattctgttcgatcgtttcttcctttttctacttcatattcttcttttaaatttattattattctgatgtagcagccagccatggcgacgagtctcctcagaaagaaatctgttatctttaacacacttctaactcgttttctcaccacaccacaaagatccaaaggaaccctagccttcgaagaggtccgagtatcaactgaccaaccctaccaccgtactgctctcattatccatggccttttgggatctggccgaaattggaaaactttctctcgtaatctcctctccacaatctcaaatccatctggtatctctctctctctctctggattttttattttgaaagtgatacgaactggagctcatttgtgcttattattttttattggaagcatggagagcggtgcttgtggatttaaggaaccatgggagatcagcggaggtggaaggtcttaaccctcctcatgatttgactaatgccgctaaggacttagctaatttagttgagtctcaaggttggagatggccggatgttgttgtaggccattctttgggtggtaaggttgctttgcagtatgtggagaactgtgctcgtggtgactatggagaatctgctgtgttgcctaaacaggtcccatttctttccttttttttttttttttttaatagtgtagttttagaaatgttgatttgtaatgacaaatttcatgttgtgaatctaaattaccacttgaaatataaacttcttgcattaaagcttgatcggtacctgaaaatggctatttaatcattgtgaaaaatgaatgagaagttgaaggcttttgtatgaatttgaaaggctggttataattgcgaccaaacttggttgttttgctaattttttcgtaatgactatttttacaaaatactcccttataagcctaggttgaactttagtttggttacttgtgtttgggacagtattccacttgcttggtgttttgaagaaaaagttgatgaccctttattaaatattgacgcagaacagctgtgggtactcgattcttttctaggagtaaagaaacctgaagatgaaggagaagtagaaaatgttttgaagaccttgcagagtatacctccaacagtttcttcacgaaagtaaagctcttttttctggtataatgttatttgcacccatgctggtttcatatgcttgatttttctcttccttttgctataaattttactttcatatcccatgcttaaactctgttatacgggcgagagctttttggttatttatcatctgatggttgtaagaaagtttatatgagtgtgagcactagagtctaaggaagttaaactacaactcaagtcaaaattataagctcattgagttggttgtcacatctttctcataagatatagtaccactattatcttagtgtatgggctgtaaattttaatgtttaatttaacttatgatgtaggaaagtgcccattgggtgcatcagagtgatagcaatttaagactctttctagaagttggaatatttaagaaatgtgacatatacttattacttttgacgagaaatgggttgaaactcaatgtataatgggcctttacagaaaaagtactactaaaagactaagaaatccaatataataccgatgacacacggctaatctacgaaattcctacatcagtcaatcctccttgggagaaaataaaactcatacttggaagagacaaataaaacttagctgacagatagtgatatatgcctgctttcttgaagattgtagaaaaacccatatcagaaggaaaatttatagcataggaatttttgttaatttttataatccaaaatggttcaatttcccctttgaaaatgtattgtcatcaaatcactgccctgagaatatcttcacatgcttgtggtgatcccctgcaatcgtgtagtttttcttccaacaaaatcttggacctcattagttgaccaatttacatgctattggattcaaatttagttttgggaagctcaatttcccattgatttggtttgttgccgcatatatgccaattcatattgccaaagtcctataactgacttctgttctgttccatcactttgaggatagttactggtacttactatatttcattgaaagtaatttgacatgggtaaatactttattcaataacatctcaattgttgctttggtttaaatttattgtttcttcacgatatgcctttctcataacttttcttgtttttgattgcttcaggtggcttgtaaatcaccttattggacttgggttctcaaagtcactatcagaatggataggcaccaacctcaagaaatctggagacaacatgacatgggcatttaatcttgatggcgcagctgggatgctacggtcttacaggtaacccttggtcttgacatacttacaaaatcattttaatagatgatgaagtaaatagatagttgaaatggtagttttaggagtttgtatagcatacagtacgatgagtcatggcaaattttgtagggagaagtcatattggactctgttagagcaccctccgaaaggtatggagatagatattgtgcgtgccgaggaaagtgatagctgggaccaggataccattaagcgactcgaagctctttcagctctagaaagaggtccgtcagagggaaaagtcacagctcatgtacttccaaagtcaggccactgggttcatgtggacaatcccaagggacttctagagattatggcacccaaaattgatgccatatgaaatttctctggtttgagtttctacttcatattcctagtatattaccgtacagaaatattactcataatttttgagtggatatagatctaatttgtccccactctgattcaatttatgtggcacaattatggaataaggccctggtttaattcattgccttggtagtgatattttcttaacgactcgctgttctgatattatatttatgctattttctaaaaagtggcaaaacctattggattaaaaatttaaaagccagattgaatggttggcatccaagccaagtctaacaccattgggttgagaaaatagcataaataaaatataaaatgtcacttggttagtgtttcccattaagttaagtctaacaccattcggtcttgctcataaacaaaagttaaaaagtcaaggaaactaagagcttgtttggttgtgtttttcagttttcagttttt

SEQ ID NO: 14524 - DNA, 3998 bp, Cannabis sativa
  modified_base (2567)..(2567): a, c, t, g, unknown or other
  modified_base (3731)..(3739): a, c, t, g, unknown or other
ctgaaacagtaaaattgaatgaaattatataaaagtccttaaatccaacaatctcaatagttcgtggggcatttttaacgacttgaaaagttcaaagagccgacatgatttggtacatgtcaaagtccaacggacaaaaatactaattagcctttttatttttatggtaacattttcctcttatataatatatcacttttttctgctttaatattccaaattaatgtctcacattagtgctatgttagcaaattaattaagaaaatgaacaaaaataaataaagatagcatttgcaatatagttagagtttaggaaaaaaaattcaaaaaagaaaaaagttcaggaaaagataatttagaaaaaacatattctatttattattgtaattgttacatttttttttttgtattatttttgtcattttatattataattattattattttacacattaactgtctatgctcattgtactaaaaaaagagtctatatgatcagattaggagacacggttcataaataatctaacaataataaagtcattatagtgaggcatatttataaaatcaattgagtatattatttttatttttgtaaattaagatagaaatgttactaacatattttttatataaataattaaaaatatttataaaccgcacgcgaagcgcggtttgtttcctagttagaagataacttagacaagttagcggtgtattttatagacaagttcctcaaatctctaccgtgtttaatgagtttaataaatgtgtttggaaaaatattgcattgtattgtggtatactattttattaaactgtattctatgttatttttatataatattatatttatattaaattatatgtgcaagcgaactcagtatttttcaaaacttacttcttttgtgttatttttcaaaacttacttcttttgtgttattttcaagtcattctaattcaaaatttatcggacacatcaacaatataattagggaaacttatacaaaaatattaaaatttggattaatttttacaaaaatattattacacgaaaatctttttaaaaatattgtatttacagaacaactaaaaaataacagtgaaaacttaagatagtatatttttttaaaaatttttgccacacagtataaaagtaaataaattaaaaatgtcggtatgaggtgtaattatccctataattaagagggataaagctccctcagaaccaactaataagtttttgtctaccatcaagcacaacatcatctattgaccttattagctataatccaacgtaataagagctactacgtttgggtacagctcctccttaacagataaatttggtaatgaaaattcggtgatgagactcgattaccatacatttattaattaaaaacctaaaggaatggaaaagattaataccacatttttttctggcaataattactcatgttctctatatatgcactattatgcacatttgaattttgagctaaagcatcgaaacaaaacaataataattcaggcatatccattgatcatataaaattaataaaatatagtaagatttgtttggcatctacttaatttctagagacgtctccatagtaaaacaaaaataagaatgggcccaatcggtggcttgattttttttttgatgcggacaattggtggcttgatcgatcagagaaatctgtacaaacaaaaaatttatattataaagaagaaattaaaaaaataataataatgttaatgtgtcgtactcactccattggatcccaatataagttaattaattacaattagcataaatttttgaacctgtaattgtctcattctatttgacttttccctcttatgaatccaaattaattacagaacacacacccacacacacacgtatatatacaaccttataatcagaatagttttactttgacttctccatgtgcagctctcaatgcttctcaagtgttttttgtttatttatttttttatttcaagaaaataaagtaactgggaattgggttatatataactgatgattcccataaagactatgatgaactaaaagtaaaatgggatcagttcacgggtcagattcatgttaaagaaagagcttaatatatatatatagcttcaaatctgacaattaattatacaaatgtatatatgtcaaacttctagaaagtctttcttccatcaataaaatattatatatattggtagtgatggagagataagttcacggtttcatgtgatgagtagtgagtctttttaattaataaattaattagtgttttagaaaataatagtaattaaataaagtagctaggtggggtagtaagagatctgtaacaaaagttgagaaaaactatgagaaacaggtataggaattcttggcatatcacccggcaataatggaggctgttagcaacataaatctactagattcggaatatcattactttccctatatcatatcttattttttggtttaatctttttctaaggatatatctccatatatttgtctgtttatttatataatatatatatanatatatatatatattataaaatgacacttaacatacatttatttaattagcaaaactttattatatgagatttttttttagagggaattatctcatatttttttttttattttacgattgatttttaaagttatttttctggcagtttctatgtggaatgctatatgattttttattgtaatttaagctatagtgttaattgcaataagagtttttacatagaatttcgtaaaaatacaaaaaaaaaattattttaaaatgtaaaaataaaaaaatctcatttttttgaagactttattatgacattataaagttgatacataattttttttttttgaaatgaggtttacataattattaagtgtaatatatataaatacaaaaattactcatacatgagtaataatgttggacaaacacacaaactttttttttgttataaactctatcacataaaagataatatttatctaattgataaaatcctatcgttaaactttaatagctactaaatataatataaacaacaaataaaaatagtattaggagagaaagtgaaaaagggttgaggatatgtaggaaattattttgtctatattgattgatttcacatggtcttgttggttgagttccctgactactcatgataattaatttcatctaattattatttattcaaaaggaattaatatttaatagggtgatgaatttcacgagaaattcacgaaaagaaacaaaaaatagaaagagagaaaaaaacttataaaatatatttgtaatggggtaagtttatagtatgcacctcttataaagtttttaaaaattatgagtaatttacaatttaaaaataaaatttaaatattttattacatttaaattttattttttacaatgtaataactacaccttatatatgtgattatacttaaatattaaaattgataaaaaaaagttatcaaaacgaccaaagcctccattacaaaaattccctttgttatatacaatacaaatgttgtgcagaaattttttagatatacaaatgtaaattaattggaaaatcaaaatatcataaaatagcaagagaatcgtacatgcacgttgcatgttggtgttttttttttctttttttcttttttttttttaaataacaataataataataannnnnnnnntaataataataataataataaaccgcaccataataaataaatagattattatatatcttaattataaattttttaggggaattacgtaccctatatactattttttttaaaaaaatttaaggtttgagtttctaaaatggttgtagcactaattgcaataaagatttctatatgattttttgttgcaatttaggttgcagtgctagttgcaataagagtttttatgtagaattccgtacaaatacaaaaaaaaaaaaaa

SEQ ID NO: 14525 - DNA, 6939 bp, Cannabis sativa
  modified_base (154)..(156): a, c, t, g, unknown or other
  modified_base (2112)..(2126): a, c, t, g, unknown or other
aaaaattgataaaaaaataattaatctttttttcttgttacattggaatggtcattcatttctttttaaaattgaatagctattccacgaaaatggtggaaagaatattccattggaatgtcattccaataccttaaaatgcaaccaaacaaannnatggaatgaaaattgttttctttccattttattccatttcattacctccaaccaaaggccacctaatttcttaatgaaaaaccagtttcttgatgaagaaactaatttcttgataaaaaattagtttcttaatgaaagatctttggtgattgattttgatcgcagaaactaaatttgaatcgcatgagaaagaaaaaaaatcttgtgtggttggagagagcgtgagccttttttgaaaatttaatcttttttttaaaatgttttttataacattttctatttaaatagctatatatttagttaatttgattataaaatgctatatttaagggcattaactttacatgtcatatagatcaaaatttttatttattttcttatatttttataaatattcctttttaaaattaataaaaaaaattatatatatattttgaaagagaaaatatttttttagactcttcgattaagtcgatcttaagcgcggacctaacttaactaatattctataatttaaacataaatcttattcaaagtcgaatcatgtaaaattgcgttcttttattcttatttactttttcaatccctttttcatatagaattattacatctttataattcttatactaaaagtaaagattatcacttaatgcattttataaaagttatgatacattaacctaaatattttatttaattatatgagattattttcaacaacacttatgtcacccctatatactcatactatatacgtttgaatttttgagtctagtgggtattattattttgttaatttccattgctaaatttgaaataattactattgacttatcattttgattttattcataaatgtcaaaagagtcacttacatagaaggatccgtttacattggatggagtaattttcacattacacatataatccttaatcattaattaatttatttaattagtacttatgttatgttttcatatattttgcactcttcttacgcaattaattcataattattatatattatttgtttaaaataattatagtagtctagaaaatgttactatatatgattgtgatattttttggggtttccttataaaaagtttgattagtgatgtgcatgtactaatttgacaattttcacattatataatcttcaatatcaagatatacaaattctaattatataaatgatattagtggtccaaataatatttaaagaaaagtagttattcaatgatgatgatatcatataaatattgaagagatttttcaattacaatatataatcacaacattgtaaaatatttgttcaaaaaaacaaaacaatattgtaacaatttgacatagacgttttgaataggtttcgtctaaatcaatatgaaatataatttgtgttcgaacaaaaaactcatattaaaaaaaaatactatcatatcttataattgataacattgaaaaataaataataaattaagtaatcacaattcatgatgattttgaattttaaattttgtattgatcaatctcaatttttttttaaaaaattctctaaagattatcttgacaaaattttaattagataataagtgagttaacattacgtaaaaaaatcaagagtatttttccctcgtaaagaaaaataaaaataataagttaaatctgttggaaattttttaatgtaattatcatcaataattataatttttgtaatatatacaacacaaatcttgttaatcataggaccgattataagggtaagcaagccaaccctacacttcgagtcccgaacattgagacccaagtaaaagaaaaacttattttttgaataaagagataattatatatggcactatttttttgtaaaaaaattacatttttacatttaaagaatttgtttcacatttttacgttttctataaaaataacacgaaaacaacataaaagtaacannnnnnnnnnnnnnnaacaacaataaaaaataacatacagataacaaaaattcaacacaaaattaacatgaatacaaaataaaaagaccgtatttttctataaataaaattaaaaaattcgtaaaaatatttaaaattctgtgaaaccgtatctttgtaaattttttgttatttttgtgtatttattaaattatcccataaataaaatattatataattagaatatataacaaatgctatttggtatattggtacgaggttaaaggctcaattctaaatttctacttttaaacaaatatttaatgtatagctatgaaaattgaacttatcttgatgattaaagtagtagaattatttcgataataattaaaatatatacaaggtctcaaaatttaattttatcaccccatataccttatgactagtcctacatctagtagccaaataattacaatataaatatatattttcacaaattatactaatttaaatttaatagatcttcatttatcccctacttcttatttcttagattctctcaaacttaatatattacacagacaaaactaatttaaaaaaaaaaatggaatggaccaattgggagttaacttacttaaccccatgtaaataattcatgatgtaatagaaacaaaaataattacaaaaaaaaaaaaaaaacaaaaataatattaaaaaaaaaaaaaaaactatttttcgtgacgtgagccttctttattgtcaataaggcccaagcccaaatcaaccatgggctcttctttccttctactgcccaatctcaaaagcccatatagtttcttgaactcactaacagttggcatattttcccggcaaaaaaccgtcgccggttcaaccgactcgtcgccggtccggccagaactgctgttgctcagcctgtgttgcggcggaagcattttgttactcgctccgtttgccggattggttccgctgctttgcagagctgaaatgaccgatttcagagcccgactcggcgacgtccgattcgatatcatcaactcgccgatctccgccgcgctgagactcgctccggtctggaaaatctcttcaacttgagggaatagcttgtgttcctttaaccctaggtaattattggctaaacctttaaaagcagagaaatcgcagagaggaaaatggatgtgaacatcgattcgacctggtctcattaccgattgatcgatttgatgatctttgctgttcatcgtgaataccaaaactcgttcttcgccgcaactggagattataccgtccatgaagtttagtaatcccgataaactcactccgccggctatggcagcggtgcgtttccccgttaagaatctgtcgagatcttcgacgacgatgagtgatttcggagtcgtttggagaagtaatgttttcaaatcggagtcgtcggagactttggagatatcgatatcgtacacgtcgtagcagagaaacctagccatggcggcaatgaagctggtttttccagtaccggaagctccgtagagtaaatagcttcgtttccaaacgcgacctaatctgtggtaatattgcttggatttgagaaacaattctaggtctgatttgatttttgtcttcaattccgcgtctacaacgacggtttcgaaattagccgggtgtgtgaaaggaattgatctccaccgttcgttttctcccgagagattcaggtgaagtttaatctccttcttcctctgtccaatttcatctgaaactgatagaatgtgctggaaatactgacgaaatactcttttcttgtcgtttttcttgattttgagaacgaaagacttgattccatcggtgttagatttctgattggtccaacaaactctggcgccgaggaaagtatcacgaatcgattgggtagcgtcgaggtggaagaagatgtcgtttgatttggaacctgagaagaggttggtagagtcagaatcttcaacagaaggaagagaattcaggtacgttgatatctgattatacagctgattttcctgaaaatggtcattgtattgtggaactttgtagagttggtatacatgaaaatggtccatgaatgattgccatgttctaaccagaatcaaaaccagagatgtttttgataagaatctaacaaccaaacctaaagctatgaagatgaatgtgtatgtaaatagagtagccaaaaccatatttggtccaaaccagaattaaaaaccaagagaaatggggtgtcttggttttgagttcgtaaggtgtaaaagactagtttttgagcttgagattcattttgggttggaattcaaaaacaagtaatggggttttggtttattgaggtatgaaaaagactagattttgaggttgggttagaattcaataacaagaaatggggtttattaaggtgtgaaaaagactagattttgaggttgagaattactgattgaattgtttgggaagaaggaaaattagaaatggaattatggggtgtctgataatgagaaatggggttcttccttcaagatattaaggtagttggtttattgggggtgtgatgtgactatgggaatggctacttattaagccggcatatttaacaaggtcaaaaattaactattgtatgtacgtggaaataaaccaaaagaaaaggcctagaagaaggtagataaagattgaagctagctagtagctagtttctttcttctttggctgtgaatgtacgaccatggaatatgaaccatatacattagttaggaataattggtcgtaaatatatattattgtattgtattatattaatgtgtactattttagttagaaaataaaagagctttgattatgtcacatgtgtgcatttttgttcaatggtattgattgactgtataattatatattatataggttggcttttttaagtttaggacaaacggcgctggatttgtacgaattatttatcatcatcatcaagtgcttaatttatgcaaactttattagtttttttctttttgttgtttgaaatgttggggtaatcatcacatgttttagttttataatatacaaatttgatctctcattcatgagggaatgatagaatgtggttgtctgatgagacctgttctcttctctgtcaccaccaatattatggattgtccctacaagaaaaaaaaggtgtatacaaatgattttcttttaacttgggatatttcttattttgcatatttatacttatttgttatttatttttattatcgagttttatttttacttaaaaacatataaatacatctcattttattattattttttgtgtaatatatattttaaattttttcacttactttttcattttctttttttattatattctaaaaaagtacatatattaaatagaatataatttaggggataaaaaataaaatcaaaaaatatatataaaatcttattaaagtaaaaatataactaaatgttcattatttaaaaaaatacataaaaacaagaaaatattataaattaacataaaaaatgtattttcaatttattaagagtaaattttaaaactaatttaagttatttttttttaaaaaaaaatatataaattgagttggggtgtaaatatagtacatgatttgttattatatggatttggtgttactagtattagtattactactcagcctaaccgtggccaatgaccaaattatatggatattgtgttttgcaggcattattgaatttaagaggggaatctgattgagatttaaaaggttcgtttctttataactaaatctctatagaataataataatcgaaaaaagaaaaaatgcactacacatgaaagtgacaaaatgatgaaaacagaggaaagaatagagaaagagagagtttaataataataacttcacgttgaaatttatatcagtttttattattatatatttccccaccctacgtgaagaagattatacctttgaggctttttgaacaagtaaaacactaataagttatccacagtttgcttatttattttattatattgtcttcttgttaaaaaagcattaaaaaagtttgtattgacacacctgtgaacaaaatagtcaataaaatgtaaattgctcactaaactaagctttgacaaaatctattccaatttttcaactactaatgacatttaccatttcatgccctttgaattttttttagccgttaaaaattttctctaaaccattgatattgttggatttaaaagcatttgtgaaattttatacagttttattaattttgtgattgtctatgtactaaatcatacttcctagactttaatatttaccaaatcttatctttcgaactttgacatgtaacaaaacaagtctcctgaactttcatacttgttagacttttcttattaaaattggcaaaaaaaaattcttaaattcaacaatcttaatagttcagagagaatttttaacggctagaaaaattcaagaggcaagatttagtacatgtcaaaagtcaagagacaaaaattttaattagcttttaagtttgagaagaagacatttatatatgattagacaaagatagagccctttaattctattagattattgacactagtttgttgttgctgtagtagacttgtgttgtgttgatttgtgtttcatattcagctagatgaagagatagaaaagagggagaaagggagtgagtgacccatttgaaggactctgcaaattacaatccacaaaattggtttatggcaggtaccacataatcattttgatttgatggttcagttgagtatgagtttttcttttaaaga

SEQ ID NO: 14526 - DNA, 13165 bp, Cannabis sativa
  modified_base (9815)..(9827): a, c, t, g, unknown or other
aaaaaaaaaaaaaaaaaagtaccctatgtaaatatctcttaaaaaatcgatctaatccagtagttttgactttcatccccttattagaggtacgggtagcaaaataatttttaacacgacacatgaacacaaaatgaattttacgagttaggatcagaaaaattagacgcaatttaaaaacaggtcaacacgatttgacacaaaataaaaacggatcaaacacgacacaatcaacttaacacgaatttgacacaattttttaaataaaacaaaataaaaaattattattaataatatatttatgtaaaaatatatatttagtgattcaatttttaagttaaaaaatttaatttaattttttttaaaaaaaaataaaaatatattaaaaattttatttatatatattaaaaactatacatacataaatatatatgagttttctaatagaatataaatctttcattttctctacaacttcagcttcactaatagcaaaataagtcaaattggatcaatatgaacacgacacaattttttacgagttgagttagggttgagaaaattaaacaccaggtaaaagcagatcaaaacgccttatacaaaatataaaagcaagtcacgtaaaatataacacaaacacgacacgatgatacattttgtcactgctaattaaaagtaaatttgatagtgtgataccttgtgaggcagcacaagtgtcccaccacatttttccaattatagcaaatggttaaaatcccaaagtagtataagttagtaatttgatcagatagattagattgaattttgaagtctaattgaattggatcgaatgatgctttttcaaattcaattactaattgaattggatcaaataagtaaaaaaatattaagttagatcaaatattcaacattacttttaaatgcaactaaatattaaaattaaataaaaattattttcttttcatcaagaatttgtgctgaaagatttaatataggttatttgttttttttaatatttagtatatatatttttggacaaattattgggttatcttttgattcaaatgtcttatattagtttcgaataataattgtgttacacttaaattatatacactatatatatacaataatgtataattaatcataaccacacaactaacacaattaaaaataataaaatcctcaaatataattatctatagtaaaaataaaatatacatcacagtagttaagcaaaaataaataaataatatatacatgactgtgtgaaaattgagtgcgattttcgtctgtagcattactcatcttataatgcaaattgtaccaatttttgctaaaggtgctcgttattcaaagtttatagaacttaatttggaatttttcagacatctcttctttctcaggttgatggtaatttaataaaatctcaactaaataaaattactaaataacactatttttacttcatatttggaatttttccacaagaaaacgtttttcatgatctgtacagatataatgaaagttctcatggtatctataccttctatataaattagaccacagaaactttcgtcataaacttaccaactcctcgcattccaaaggagagatggtttatgacatacaaagattaaagtagctttgaccataatgatagggaaactatattcatgaaccctccttctttgcaggcaaaactcaaatgtcttcatgtgactccattgaaggcgatgggccgcaaaatctgcagttaccagtgataaatgtgtcctctcataaatacaaaatttccaatattatgaaactagatcaccaactatttcacctgcaaaagtttgaaatgagcatcagaaattattatttcaaacattgcccctagtacttgtgtcattgaagcttcaagatacaaaattcttgttggcggaatacatgaaacaagagttaacagcaacaatagttagcatgtttactctactcattctttttgtcattcatgttcatctgggtaatgaagatccagaaatttgcacctcttctcttatcatctttaaccacttttattaatgtggactaaaaaccatccactcacatatcaaataaaccaatgtgagcatgtcaatgttgtattgtatttgtgccaatatatttatagctataacggtataaccagtcaacctgcatatgaaaaactatataatgtattgtttgtataataagaaactaaagaggcattaccatgcatggacttgattaagtcatccaactccgaaaagcacattgttccttgaactagagaaggctgccgatatacaaagaacgagaactggcgacgatcaggatcatttcttggttttgccatctcaactaatttcatgtgcccttctctgtgacaagtctctgcattttctccagctatagccaatcctcgatcccaagcagaattaaaaacctacttacccaatccacattataatatattaaggattttgtttttagtgaaacttctattttttaacctcctacgccttaacaaatagataatcaatatcatgcaaatgaacacacaaaataaataaataaataaaataaccctccacgattcaattagaatggaggcctacgaatgtcaagaaaataacacctaacattagaggtaaaaaaaatatgagaaattaggaccatcacctgccagcacagaccttctggatcagcgaaggcttcatcaatatcttggctagacatatgcaaaccggagcaaacgaacttcactgtcactgaatatttcttcagaacctcaaaaactggagagtatccatcctggtttgtagggttatagtatcccgaagttagctccgctgcatgactaggtgttctgtaccaccaataaactgcaggaacctacacaatggcatcttttaattactttcagtggcatgtcagtgatcctataagatcccttattaaaaaatcaagttgatcacaagtgatagccagttcggcttaaaattcatgtttgcctactttgaagttctgattgaataatttacacaatcttatatcaaagaattgtttataataatattaacaattttagacaagagatagaccaccttacaaggaacaacatagttttgcaaggaaatctgttgtatcattgttgaggttgctagttttacagatttcaaaataacttttcaaaaaggtagagtttgacagaagaaaagatgaaatgaacaagttttaaagagaaatataggctctaattctatagaatactagttccaggaatctctggaatctccaaattaactgttacaaaaatttttaagtaaatattctaaccatggagtaatttggttaagtgaaaaaagacatatctactgtgcatgacaaaggattaatgacatgaacaaacaattatagattgtagagaaaacaagattcaggtaaaaatatatcttacaaacataccttaacaatgatgtttgtttcctcaaatgcaaggctggcaagagacaaaacattgtctacgtggtctattaacatttggccataccaatggaggaaaaagcgcccataatagctatcgtagtcacctctttcacaaaagaagccagtttcatgtggcctagaattataatgaccagcattatcaggtcccctagcccataatgaatgtcctcgcaatttagctgctttccgcagactttgtagtaggtatttatcataacactgtacacaaagaattaacatatatttttaatgcacgaatagcaatacaagcatacaaaaatcctattgtcaacaaacttttcaatgtttccatgagatacgtgtacacacatatatatggtaagttcatctgcaaatgtgatgactaacgttcaacaattgtcttctaacaataaaaagcatgggatgagtgtcatgtacacaaatggggttctaacagatacctggaactcaccgacaccaggatatctccatcccattctctctggaaaagatggatacttaagctccccagatgccccaagtccaatttctaaagcacaaatgatgccctcagaaaacaagtcatcaaactcagttcgaaagcttctcattagatcaaaataaacctgcaaataaaatgccagtcacttagctaagataaacctacatatgtgtacgatgtataaccaggctcagtcaatgttagagacgtatacccaacatacaaatttcattcctttcctgatcatggttttatcaccaatcaataattaatttttagtgaaatttatcctcattacataaaaggtctgcatacaacttcacaaaaaatcaaataaattccagagaaagtagggaaactcgacataaaaaatcaatgtctcttaagcaaaagagaaataggtaccataataaagcttgtcaaactgagacacagtgaaattattagggtgattcctcttattttaattttcaaaaacaaaacacactaggtcccacattcatgaagaggcagatgagagttttcaggaaaatgattgtttaatttaagttgtttactttcctcatccgtagaaaaagaaagtccccgcaagcacttccatgaaaaaatgcattatgccctaatttttatttgttggagaacagcgtgtacagaataagttcaataagagatagatgcaataacaaaagaaaaagtacgaaggaaaaagtctacaatacctataatttggagaaaatagagaaatgacaatcgtccaaatgatgtgcaggaatttgtcatagttttgcataataaatataaaatctaattaagaaatgattgtttaatacctcaataccagttcttccatgcaaaacccgttctttgtcaatcccccatgataaacactcagtattcctcctcccttcacgatcagtgaagaatatgtcttgattttcctttccaatctccagaacccaccgaggaagagtgatcattgtgtcaccagattcacttcctccatactcatggaatgccattacaacctacagggtcgaaacattaaaaaaaacaaaaaattaaaaaattaaaaaaaaaacaaatccaattgaacataagccctctaagtattgacattgcaagtaatatgaattcctcctacaacctatcagaatctcgatcagttgactgaagacattagttgattatggacaatagaaagagacccagaatgaataatgctgattttccacataatctcgtggattccccttcaatctaatcgagtgatgaattggaggaaccaaaggagactgttgaatggctcgatttgataaatcaagttgtacaatcgggagatgttatttgtactgatcaagaattggtggaagagaagtgtgatgagaaggagattagagaggcgaaacagagttgggctgaggagattgagctaaatgatttccaattgaattcacagcagcaatggaaaaaattcacagaaggtaaggaatcttttaggaagcaaaattgacttaaaaccaattatgaaagatgtgaagaaaattactcagatggatgtggaagaggtcaaaatccaagctgcaaattggagctcagcagttgtgtgcatggtattgggagcaaatccttcgttttcagtgtttgaagggttcattaaacacacatgggggacattagggatagtgcagattgttcgaatgaatggtagatatacaattgtaaaattcaatgatgatgttactcgcaatttgaatctagaggagggaattctgcaattcgatcgaaaatctataatagttagaccttggacaactgatcttacaactttatgtcttattaaatcggtccatttatggatccaattacaggactcaggtatacactattggggaaatagttgccttagtgttgtggttagcacgattggtaagccaattatggctgacaaggtgacaagggagagatcaatggtgaagtttactcgggttcttgtggagatggacattacagaagaaccaccacagatcatcgactacttaaacgagcatgaccaacttgttgagcagagggttgagtatgagtggttgcctctaaaatgtaaatcctgtaatggttatggccacattgtggcagattgcagtgttagaatattagttgaatattagttgtaaaaattaaagtaaattatatttactagtttcctatttgtatttagtagttttttatttaatcttctagctttgtatataaacatatactaatctatagaatacaatatacaatttattcaccattttctacatggtatcagagtcaaactaaaaacttccgttgtcacccttttatcttctatttgggacctttcggccaatgtgtgccagttttaagtgttggaatttttgaccggtttcaaaatccacaaatttctcgcgtgtacacccataaatatcccgataattgactttgtgggattctttcaattgtcaagtccgaccctttggtctcttaaaagtcgttcgttatacccacacttttcaagcccaaacgtaaggagggtgtattagaattagtcctacattgctaatgtgtgaaaataaaataccatataagatgaatggactctactcctcccattgtcaattggttttgagatggaacctcatgcaccttatccatataccttaccaaattctaatatggtatctacaatatagtaagttgccttcgttagattgtgaatcatgtcagtttgctaaacatcatcgccttagttcaagtcctaaattcaataaacgtgctagtgttccttttgaattagtccattctaatgtttgaggtccttctcccatcttgtctaaacctgattttcgttattttgttacttttgtgtatggttattctcgtgtcacttgcttgtttttggtgaagaatcgttcagaattgttctctattatttatgccatttgtgctgaaattcaaaatcaatttaatgtgtctattcgtactttgagaagtgataatgcaaaagagtacaatctagtgtatttcaatcttatatggctcaaaacggcatgctccatgaaacttcttgtgttgatactccatctcaaaatagtgtagcagaacgaaaaaaaatagacatctccttgaaacagctagagctctcgtatttcaaacgcatgttcctaaatcattttgggctgatgcggtttctactgcatgtttttgattaaccacatgctgtcttctgtttttcatggtgaaatcctttataaaattctttttcccaataagccattatttcctattgagccaagaatttttagtaccacttgctttgttcgtgatgtttgtccacaggtaattaaattagatcccaagtttgaagtgtgaatttcttggttattcttgtcttcaaaaagggtatgtgttattgtcccaatcttaacaaatattttgtttttatcgatgtaatttctatggaaaatacaccttattttttgtcttcactcgctcctacttgttaggggaggatgatgatttattgatatgttctgtcacatcctctgcacctgatacatattttgttgagtctcttgttccttcacctacttcggtcatagctcccataatgcctacacctccaccacctccgccacttcttaggcctcctatagtgtacaccaggcgtccacttctcgtttcatgtcctgcacctgcatcttcgtcatcagattcacaactcaaagatgatcttcccattgcactacgtaaaggtaaacgccaatgtacatatcctatttcttcttttgtttcttataatcatctctcctgttcttcttacttttttttattgattctctttattctatcactattcttaaaattgttcgtaaagcaatgtcacatcctacttgggttgctgcaatgatagaagagatgaatgccttagttgcaaatggtacttacggcttggttactttaccttcaggaaaatgggctatagggtgcaaatgggtgtttacggttaaattcaatcaagatggaacaattgttcgcttaaaggcctgctttgttgccaagggttatactcaaacctataaagtggactattgtgatattttttctcatgttactaaattcacatttgttcgactgttcatttccatggtagctactcatcattggcctttgcattagcttgatattaaaaaagtttttcttcctagagatcttgggtaagaagtatatatggagcaaccttttggatttattgcttaggaagagtcaggacgagtttgtcgtcttcgcaaatctacataaattgaaacaaagtcctcgtgcttaattcgataaatttggttaggctgttgagaaatttagtttattgaaaagtaagtcagatcattctatgttctataaaagatcaactattgatatcattttgttagaggtgtctgttgatgatatcgctattactagaaatgatactgaaagcatctcaccccttaaatctttcattcatacctagtttcatcccttaaatctttgttagtggtgtctgttgatgacattgttattacaagaaatgataccgaaggcatctcatctcttaaatctttcattcatacccattttcattcattcataccgagatcattctatgttctataaaagatcaactgttggtatcattttgttagtggtgtatgttgatgacatcgttattactagaaatgataccaaaggcatctcatcccttaaatctttcattcataccccgtttcatacgaaaaatttatgggtgctcaaatatttcttaagtgttgatgttactcagagtaaacaaggatttttctgtctcaaagtatgtacttagtttgttaactgagactggaaaattggaagcaaaaccttgtaattagggatgttcatcaaatggcccacactgcacaaactaccggcaccacaccacactacaccacacaaaaaatgcggtttgaaattttttgcgatgcgaatgcaatttgcattttcgccaaaccgcacgtgtgtaacgtgagagccaaaatggcacgttacaagctaggtgatgcccacaagttggctaactggtgatcaaggggtggcgcatgttggtgtgcatggtggtggcatgcaaatgcttagtttgtatagtagtgtcattttcacaaaaatcttcaatattgtccggatcgggacgagacttagtattagccatttatttgggtctatgaatacaatggcgcaatcgaatatgagaaaccctgtaatttggtatatggtgatgaccatatgtctacaaagtaaaaattacatatgttcctggtagaaggctaaaaacttagaatgttctttaagaggggagtacttgatgtcaactctccaccaccccctggcaccttggtgctaagtgagctactactagtcagtgggactagtagggcgggcatatgaggaccatgaggggactcatgtctccatgagttggaatactcatggacactatcgagccgacggggtagtgcatctaagaatgctgctagaggttagcaagaacgtttccattggcttgccggtatgctgcttgcacggggcgtggcctaaacctccaaaagacgttgtggtgctccttggccacgaatctcaacacgagatgacacgggtagtcatccgtgggctagtttgcatatgcgcatgggacggatgcatcatgctgaaaaaagacaaagatctaacgtatgctactagtttagtggcttgtctcgagggcctgccaacatgcgtggannnnnnnnnnnnngaggattggaccatagacatatggaagtccttgggcgatgaggtagatggttcaaacagtatcgaatgaggcatgattagaagcgttagcacgtcagcttggcgttggcatcttgctacacatgctaccttggtcacgagtgactaggtgagcgatggtgttgggatttgccttatcatagtgggaacctatggacagtgcaagtatcttggctagagagcctcgatgcatggatgcactaatagacacttgagcatgactcggcatgagttgttcgagagacggaagtgtgcacgaggcccgaaaaataagcccattgttattcggatagttggaaggctggccttggcttagagaagtcaaggtgccgcacgagtgttctgctgcctaaaaaggtgagcccgtgacagttagtattagagtcaagttcatctcagtgaaggtgaacctggttggcctatcctagaggggatgtaggcatgtggaaggatcgagatagtctgtatgctggaacaagatgtcgttgagccaattaatttcctaaagtggatcagtagaccgatatggagttgaggttattttcttcatagaattactggacaccctagagaggagatagtgatggttgcttcgaattaagttcaaagatgctagaaagacaactaccacgtgcgattgtagaaaggtgcaacaaaatgttagaaactcgttggcgtagcacaaggtttgattgggtagttcatacagtatacttggtacattaggccgagttttcttgagtgacatcgtaagccacaagaggcgcttttgttgaaaaggaaacttgttggcatgggtatggaagtattgtaggggtcgtcagattcttgttagtcacgatagtggtcgagagtcgatgaccgagatggttcaaattgggataggcatagaatgcttcagttgctacatatgtgtgtcaagagggacacacatggagaccagggggcagatgccgcaatcgttataggatgatcgtacagggaggcgtttgcatgtgacttttatttgatccatatgagaagcacagagacagtcgagtgggatgtgttggcttgtaaaagcgccaatgggcgtaagtcacacaaaagtatcgatagagatgcgaagttatggaatgaattcgtcagagaagccaacagggctaagaagactgagcgcaagtgtaaagatagcgctagagtttgattggaggccagagggttatgccagtgagacttagtagtcatgtgagccttcaaaggtcaacaggagtgctagagtttgcatgaaggctagagggtttcatcattggaacttagtacaaagcctaagccatacaattaaatttaaggaacatccacatatattattctcattttttactttttctaacttcttattgttcatattattattaatatatatataatatgtaatatatgtatattgtattatttttaagtgaccatttaatataataacttgattagtatatatgttatgatgttaaaagtttaataagatgttttttctttttaattgttgaaaattataagactaatctttattatttcaatgtttgatatatagtgtaaaccacaccacactgcatttttgcggtgtggttttcgcgattttaaggtcttgcggtgcggttctagtttgaaaaaattgtaaaaactacatatgcggtttagtttgaaagaatagattaaacccgcaccacccgcactgcgaacacctctacttgtaatgctccaatgaatccagttgtgcatcttacacgtaatgagaatctatttgaagatcctaagaaatattttaaagtacccaagtctttgatctcaaactcttgagcaagtctctttttcaactcatcaagttcaccacgatcatctccagttaaaacaatatcatcaacatacactattaagatagctacgtttccttcctttgaatgttttagaacatggtgtgatctacttgactccaagtataaccatggcgcctcaaaaactctaccaaagtgctcaaaccaggctctaggagattgcttaagcccatacaagattttttgaagtttgcaaacttttccaaaaccaacacctttttcaaaatcagatggaggactcataaacacttcttctagatcaccattaagaaaagcatttttaacatctaataggtataaaagccaactagaattaacaacaagagaaagtaaaacccgaatggaatttattttcccaacaggagcaaaagtttcttgataatcaattccctttaatcagatttacataaaaggaatctgttaaagatggtaaacatcataaaaagactatcgaggacaatcagagtcacaagtttttggctggtcttagtgttaagtttgataagtgaggggaagaatcattgaccgcccacctccgccacctattgttgaagtcttcttggaggttagaagagaagagagttgaaagaatgttatgttgggaaaggttgttggagcaactgttgaaggatcaactttagctactactattggaggaggctacagtagatccacctagaataaatctgctgaaaagccacgggtctggcgtgatttttgcaacaagcctcgtcacacatgtgagacatgccagcgcattcatgggaaaccgaaaaactggaaaccacaagagaaatatgggcataatgctattgctaatgaggttgaagctctttttttttttacaaaagagctgatggttcatcttcatgagctgctcaaatccaattcacaatcatctagtatttctgttgcatctgtggcacaaacaggtatttaaaaatatgctcttcattcctttttaacttctactccatggataattgattctagagcttctgaccacatgacaaattcttctaattcaattgaatcctatatcccatgttcaggtaataaaaaagttaggatagtcaatggaactctcgcacctattgtgggaaaaggccttgttaaaatatatgagggaatagatcttcaatttggtctccatgtaccacaacttcattgtgatcttcaataggaggtcttgggcgatgaggaagactgctcagacagtatcaaatggggaatgactagaagcgttggcacgttagtttagtattgacatcttgccacacatgctaccttgattacgagtgactaggtgagcgacggtgttgggattttcttattatagtgggaacctaaggacagtgcgagtatcttggctagaaagcctcgatgcatggatgcactcatggatgcttatgagcatgactcggcggga

SEQ ID NO: 14527 - DNA, 11193 bp, Cannabis sativa
  modified_base (6077)..(6077): a, c, t, g, unknown or other
atttgctcgattttgaaataatcaaaattttccaagttcttctgaactttctctagatacttggccatttttaagcctttagcctagtattcttcgagaacttgatttactatcagttgtgaatcactatggcatatgagatttttaactttcaacgcttcaactatcctcaaaccaatgatcacaacttcatactcagcctcgttgtttgacgtgccgaattgaaatctcaaggcatagtgaaacttaaagccttctggcgaaattaatatcacccctacacccgagccatgctcattggatgcaccatccacgtataatttccaagtattcgcatctcgctaaacaagccgatttttctctagagttattccttctatcagaaaatctgccatggtttggcccttgatggatgttcgtgggtgataagttatgtcaaactgccccagttcaattgaccattttatcaatcttctataagcatctggttttgataaaacttgtctcaagggttgatcagttacaccttaatcggatgttcttggaagtaaggccatcacttgcgagatgtgtggattaggcataggcaagtttttcaagagggggatacctcgatgctacccctagtaacctcttactaacatagtaaacaggttgttgttgctttccctcttctcgcactcttccgtccattcaaattttttgttgtctcgaaattcgttgaaaaatggtaagcacttatcagttaacttcgaaatgaatctgttaagtgtaaccattcttcctgtcaaggcctaaaattcctttggtttggttggtgatggcatatctatcaaagccttgatcttctcagggtttgtgtcaatgcccctcgcgttgactatgaatccgagaaagtttcctgaggaaactccaaaggaacacttttttgggttaagcttcatattgtacttctttaatatttcaaagcactccgcgaggtctgtagtatgatcttcactctttattgatttaaccaacatatcatcgacgtaaactgccatgtttcttccaatttttgtcgcaaacattttgttcacaagtcgttcatatgttgccccagcgtttttcaaaacaaatggcatgactttatagcaataaagtcccatgttggttacgaagcttgtatgttcctgatcaaggacattcatttttatcttgttatatctagagtatgcatccatgaacgacataagctcgtctccagcagttccatccaccaactggtcaatcctttgcagtggaaagcaatcctttggacacgccttattcaaatcagaaaagtcaatacaagttctccaagttccatttggttttgggacaagaacagtattggatatccacgagggataaaatgcgtcgcgtatacagtcgttaaccaagaacttaccacttcctgcttgagtgccccttgtctctcaaaatccatgggtagcctcttctgtctcttggttgggtaattcagatcgacatttaatagtggcagataatcttagggtcgatccctatcatatctccatggctctagggaaaccgatcctggttcgccctcaaaaagcttattagctgctatttcaattgttcatccaagttcttcccaatgtatacacactttgtgggattttctagatctagaacaacctcttccaactcctcaattggtttaatttctttcatcttgaatccgaggatcaagatcttcatccttcttattgccttcttcagtcaagattgccattagtgggtgaccggcctttctgttttgcagctctatacaatagcattcgtgagctagcatttggtcacctcgcactactcccacacccattggtgtctgaaactttagagataagtgcttagttgaactaactgcccctagtccaattaatgctggtcgtcccagcaatatgttgtaagttgatggtaggtcgacaaccaaaaagtcttgcattatcgtggtggataaaggtgcttagcccaatgttaatggaaactcgattattccttgactggggacattgtcgcctgtaaatctacacagatttaccatgcaaggttttagtttggctttttcaagtcccattttcttcagtgtatccttataaaggatgttcactgaatttccattgtccacaagcaccctttttatccttttgttggcaaaatggatggtaattaccagtgggtcaacgtgaggatatctcacatctttttcatcttccttcgagaatacaatcagaggttcttcagtcttagctttcttagaaggtttcggagaaaaggcagactgctcgttcttcacttcctatacatatctcttttgggcattattgctttcctctacaatatgtggccctcccaagataactaggatatcctctccttcaagtagaggaggttgtaatccctagttgcttgggttattaggcggatttggatggttttatccattaccttgtcttttcacatattgccaaaaatgacctcgcgcgatgagactctctatctcatcttttagctgacgacagtcctttgtcgtatgcccaatgtccttgtgatacttacaaaattttgttgcatctctcttatgtctcgtatgcctcatgggctcaagtttacgaaatgcaaccctatgctcatgtgcgagatagatgttttcccgagttttattaagctcgatataaatggtgtagattggcacttacttgtcgtgcttcttttgttttttcttatctttggctgattccttagagttatctttcctcttttaactagaggctccaagattgtcagctttggtcgagacagtgcttgttgagacattgctgggtttgcttcccgagccaatctttaacaacttcatctcttttcttacttcctcttttcgaacaaatacttgagctctttcattgaactcagtgatgttttttactggacgaccttgtaggtcatcccatagctcacttccagcagtggagagatcagtagtgatccctacctgaagaggagtaagctgggtagtatcgtccaggtttctcacccttgcagcagctatgctaaaacgacttaagtagaccttaagcgtctcgcccggctgttgctttatgttagggagtgaggacgcttcgggtcacctatcccttgcgacctggaactgttttttgaagttcttagacaatgtctcccatgaggtgattgaatgatgagtaaatttgttgaacaagctgctcactgctccaactagagaagtggggaacaaaatatagcgtagattgttcgtaacattactggctcacatgatagtattgaaattatttaaatgcgacaccgggtctgtggtcccatcgtatgacgagacgtgagggttcttaaatccctgggggaatgcagtattcatgatgtctagatggaaaggctcgagctcctcatccgagtcatatctagactgctttccctattccccaacttgatacctcctgaatttgtcctccaactcatcaattcgcaattggataggatcctgttggcaaagatcaggtttttttggttcaagtgattacgaagatcctgttgttgctggttatagttgctaacggacctcgtcctactcatggacatcgtcctactcatggacctcgtcctgcacatggacctcgtccttgagtaactttctgttttacttgtgcctgtactctctcaatcagtattgcgatgagttctttcccctcctcgcattgatcgagtatgggttctcgtgcgtcccaagctaacacttgcctcatcacgtcctgtccttctcccttgggtatgggttgttgcatgccccctgctggggtttgtacgttcctcttccctgttaattcgagaaggatgttggcgatgtctcggtcgcgacccacctgtcccaggttgagtcccatgatttccctcgttctcatgggggatttcctgctccctggtccttgttcgccttctgttctcatttctatgagaaggcttcggttggtgatttggttgttcattctcagggggaccctcagtttccctaggttattcttcctaagcattttgaagattctcgtgagccatcttttgcctcctagtttgtgagctacgaggtctgccttgtggtcttctcactccaggatcaggttggttttgtgtgttgttatcctgtgctgccctggccgcggctgcctcacgttccaactcagcattttgtcagtttgcctcctccaagtggagcctgagatggtgattttccaactcgacaattggcacatatcttgtgggaacataggcaccatcattatcatattccataggttgggcacccccaacattgggttcttcatcccatgcttttgggttctggtcatcctcacacttagtcttccttgaaagtgtggaccgtgtattttggccacgttcatattgggtccttctggaacgagtggtccatgtagatcgtgagttgggaggcctccgtgagcccattggctcttttctaggacagtgagtggtctcttcaggatgagtatcaacattttctctgttatcagccatggagaaaggtttttcttttggttaggagggttttttttctgagcttttttcacgtaggctctcaatgaaaacatcaaactcttaacgtagatttttgttaactatattaaagcctatttcgtgattgatttacagagaaataatagtagtaaaagaagaagaaataacacaaagctttttacgtgattttgtaattaaaattctgcatagtccatgagtctatcttattacatttctctgatacaaaactagggttctttctcgaaaggatttttcatccttttttcagtgttttctaaccctatttatagttacataggaagacagtttattacaatcagattaatatcccgcaataatattttcctaaaattatgggatttgattacgccccatgtaaaataaatgcggctattatttgaaaattacacagctgtgatttatccacttttacttggtcaatgttgacgtggatttagatacgcttcaaagtatatctcgcagagtcacctcactaggatagcaacaataaccctgacatcgagctggagcttttcccatgtatttctgaggttgataatgtaaataccgtcatttatgctattgaacacataacgctccatctgacaatcgcagttcttggtgacaaggcgaacttcaacagtcaacatcatttgaatgtcagcttctatcttagagagctgactcgacagaggagtggatctcattgaaagatgtctgaagctgattaaaaaaggtactatgagtatgtcttcttatagcgagacatatgcctcgctattcgttttcaaatttattcaattgttatagttagtttgtacaatgtatattattcgctaagtgttttaacagtcaacatgtctcatctacatctcttcatacgtagcgaggttggtgcctcgcttcctattactgatgtcgtccttatgatcgtgtcttcatatacgaaatgatttctcatcaatatgtgaattaatagtttgcacatctgtgtctcgcttaagactttacagtcaacgagttatagatatactctatcagctctgcatttaatgagctattccattttaatatcttctaatataattgctattatattctttgattcatattctctaaggttgacacgtgtccttctctgaagtgctagtcgaatttctggtataacacattgcaggtctgtttgggcataaatggactaggcttatgcttagagctcacctagtttagaggcccaaaaaagtatttttttttaaattacacattattttttggataagttgagtaatacttttttgtatccatcaatcgaaaataccctcatattatatttcgttagaatttactcacttttgtgagtggattgtctaatataccctcaccctccacttaagtgcaccaaatgatttacattaacttaaggggtataataaggacatcatctataaaantgggtatatcttaaagaatatggaaataaaggtaaaaattaaaacatataaagtaaagtgagtatacaatacaatttcctctttttttttattataaaaaatactatattttttttaaataagagcccaaaaataatttttttttcctatagtccactctgattcattgttacattttgttgtaactatgatgattacttgtaataacaagtcactaataggttaaaatttattttttaaattaattaattataattaactatacaattagcaaaagaatattttttactttaaatattcaattagaccctttttataaattaatagttataaataatttgacttttatatttaagtctctgtctctccttgtaaagagtgatatgtccctcccagtagagagtttattgtgattgctcgttgtggttattttgtctattcttgttggtcctttttttgtgttctgtggtggcttcttctagtaaagaagactgttccttgtcgaaaaaatggatagatatatgtttagaggatgaagaagaacataaagttttgcttgaattttgatgataggtgatagtgggtcgtttgatgtttggaaaagtttttgattttcagatatttcaaaatattattggtgatctatggaagcctggaaaaggtatttttattaagatattggagcagaataggtttttcattcagttttaccatgagatagatattgaaagggtgattgatggaagcccttggacaaacgatcgtaaacaacttcccattgagaggcttaaactaggtgaatatccaaggttggttactataaatactttggatatgtgggtccaaatccatgaattgagagctagttttaaaacagaatgggctatccgagaagcggctcgttatatcggacaatatgttgattctgatcccaacaatttccaaggtgtatggcgtgactatcttagggttcgtgttagagtcaatgttgcttaaccattgaaaagacgaatgaaatttcgtaactgaagtggtgaagctttttacgtgtatttcaaatatgaaagagtctcgactttttgttttatttgtggtattatgggtcatgccaaaaaatattgtgagaaaatatatgatactcccattgagaacattgtgaaaccgtatagcatagagatgaaggctccaacgaggcgacaaagtttcttgactacctttccatggctgcgttccggcaagggtggttcagaaacaacagggcaaactacatcagtatctcctgctgttaatgcttcaacgaaattcaagggaatgacaaaagataattgtgatccacagagtaatcaaccaatctcaaaacttaatggccaatcccgtacttatgggaatcaaaagacttccttaaaagatcatgttaaattggtcaatgacaactcagctaaattctccactgaagagatagttgaaatctcttatttaaaaaggaaacgcatggctggtatctcacatgttgggcctattattttgacaaatggcataatggaaactaaggttggtaatgagcttaacaattcaacttctgtggtaaattcaaaaaccgtggatacggtgggtcttggtttccaagcccaccaagaatcatgagtaccatcagttgaaattgctgtgggcttgggaacccacgggcccaacaattccttatttacatttgtgtgcaaaagaaacccaagtttttatttcttagtgaaactttgtgtactaaagatgttgtggagcggttcaaaataagagtgggattcaaaggttgtttttctattgttgttaatggaaggaagggagggttatctatgctttggcgcatatcagatgagactcatcttactaattactctaataaccacattgatgtagaagttagaattccaggcgtggctaagtggagactttttggcttctacggagaaccaaacaggaacctgcgatatcatacctggaaccttcttcgttctatggcagctgagtcaagtcttccgtggtgtgtgataggggacttcaacaatattatcagcaacgatgacaagaaagggggaagaccttatcctgctactcttatttctagttttcaggtagctgtaatggactcccatcttatcgatttggagttacgtggttatcagtatacttgggaacgcagtcgcggtactaatagaaatgtggagattcgtcttgacagagccatggttactcaacaatggttggatatgttcaatgaggtgtctctcactaacttggctttttcatcttctgatcattcccctatatttcttgaacctaaaattatggtcagtgggactactatggggctgtttcgatatgaaaattcttggatcagagagcccctttgtgctcaaatcgttactgatgtattgcactctaatcagcacaagcatattatgagcaaacttgatttatgtggcaagcagtttgctatttgggggcgttctatttctggtaatttaaagtctcgtctttcaaagagtaaacagttaattgctaaactgaaaaaattccacaactactgctagtgttgaaagttatgtgcttgaaaaaaccaattattttgagattcttgcccaacaagaagtgtactggaagcagagatcaaaacaacattggcttcattcgggggataaaaataataaatattttcatgccactgctagtgctaggaaaagatcaaaccaaattcaccaattacaagatgcaaatggtgattggaggaattggacaaccgtcctggataatgttatcaatgattattttctcaatctcttccaatcgccaaacacctcttcccagcttattgttgacaatataaaactttcagtcaacgcaaatcacaatgatgcactcttgcaatcgatgcgtgatgaagaagttaagtctgttgtgttctctatgcatcttgacaacccggtcctaacggtatgggtctaggtttttttcagcatcattggcaagttgttggccccgatgttattcacttagtgaaggaattcttttttttcggagctttgcccgttggcctaaatgacactcatcttgttttgataccaaaaaagaagaactttgttgccatgagtgatcttagaccaatctctctttgtaatgttctctataagatcatctccaaagtgcttgcaagtcggatgcgagatcttattgatgatatcatctctgatacaaaaagaactttcatgccaggccgtcttatgtcagaaaatgttatgatcgcctttgaggtaacgcattacttgaaacacaaaagaaaaggcaagaaagggttcatggatctcaagcttgatatgagcaaagcgtatgacagagtggaatgggattttctaagagcggtcatgcttcgtatgggattttctagtagatgggttgatcttattatggcttgtgtttcaacggtttgatacaaagttgtgcatggtggtcatattttagagcctatttgcccgtctcgtggtattcgacagggtgatcccctctcaacttttttttcattatgtgtgctgaaggtctctctgctctaattcaaaagtttgaggctaaaagaataatccaagggtgtcgtgttgctcaccttgctcaatctatcactcatatgttgtttacaaacgatagctatttcttttgccaagcaagtgagaatgcagctgccagcatctctaatctacttgatttgtttgagagtgcttctggtcaaaaggttaatccatcaaaatcttcaattttttacagtcccaatattgatggcacaaccaggcttcgaatttgttctactttccatatgaatgaagctattgagggtagcctctaccttggtcttcccaacataatttgccgcaacaaaaatgctattgcaagagtcaatagttgggatggaaaatttttatctcgtgctgggaaagaaatcctcctcaaaactgtcattcaatcgcttctcacatacgcaatgagtgtatttcttttacctcttggtacatgcaaggagatagaaaaattaatggccaatttttagtgcaaatccaacactagtaaagggcgtggtataatttggatgtcatgggatcgacttgctaagcctaaagaagaaggaggcatggggtttagacacttacatgactttaatcttgccatgcttgcgaaacaaggatggcgtctcttgtgtaatcccgactcacttgcttctagagtttataaagcaaaatacttcccacattccgattttctttcagccaaacttggtaacagtccaagctttgtttggcgtagcatttggggtgctcaacatgtggcttgcctagggactgttcgtactattggtgatggtacaagcacaaacatattgtgtactccttggctgccgaatcaaaagaataagtgcatcacttctagccatccaagtctgcaacataactctgtcaactctctatttcagattaacgattgcgcttgggacatagatgtggtgaccaatttgtttccaactaatgaggctaatataaccctgggcattccattaagtagaacagcaggggccgacttttggtcttggatagcagaccacagaggtctttttactgtgcgaagtgcatattcactgctacaacatgaaaaaccagcagcccctacaccagataattcggggttctggcgtaaactttggcacttgaacatcccactgaaggtgttgaattttttggggcgtgttatctccaattctctgcccacatgtgtcaatcttgtaacaaaacatgtgcctattttaagccaatgtctagtttgtaaaatgcacccagaaaccgcaatccactcgctacttacctacaattttgcaaaagcctgctggtcactatttggctggccgattaatgttgctgctccttcaagttttcgcagctagtttgagaatatgttactgttttgtgatacagagcaagtatgtcgtgcctctatgcttgtttgggctatatggaaatcatgaaaccaagttctttagaagaaacgtaaatgtactgtcaatgatatttttgttgggttttgtgcc

SEQ ID NO: 14528 - DNA, 10050 bp, Cannabis sativa
tttttttttaaatatattaaataattatatgtttttaaaatttgaaaattataattatatatatgtatattaaattattttatcatgtagtaaaataataatgaagaaggtaactaaagatgataataatatccatgggttaaaggcccatgattgtcatgtgataatgcagcgattacttgcagttggtattcgtaagtttctaccaaaatcaatttcaggcactatttcaaaattgtgtaacttttttagacaattatgttctaggactttaaatgtgaaagatatggagaaagcacaaaaagatctggttcacatactatgcaagatggagttgatctttcctctagcttttttttgatatcatgatccatttggtgttaaatttgccggaagaagctatattgggtgggccaatgtttatgagatagatgtatccttttgaaagatagatgaaaaaattgaaaaattatgtaggaaaaaaagctcgtgcagaagggtctatagtagaaggatatgttgtagatgaggctttgacattttgttcgatgtatttcaaaggcatcgaaacaaatttaatttccctgatcgcaatgaagatgtaccttttgtcccacaccaccttaaagtgtttgaatctcaatgttgtcgattgagtaagagaactgtgaagcctctcgacgaaaagactagaaggatagccgagtggttcatattggagaattgtagacaaatcgatctttatatggagtaagttaattagtatctaatatcttcatgttctttatattgtaataccattcaactatactcataacgtcctactaattaacagggaacaccttcttgagatcaaatagagaaatccaaatgctaatcataatctcttacataagaaagagttcccttcatggtttcataagaaggtaatttatagtggataattgttccctatcaatgacatccttctgattataaaattcctcaatgttaattcatattttttgctctattcagatatatgagtcgcatcgacttgggtcattagagcatggtgatcaattacctttagcatctgggtcagatcatttggcatatagctatgaggtaggtatggtcaatggggttcgatttgttgcatacaatcgagataaagatcgcaccactcaaaatagtggagtgttagtcgctgggacagatggtttcaacttttatgggcaatttgaagaaattttgcacatgtcttttaatggctcatattcggtggtattatttcgatgtaaatggttcaacactgatccaaaaaagaagaaaatatttactgaaaaataatattactagtataaacaccaccaatacattgtataaagatgaatatatccttgccaaccaagcgaaacaagttttttatcttgatgatctggtgagaggtcaaaactggaaagtggttcaaaatgtgaatcatcgacaagtttgggacaatattttacatgaatcagatgagattaatgatgatgttgatattgtacatgacacaaactcatctaattttgaattgtttgtggatcttggagatttggttatgcaacaatctgatcaaccacgaacaccgattgtcaatgtccctcaacgctcatcgattgttaaagatgatgacgattttattgactacggtgaagatggtactaccgaaggcgtagaagtaacaaacgatgaggatgacctattgattgtttatcttagtgatgaggagaatgatcacgtgtgctcgatggacttaaatttgattagtgatgatgatagtgactattatacttagtctttatatttctataatgaaaacaatacattgagtattattaataaatatgtttcaaagtgtatttcattaactttgtttgttgattgaattaattaagaagtgaatgaacacaatgcttggtttgcttcagcataatactaatataaatgtatgcacattttctattatttgatttgatattgaattaagttattttctattttgataatttgtagatagttctcgaaagtagtttaaagcaaattttattaattaattaaattggaagactgttaatgctaacactagtttgggctacattgtatgtatactgttaataaaaaaatatattgcatacttaatgacaaaattgcattcttagtataaatgtctgcagatattgctagcaaccacggtggagatggtggcggtgaggccgcgctgatttctactactatcccaactttgtgtgagtcatcaggtaagttaattattttataatataattatattaacaaaaaaaaaaattaaaatatgcatgttaatgtatttattttggttattcacttggcctagtattagacttagactttttaggttagagttaagatcctttatataggaaagcttaaaccctaatttaaaactgaaattcttagatacttacatattaaattgattaaataaaaaagactgaaatggccttttaaaatagaactcttccatccaatttgttgggcttttaagggtctaatttgtaggtagcttgtagtccatgtattaggctgtacaaagaatcctaccaagtcaatcttggccggccgtacacctatagggtgaggcctagtcttccatcttgccaggatttggtaggtcttgttcctgctagggtgtggcaggtcatgttcctgccagggtcttgcaggtcatgctcctgccaaggtctgaaaggttatgttcctattagctttaccaagaggaggccagcctttggatgtggaggctagcctttggcaagtggaggacagctttgtacaccttttccttgtagagttcaggttctcttagtctaaaagtcaccttttagccggctcgcttgtgcccagatcctggctagccatacaagctcgccctaaccgccctataggcttctcttggccgactaaacatgttattacaaatccttgatagcttgcttcactcctttcagttgctacttgacacttttgccttatcttgtatggagaccttgtcttactagctatttgcatggctgtattccacatatactctatcttggtttacatggacatgccatattaggtagacaaaattttgaataacacattggtcccaaaaaattttgactagactaaacacaccaaagcatagctttatgatatggcaagcaatacaagatcaattgaagacaaaaaaaaaaaaaaaagacttttgaaaatgcccatagttgactcttctgattgccttcattgtggtgcacatgttaaaacattaaattatttattttttaactgtcattacaatgagatttgtttttaacatattagaagttcgttgaattggaacatacagaagaattctttgcttcttctctcgaatggattgaaagaacaaatataagtagctttatgaagcttactttttcagcagtggtagcagttgtagtgtactatatttggctattgagagatgatgttttgtggaatcaaaagctttcaagatcgaaagtatgtgtacaacaaattaaagtgtgtaaaaaatagaaatacaagttattgaccatcaaaagtgagccaaattaatatataattggtatagtggtctttagaagattaatatatttaagtaattagagacttaccatgtcttattctttgaaatggatgttatttgtaatagtttttgaagtaatacagcttttctatttcataaaaaatataaaaaaataatggtgtaaatgaattattgaaattattttttttatatttattatttatctatataataattttctgacagatttatctatactaattttgatatatgctaattattcatttaaaataaggaattgtttctttaataataatagaaaattattatatttcatgtccatcaatgctagacacaaaaagacaatgccaacaagtctcattttcaagtctaacaatactggacattactatttttgtatgtcaacattgctaaacatgaaaaatacaggtttcatgtctctagacatcatgtccaacacaaaagagacagaaaaattatcatttccagctttgatggccgtataagagattttttatagtagtgattatctttaacctttcactaagcattctaattctaatcttgtaaatgacattacagcacgagatcagcctaaattcacttacatgaccttcaaaatgagattaattataggagtgttaatctctctacgcaagttgaagaaagtaaaggatagtaccacatacttcatccttaatcaaatccaaatggttttgaaagaaaaaacttgaaaccatccagactaagggctttctccccgaaatagcaaacataactttatgaacatcttccttgatgaacgcaatactaagaaattaattacggtgaactgaaatcgtagcacctcttttaacaatgtgatcattcacttctctcatattcaccatagcatagtacctaaaagagtaagataataatctaaaaacacttaaagaacttataaattatacgtcttctaaccatctttatctaaaatagcataaattgtattttgatttcttctttcttatagacttcgatagaaaataacagtgtattctatcttaaaaatatcgtatttgagataatttactactaaattaattaaatcttaacaaataaatatttttaattaataacttttctataccattttttaatacatgtattttattataaggtttatataaatacttattgtttagattttgcggcttgtttattagttagctatttcatatataatatacgattacatgtcttatttttttaatataacaatattcccaataagtgagctaaaatagcttaattaattttcaaataataaagatactgtgataaaattaaatttccaacaagtgagctaaattttagttattttacaaattttttactagatagtatttacataaaagtagagataaatattcattcagctagaaatatattctattattatttgtttaactttttttatatatgtattattattatattttatttcataaaatgtattaaaattataatatttatataatgtagataaaaaaataagtaagttgatatatggtgtgatgtaaaaattaaaggataaaataaataaaataaaattgctgtgatatatattaaaggataaaattgtgagactatcaaattacccaaatcaatgggttcagaaagcaagctgttcactcccgaaatcataaatctctatatttatcatatacatagatatagaaacgaatatgcacatgcatgactctggcatattacaacggactactgcaccattgaatttttgtttctatcaaaaagaaacttatgaaaaacatatgcacttctaggttattcgtaatatttttctttttctagcctacaatacataatgtaatgcatatattctttcagtctatttttaatattgaccattacaaataaatattttatgtgtaaatgggaatatctatgtatatatttatgtcgtcattgacaaagctatatagtagtccatgcaaataatacgtgtataaatattaactataatgacgaaaataattatacttatataataaaattctctgtagaatttaacaatccgtttgatttactttatgctttaatttatgtacaagcttttaatcgtttaattatttgctttataatgtttgatgaagaaacaaagtaaacgaacaagagaaacaagtttgtgacatatttagtttaattacctttctacaatacttgccggaattcttctttaaagtcctctataacgcgagaatgaatatgtagggttttgatcagtaagaataaaaatggtgcaatcgatctattatttgcacctcacgaagacatgtagagtatttgagctaaaatatcatctattacatatgtatacaggaaacatttgtaatatattaatgcaattatacaatgcaagaagtaaaatacaacaaaattaaaaatatatatgaggggaatattagtttaaatctaatattacttcttatatgtatatatttttttatataaatacaaaacgtcaaatatttgcaattctactaattttttatgatgattttttttttttaaaaaaatattattttgctcttacttttttaatctttttaagaaaattcaataactttattcatattttacaatggagttgcttatatctttctattgcttaaatacgtataggtgtagaagtagtaacttttttttatataaaggggtaatattttacaaaaataaaaattagtaataatggggggggaaagaaaattttcaactttcttaatttgtaaaatggtgtaaattttcattattaattttttttttacgaaattaaaattggtaaatggtttgtgaaaataattttatttattttttctaatttgtaattaaaaaggtatgtggtgaggagagtaaaagaaactagtgccaatagaagaagttaatatgacgaattgtgaaaccattcctgtatagtagtctcaaatttaagaaaacactagcgtagacacgaaaataatcttaggttacaattaagggactctaattataccaagttttgaattttagaaataattaaaacaaaaacataaaagagagagagagagagcctttaattacaataatgaattaatgagaagcatatttatttgacaaatctgcaaggagagaaggagccatgacatattaataatacgcttaaagcttcacctaacactatatatacgttataaattacattatccaatggactgcaaaggcacgtgtctcgtaaacaagcaagctggaccagcactcttttgccatcttataattagctacactactcaagattattaatttcatgataactaatattaattaattttggaataaccatttttttcagaggggttgcaggaccagagaattattaattaagaatcaagtagccaagggggtatattggtcatcatagggatatagatttatatacaatatgaatatatattgttataatttaaatatatgtcatatccatatttattattaactccttctccttggttttgacgtccctttaacacgttttacttatttattactctacccctctatatatattggcattcatgttcttactttcccaaatctctttagggcatttctctagcttataacttattattaagagatcggtctcatcttttgataatcaagttctctctgtatctcatcatcatataagctatagcttaataagggctagctcttctagtatttcggtctttggaatcaatagaaagaaataactaaaatgggaaggtctccatgttgtgagaaggtagggttgaaaaaaggaccatggactcctgaggaagaccagaagttattggcttacatcgaagaacatggccatggaagctggagagccttgcctgctaaagctggtgattttccaacaaagcatttaaaataaaaaaatactattatatatataagcttatgatcaatacacacacagaccatatatgcaaatatatagtactagttttgttcgtcttttcctatatagcttataaaattttcttgtgtatgttatatttgtagggcttcaaagatgtgggaaaagctgcagactgaggtggacaaactatcttaggcctgatataaaaaggggaaagtttagtttacaagaagaacaaaccattattcaactccatgctctcctcggaaacaggtaaactaaattaaaagattcaaaaagtattactctttttttgcttatttgtttactttctgaagtttcatattgtgtatgtaataaatatatttgtagtaaatactaactacatatatgatgactactgagtccgtatattaacttttcctgccacactgcttaaattgttttgtagttttcttcgcagaactaacttcataacagttacacacccacatatattcactgcgtattatattgacaactcaattgattaaggaaaaattattcacgggctacatatctatgtacaactgtatgtatatatgatcagtaatattatacatctaatcattacttacacagctaaaaataagagccctataatatttgtatcgtacaatattaattaatcaatatcgttgagataataacttcacattattatttcttttttctgaaccctttttttgttattatttttaaaagatggtcagctatagcaactcacttgccaaagagaacagacaatgaaatcaagaattactggaacactcacttgaagaaaagactgaccaagatgggaatagatcccgtcacccacaaacctaagatagatgcccttggctctggctctggcaacccaaaagacgccgctaacctaagtcacatggctcagtgggagagcgctcggctcgaagccgaagccagattagttagagaatccaagctgttgctaaccagcaataacaacaatgccaacaacagcatggcactaccacatcatcacaaccaccaactgggctcggctaatcatttcatgaacaagccaggcggagccataaccccaccaccgtgcctggacgttctcaaagcgtggcaaggcgcgtggactaagtcgagtaacagtagcagtcgagattgtaatactctcgcgggagtgatggctatggacgaccttgaatctccaacgtccacgctgaacttcccggatgccaaccataattaccctaggattaataatcaaactgctaccacagttggattcggtactaatgataccactgctgatcatgacggttggaagtcgtgctacggcacgacctcagttaacaacacttctacaaacactaacaaagtagtagtagcagcagcagcagcggcaacgatgaatagtgatgataatcacgaccacaacagcgacattaaccatatggtggctccacctaccccgccggagttcaaggagagaaatatggaacatggtaatacgatgtccttgcaggacattgcgttcgcttgtagtgaaggaggagcctggtttgtcgatcatgggtttagagctgcagcggccagtagcgacggtgtggctgcagtgtcgaatatcatcgaaggattcacggatgctttcatgtacaactctgaggagccgaactcggcggacgtggttggagatggagagaactcaaacgactgcggtggggccggcggagaaggaagctgtggagctagcggcttatttgaagagaacaagaactactggaatagtatactgaatttggtgaacacgtcaccgactgggtcgcctgtgttttgatattagagtttttgttgtagtagccagtaatggtaactattatttcttaatgatttgtttaattagtgactatatatagggctagtcaacgattatcatagtggccttattaaacatgattagcaagttagtgtactaataatgatggaaaactcctagttaataataataataacatgtccttttttagtttttaataatttcttaaactcggaacgtccaccatctatttatattcaaacattaatcatgacttttaacattttgcctgagaatatttattatttgcttaatcccaataatttcaatattgaaaaattgtgatatattattatatttttgtgcaacattatatgaaaactgatcatgatcagcgcgatttttgttattaaaagtatgtacgtgaatataaaaaggtctgatgcatgtaacaaggaaaactatgtagatcgccaatttctttttagtaagaaagaaagctttttattcaaaacagccacaaacatgcaaaataactgctgcaacaactacccatataacaactaccacttagtaattacactaatatatgtgatggtttgagaataaatttgtattggtttaatttaaaataggtggatatgtaggattgtg

SEQ ID NO: 14529 - DNA, 2487 bp, Cannabis sativa
tccctgcattgctgttatatcatctgataaaattaatttatcaggtatgaaatcctcaaactgaaacaacaggttttcgtcatctaaaaccaggttctctcctataccttgttccatacggaatggattcaaatctcgcccttctaaaggcatgccaaggtctctccaaccaggactgtatttcactaactttccttccatagaagaatctggctctccaatttgatgctgcttctgtgtcacgaatttcctctgtgtccttgaggagcttatctctttctgtggttccttctgcttaagtctaccaatgaatgatgggttctgaagcatcttcgagaagaaagaaaccatctgcttctgtctttgctcagctgactggatcctattgttcactgcttccataaagtgaacagtacccctctgctgctgctgcaattcaacaacctcctgcatcaatgtactcttctcattcctcaacttctctacctcatcttcgagtccagatttccctgcttcagaagaagatccgatatagcttcctatctgttgctgggattgatgtgatttgcgtcgttggatgcttttcaaaagatgtttcttccctcgctggaaagcttcatttgcaaactcccatttatcagtatcaatcttacgaaacccctgaaataagatacccaaaatagtttcaagagtgagaatgaatggtaatgaaatcatttgttcaaaatatcataatttacaatgatttcaacaaaacaaaagcatacaatgagctgaccacattatataatctgcaaatcagagacaagctaatctaaacttgaaattgcgttggcgtcgacagacagccaataaatatttcataggaacctgaaaatctacctgcagatgatgaacttccctttcctagtactcataggggaagctgttcctttcttggcgataatgaaaaatgcagctccttctcctacctttgtcttaaaactcataacacaattcttatgatatatggggaaaacatgacaagttttacaatttacaattacattaatgtgatacatgaggaaacaagcctctaaataacaataataacagagaaaagagagagatggtacatttacaaatacctgttaaagtatagctacagaaatcataatgaacattacataactagccagcaagccataagatacaaataaattccttcaattaaaaaatgttttactgaaaaattatagtgttaaaaggatacatgttcatcatcatctgaccatggatatcaagccatacacatttacaagttaattacatcttttgaatgaatctttgtcaaacccaattacagataaacaaagaagaataccaaaagaaacacaattgaaagttacagaataaaagaaaaacaaaacaagtttacaaacagatcatagcggccattacagactgtgttattaaattacccacataagtattgagctgccgaacaaaactggagaaattgttgtgtttgaaattccgtggcagaatgattctggaaaattccacagggtcccagacgacgaagctcccaccagtagaaccccacgagataatcgggtcgagagctgggtcgtccacaagatcataagttttcgacagaaatggcggaattggattaccatgtaaacattcaagaggccgagggacttcaacaaactccgtcccagtaacagtaaccagagctccagcctctcctccagtagaagaagaaggtacagtttgggctctttcaccaactgggattcccgattcaaactcgaaaacaggggaagatgaaaatggaattggcaatggagaaaaggcaaaggaagccggagaatgagacccagaaaatccaacaccctcctccacaaagaaagaatcagatagaaatggttgagtttctaaagtctcagacatcttcgaagaagagtcaggagaagaactttcatcattcggattcatggattgaatatatcaacacccaaagaaaaaaaacacgaaaaggaaagtttaggtcggtgagaaatgtggattggtaaatgagtatataaagacggggatggggtccaaatgggttgccgacaaagtgttcgataaaaatctccagagaatggaaaaggcggtgaaactcgagtgctgtaacagtagtagtagaaccatcgttgatcgttccgagccatgagatttgaaaagggttctcaggggaaatgtggtgtggggctaaaaggttctttagagagagaaagcgccgaccttgatggagagagagagagagagtgagactgttagtgtactgtagttgagtgtggtgacagttgggcccattgggaccaagatattttgggttggcttagtggttgaaattttgaatgtgatttcatagggtcaaaattcttagccatgaaggttaagaccttaataagagaaagagaaggaccaatcagaattgaggaagaggtaaacttt

SEQ ID NO: 14530 - DNA, 3321 bp, Cannabis sativa
  modified_base (481)..(481): a, c, t, g, unknown or other
ttcattatcaaaaagtttacaataagatggtaaacaagagaaagatattatatataattatatattaatatatttaataggcacacatgtatatttattttcgtttgtacaatacataaataaacacaatatataattaatatatatttgagaaataaattattacatgcatggatcatcatctaaaaattaaaattcattgtactatattttagctgtcataaatatcattgtctctcccatttatatattgatatatataatatttatataaaatatataacaataattaagttaataataaataggcacctcatgtttagttgtagaccacaaatcagagcatgcttcttttatgggtaagaagaagaaaattattgcattaaattcattttgctgaaaaagccaaatacctctttttgccatttcaattaataattactcactttatcaacaacaaatatatatataaatatatatntatatatatatattataaaaaaactatacaacatggcataatttgattggtgagaatatatatatatttataaatgttaataaatgaattaattattattactaatatagtacagcaagtcaaaattaattaaccactactcttgtgaaaaagcttaatttataggtcttttttgcatggtatagaagtaaccatattaataacccatatatataaatatataaactatatataagggtgcttgtacttaatgagtctgggatacaacaatgcactctttacttattttggtataattttttttatattcgtgaatgttatagttatattttataaaattttaataaatttaaaataatgtagtataaaaaacaatatttaaacagtttatttcacacttataataaaatagttatacatgtaacatactatttaaactctgtttttagtgtgttaaatttttttcgtaatttttaaaattttacagaatagtttaaatactataacgtacgtgaccataaaaaaaatttaactaaaaaattatttggaatactaaaatatataaaagtgcatccatacatcattttaagagaatatattataaaaattttatatatgtatatataacatgtaacaccgaaagttgaatatgatcacatgttttcatttaataatccaaaaataaagagaaaaaaaaagtctcactcttacacacccaaaaacacagccattaattatagttttgccctaaaaaaaagatatgcaagactttcgtgatacatggccaatattacacacacatatataaacatatcttttgtaatttcttatagtaatcatcaaagttgattcattagttatttcaaggaaaatccaaaagttttataccatgtatatatttataaatatatatatatatatatgtgtacatcatgtatattaatttgtggggctacatattaattaatacatatatatatatgtaatatttaattctcaccctaggttgcgtgaacagtaattaactatgaaaaattcaaatatatatataaaaaataaattagattattaaattctattgcaattaattctaagaaagctactatggatatatggtagtttttacttctaaactttagcttcaatgctttattttctttattgggtcttccctaaagtgacctaaaatatcattaaaattatatatatatataataatatatataaaaatataaatacatatatatatacacaccaagacacgcatgatcaagtaattttatatttattgaccaaatatataatgttggtaactataacatatatataaatttatttatatatataacttgatcaataacattaatcaacaataaattattaactcatgagagaagaaaaaaaaatattaaaaaataagtactccacaaagaaagaaattagcttaattagatgaaattaattaacccaactattaatacaagaggttacaataataatgaaaaaaagtgaaaaagattccaacttcttgaaatctcaaacaaaagcatatataatatctgcaattatgaaaattaattattgagaaaaccctaattaattcaacaagggccacagcttccttttattaatcttttcattaattttctctaaaaagaagctgtgtacacttattgtcaccaccatgaaaatacaaacatatatataaatatatataaatagatatagtattaattataattaatataattagctagggttagaacaatataggagacaactccatcaactcctccacttgactagccgttgtagcattactagttgtacttgtttcatccaatagccatttctcaagaaaagacaatggaggcttattattatgattattattatgatcatcatcatgatcatgattatgatcgtgattatgattaatcttttcttttcgatcgtgatcataatcatggtaatcatgattatgatccatatgagttgttgaagatcggtcccacaaagaaatattattattattattactaataataatattattcacattattttcaaatgacaaaatagactcgaactcttcatgagataccaaatcaccactgccgccaccacctccaccaccatttgttagtagtacctgttgctcggtttttatcccgttgttgcttggaggtactaatatgctattgttgttattagtactttttggagaagatctcatccaaccttctagtaaacgagatatgttctcggtactagaagcataaattgtagaagaagatgatgatgaggattgcttcaggctcagattattatctgatgaccctctcccgctcccgctcccacccccacctcctccaccactactcccaccaccatgactcgtggaagtagttggaggaggtggaggcggaggaggagggggagttttgttagatagaaagcgatgagatgatgatgttgttgttgagtgatcatgagacatattaatatcattattaggttccaaagctgagtgaaacttcttgagcttcttcttcaaatgagtgttccaataattctttatatcattatctgttctttggggtaggtatgaagctatggatgcccatctatatataaacataaaaaaacaaaattatttttttttcgctaaataatttagacatcgattttaataagtcaagataaattaattcacaaaattttagacatcaattctaataatatgtcatcatacgacgatgattattattagtaataaaaacccgagattaagacatcgattagccaatgaaaaataagtttcttatttcgatcgatat

SEQ ID NO: 14531 - DNA, 6958 bp, Cannabis sativa
tggtgacaatgcataatagtcattagccccaacacccccatgttccaacttcccaaacttgtctctcatctcatgtccccactcttctactttctataaatatacccttttccccttaacttctcagctactcctcatcctaactcttcatctcatctcatctcatcccaaaaaaaaatgtgttcagctaaaccaaaatctcagcaactcactatgcctaaaatcaatggccgccctgttcttcaaccaacatgtaatcgagttatttcgagcttggaaagacgatcaccatcgatcaaaaagagctcaataaagtctccaacaacacctcctgtttctcccaagatgccatctccaagaccaccagctatcaagagaggaaaagatgttaatgaaactagtgttacaccacttttcatgactaaatcttctatcaacaataatgaagtgatcaagaaaaagaaatcaaacaagttaagtagtgatcatgttgttgttgttgttaatgttcctattgagagttgtttgttagttgaggcaccaggaagtattgcagctgctaggagagaacaagttgcaactatgcaagtacaaagaaaaatgagaattgcccattatggaagaacaacatctaagtcttcttctaaacccgatttttcgctttctgctggtgctgctgctggtgttgttgttaatagagaacaaaagagatgcagttacataacacctaattcaggtatgtatacataagataacacttaaaaaaacataagtgataacacatttttaatgatgattgatttgataacaaaaaattgtctttgcagatcctatttatgttgcttaccatgatgaagaatggggtgttcctgtccatgatgacaagtaaataacccttttttctctatgaacagaacatgtcacacttttcaaattttttgtgtatttatatatgtgtgtttttgtgtgtaggttgttatttgagttgttgttacttactggagctcaagttggatcagattggacttcagtcttgaaaaaaaggcaaacatttaggtaagctttttatttgatttgaacacataagtaatctattttcttttgttgggctatctaataatgttggattgtgtttatgtagggatgcattttcaggatttgatgcagaaatagttgctaaatacaatgaaaagaaaatcaaatcaatcaacacagaatacaatattgagttgagtctcattagaggagttgttgataatgctaatagaattcttgaggtacatttcatttagttacatatttgaatattgggtaaatagcgggcataaactcactcgttttttagtgacatgagtacttaatgttacaaaattataattttttttttcagtttcatcggtacagactttgttattgtcttaaataaaaaacatataagacccaaattttaaatcattgggtctggacggaaagtactgatgaaattggaaaaaattatatttttacaaatattagataaaaaattattgagtgtacttattaagtagtattagtgatacaaaattaagtgtttttaaattgacttttgtgttgcagattaagaaggaaatggggtcattggataagtacttatggggatttgtgaatcacaaaccaatctcaacacaatacaaactatgtcaaaaaataccagtgaagacctcaaaatcagaaagtataagcaaagacatggtgagaaggggttttaggtttgtggggccaacagtgattcattcactcatggaagcagctggcataacaaataaccatttagtcacttgcccaagacaccttcaatgcattgacttggcctctaagacttactctatgaaagaaagtaactagaaagtaaccaaatgagactctctcaactcaatattgtattatagtatatggtgaaagaaaggaaaaaaaatcaaagttggttaatttgccaatttgggttagtttagtgtaataatagtattagtttttaggagatattatgtgatgatgggataaagagaagaattttggggacagatagcatgtgaagatggcaggaaatggctctatcatgacatgtggtggtcactggtcactggtcactggtcactactcactactcactactcactacacatcatcagaagaaatgaatcaaaagagagtgtggacaatgcataagagtggtcaatttttttcagaagggcaccaaagttgtgttcttttcatgccaagtcaccaccaacaaaaatatcatcattaatcaatgtttaaactaagtttgtcattgttgctaatcttttaacatgttggctttaattaattaatttgtggtattattgtataaaattagcttttggtataataagtttagtttgagctcttgtagtaaaattaaaaaaaaaaatgaagaaagtttgtttcaatattatatttatacgagtttgtaaccggcgtgattctaattattttttttagtagcactaagtacttaaagttattataaaattgtaatttttttgttcatattctttgttattatcttaaatttataactaatttatattacatatttataactaatttaaaccttacaaattacatgtgttatgtaaaagaagtctgtactaataaaactaaattaaaacagaattttattaatattaagtacttatatcgttaaactgattattgagtttgtatcggttacaaactcgaaggtttaggtacttatgccgtaaatatcccctgttatgaatgatgtgatgttcttcttataaatacattaattttactcatacgacaagtcgtttagctttcttattagctagtaatagagaatctttactttaggcatgtgcagcagaggtcacagagagtttttactttttgttatctttataaagtttgaaactttagtgttttattgaaatttctttagtgaaactttatttatttatttatgggcatatcaaaaaagaaagaaatatagtgcatgaatgtgagaagaaggaatatcttaagcaatttctgaggcttatcatatattagatggtccaatttgggaccatagttactagaaagtaaccttttttcatttctagaaagtaaactatggataactgacatggtcaccaatttacaaagaaaataactttgttttctgaaggttgagatagaaaaagacaccaaaaatttctgagggaatacatgtttgttttaccctcagtaactccagtaatcattccgaatttcatcgtcgaatttcttcttcagctcggtatgtatttcgaagtattcatattgcagagcaattatgtggagtaaattacatgtctcaccatttgaactaactcgggttacaaattatttttcatttcctcatcttcaaattcttaccaatgagtcaaatttgggcttgaattgaggagtgagtttagtattttattggggagaaaagaataaaccaaccaaccaaatcaaacacatgaagaagtgaaaacttaacttaattaccaactaattcaaataactgtctgttatgacagttagtatccaagctcaaccttgtagttctcatttaaggacttaagagagagattgagaggtgaattgtttagagaaaaaagggaattgtacagattattttgtgacactataaatcatcttgtttttaatctgttttgattattgttttattagatctttgatacattttctggttggtttatatttttgctgagttgttctagctagtgagaaaacttaaacactaaaggctagtttgataaaagtcgtattgtattaaataacaagaaatactatgtttaggtatattattatattgtattaattattagaatcataaattttaatataatgtgtatcgttacttaatatataacaaataatctgtattgttataatatttgcaaagggtctagagttagggatcctgaccttggtcccgaacagcgaacttggatcccaaccccgacccaaatcaaaatcttgtactcggagtgggatttcagacccgaactcaagctccacctgaccctaaatttaaatctgactccgaacttggatagaggtcaaaattggagtcgaatttatgataatgataatataactttacacaaattatcaataacaaacataatattatattaaataatattaaatataatataatccaacacacgacccttaaatcgtatcttttattttctctaatttgtttcaatccaaatttcaaatgtaattgtatgtaaagatgcaaatctcgaagtattgaaaaggaaaagcaaacacattacagttacatactgtcataagcctcattatacatatcatttgtctcctgcaaaagaaagatcaaaactttaacattcataatacaacaacattaacatatataatagtgatcactaagtttatgtctatgaaacataaaacaaaaaactaaatgatcatgggattggaaagtaaagtattgactgaatactacttaaatccaaaagatgcaaatctcaaatgcaaccaaatgaaacttactttagaagatttaagatgaagatatccatatcctttggctcctgcaaccaaaaaagatcaaaactttaacattcataataacattgtattgatttgatttgatgctaccttacattgtatcccaaaaaagagaaattgaacttaaatttgaaaattaaagacactaaatttcagcaaaatacaattgaaacctaaatcccaaatgcccatttaaatctaattaaattaaatgtatctactttacaaaataaaaattaaaaattaaaactttaaaaataagagatggcatgggaaatgggttatggcgtagcaggtgacttccatgaaagtttagggataatattatatgagtttcattaaacaaaccctaatgtctattgaagaagaagacgaagaagaaacacaaggaaaggaattggtggagatcagagtaacaccaccactccaaaccatctctttccctttcttcaaccacacaaattctcttcattaaaccttctctctagttttcccttttagccttcatatatattacgtctaacacgttcaataaaaacattccttcttccctaaaaatctgatctttgagtttcttgatagaccacaatggattctcaggtcttggttgctctggccctctcacttgttgggggactcagtacttctataggtcagtcagtttatttcccaattcaactcttctgggatcatttctgttgttataattcagtgattttgtacaattttctaaatgggcaccttctagtttttgtgttttcattcgagtaaagtctccatttttagcataatgaaaaaacccactttgtataaattgagttttttaatctcctgatgatgatttcttattggttgtttgttgtgttttgtaatctaattttgattttgatatcattgtggaacaggtgcaattttagtgattctcaatccaactccaaatttgaagatgcttgggcttcttcaggtgaatttagtttacttattagtttgtttataacatcacatttaagcttatagtttttgaattaggcacttgtctttattgtatattaagattaagagtgaattaatacagaactaaactaagtagaatggaattttagcaattgaatactagagagtgaggttaaggttatctttgctatgttgttatctttgttaccacggttttcctccgccataagtaaggcttctcaaaaaacttgggaaggaatctgtctaagacaagtgacttctttctctttctcgaaaacaaaaaaagtagttcgaagtcagcagtgtttgtctctaaatgttgtatgtgcagggctttgctgcaggtctaatgttgagcatatcattcttggatttagctcacaacgcgataaactcgattggcttcttaaaaggaaacttatgggtaacataatctgctaaactttacccttaaatttgtatgaaactacttatgtttgtagtcataattaaattctactttgtttctccacagtttttttcgggtgttattttctttgctgtgattgctaattttattccagagccatcacttgctcctgttccaaataagaaagataaaaaggttcctttctttctttcttttgttatgcaatataaattaatgtagaagacatgttgatgggggagatattgtttttgagaacagaaaaatggggatgaaggtggcaaggatatcatgaaaaagcatcgtcgtcaagtcttatatagtgggattgtgacagcaataggtatggccttcttgtttaactatggaaaaacagtggaattgaattgaagttaagtatgctatttactataatttttaagctaattaggattcttgtccctcgagctaattaagtcgttaaaaactttccccgaactattgtgattgttggattcaagcacttctatccaattctgtttaattttactaatgtcacaattgtctatctaccaaatcgtgtccctgaaccctgatatctgccatatcgtgctacctaaactttaacatatactaaattgtggaccctaaactttcatccatatcagacttccattagtaaaattagataaaagtcttttaatccaataatcgcaatagttcaggaagaatctctaacggtctgaaaagttcagtgggcatactttggtttatttcaaatttcagggggtaaaaatgctaattaattaccctctaaaagtttgatattaatcctacctaatgaattgtttaccatttccgagttgtaggaataagcttgcacaattttccagaaggaatggcagtgttccttggatccatgaaggtgggaaacatattctttagtctgttctgtgttttctgttgtgtgcattgctt

SEQ ID NO: 14532 - DNA, 5445 bp, Cannabis sativa
  modified_base (61)..(71): a, c, t, g, unknown or other
  modified_base (3493)..(3493): a, c, t, g, unknown or other
ttatagaacatgtttttaaaaattattttcacttttctacttttaaaaacagaaaactgannnnnnnnnnnttaccaaacgccaccttaattatagtaatatttatctcaaaaaagatttaagtcatagcatagtgtggtagatggctagcttagtcatactgaaaacctacgtaaactacttatctaaattagtactactataggatgtacatgattcgggtgggaatgctttttcacttattaattttcatattatatatgctcctttttatacttctgttcattcatgtcctattgagtatattgattcattgacataatttatattttagataaaaaaaaatatatgtataattaaacatagtcacaaagtatatataaatgactaaaagaaaaatactagaagtagtaagttttaataaattatatatattgatattagtgtaattgtcattttttactacaataaatgtcacttttaccagcacagtttgttactacgctggtaaaaataacttttaccagtgcatttcacaaactgcgctaacaaagaggtcaaagttttaccagcgtacatttacagtggttaaaatctaacttttaccagcacttttcattttatgctggcaaaagttctaataccaacattgatttaccaacctccttttgccaacacagcacaagtaaattctattttaccagcgtaatacaaacttttgccaacacaaaaatgtactggcaaaagtaatttcttgtagtgttttactttctcacttaaaatttgttgtaaggtttaataactctatactattattttagatataataataattaaatgcgaaatgattgtttaaaatatgttcattttttaaaaaagaaaaacttaggattaaacttgggataatttatctttgaaatcatttaaacatgatatttagtaattttttaatcaatatatcgaaattatatataatatatattaaatgtattatacatgtaaaagttataaggacatttttatgaatattattgtaatacatgtgatattagtttaataaaatggtatgtatgaacaatgcaacaattttatttttttcaatataaaaaagtggtataataaaaaataaataaaaatacaccacagcgggccggtttggtcgggaagcaagcaccaatagcaattgcattcatatcatcaaataatgtttttttttctttcatttctttcttcacatgaagtatatatagtagttactttgtgagaaaaaaaagtatagtagttgatactacatgactactgactactgtacatgtttctataatatataataataaataataaatggaattatatagagatacatttattaaaaaaaataataattaaatttatatatagagttactttgtattaatgtagtctatctatgttggtatcatcacgagaatttattattatatggaattacttactatactttgatatttaacaaagattgtcttatactttcctaaattgtttactattaattctgcaactaccagctgaattcaatcgtgaagaaatatatataaaggaaaatttcatgcaaaaagacataaaaaaaactatatataagaaatttaatttatgtcctatatttatgagattgtaacaaataaagtgtaccttaaaaaacaaaatatttgttattatacatataaatgcttgattttttttttttttaaaaaaaaatgatattaccctaaaaaaattgagggatggctctgttatcctttctccgtagttattagtcttcataatatatcaaaattaaaaataaatcgtacgtactaagtagaataatgggaaaagaataggggagcaaatttgtagatcaacaacattccttttttcttcttcgttcattaaataaataagaaaagaaaaatatatattatgatatatgcactcttctttttcgcatattcaaattattctatagataataatgtcaccgtagtttaacacccggattatatattatccaatttagtattaaagttgcttagtttattattatctatatatatatttaagctagctagctctaccaaacataaatttattattctctatatatagttgacttaatttattttaaatttaatagcactttttatgttccttagcactatttagttgatcagcaaacagaaatgtacataatgtgagtgagggaggcatttgagtttgactttattgggatatatatatttgacatataatacttcttatttcctaacgtttcctaaaggtcaaaggtcttgcacagtccaatatacaaccccccacaaaccaaaacaaaagacagaaaggcctaataatataaactagctagtttattacaataatataattaaatgtacaacgtggttcgcacttcaaaaacttatacctcctacattttattgtgtatgaacgtatatatatatatatatcttaacacgttctaagaataggaaacagagctagcttttatcaattcaatccattacatgtacaaaaaacaaaccacacacataaaaaaaccatggggaactgcgtacaagttatgtcgtcttatcaatccataaataacgatgatatagttagagtagttagctacaatggagaaatactaaggtttaaagggttaactccagtgaacaagattattacctcttacgttggctacattcttgttcaccactcccaacccttttctccactaagtccaaaaaccaagcttgaagctggagaggtatactttctggtcccagaactcatattgtttaatatattaacttgtccaaaaagagctaaagttgagaatgataatcaagatcacgaccaaattattagctacaacaacaagagtcagaagatcaagatcaagattactagggagcaactggagtttcttttgcagtgccagaccaaaggcttttctaattcggcttatagttatgggaatgaacaaggcccatctcccaaatggcgcccatctttaacatccattgctgaggcccatgaatgagacttattgggctttagcccattcaatcatagatatcactccaatggcctggcctggcctggtcccgtaggtttttgtcaattaaggggcctggagtggggatatacactctcttctatttcctttgtcattttcttttttgatttgtaattatagggaagggaagaaagaaaacaatttgttctggattcagaaattattatgtaataggtatacaaggatctattttattcagaaattatgtattagaaaacaatttgttctggactcagaaattatgtatttctcatgctaaggagctagcatttttgctgaatcagaacgtggggaattaacactaacaaaattatcgttaaaaactacgtacgtaagcataagaaatatgcaatagtaatttctacagaggatttgttgtttatatatatatatatntatatatatatatatatgttttagttaaaaatatatatattttttggaaaacaaccttttgttatattataactaaaaaattgtctaaatttttttttttatgatatatctaattacattattttaaagcacataaaagttgttctatttattttattttaataataattataaaaaattatttattatttatagtatatgccaccttataaaagtatttaatagacacataatacctgataacaattttccatttctatccctactactactagcaatataaagcatggctatagagtcaatgcctactatactaacatatataattttttctttaaagggatggcactaattaagtaaaatattggaaattattatgtgtatcgtatttaattagaatttataattacttttcaaaattaatttatttgcgggtttaaaagtggttggttgtgggtagctcaattggtgaaagtggacaggttgagagttagttttattaaatatagtataaccccaccctgccatgctaaaaatataaaaatgaaagcaccaaaaattaagacgatttatatatatatatagaagatataattaattagctttaaattaaatcaaagtgggaggtgaaacctccacgcaccctgtggagaaaagattggactgcgaaagaaattaattaatggtccatgcatagatataaattaaagaataattgcgtgtaatttaaattatatatatatcaggtaattaggtaacattaatctatgtaaatatattgagcatgcactgtcgtaatctctgaatatattggcattactttctttcaagcacaattacgtacaggcacgttcaatatctcatgtttagaagattattgatatggatataccagtgatacttatagtatttccatacatataatctcgatactttttaaaaattaatatattaaattatataaaaattagtatatttaattgaactaataataatattaacatttaaaattaaaaaaatactaaacgtatatatttcttttagtatttatcttttaagaaaaatataaactaaaattaatccaaacgtggtacatgcactgctcaattaattgtttgcatttagcgcttgacacgtgtaaaaattaaaaacttaaataacaatcaattataaattagcaacttgaaaaatggagggataaattagagatccaacacaatcacaacatacacagtagtggcataaagttaagataaatttgttatattttaggtttagcattaattttatacgcgtccgtacggaatgtatatgcttaggtatccctagtgacgaacgaatttgatacatgcgggtcaaaaatttagaatgatttcgatatacaaattgttatagttaattaatttgtgccccaaggttgtcaattgtcactatacaataattaattgtctgcttttaaccgataacgatcttgatccacatataaatatatagcacaccgctactcaagaaattaactcatcaactattgtgcttcaactagctatagttattgactattcaccagaaataacaagttagattacatttgagggctcacaataaccatgtcagataaggtatatataaatgctcaaaaccagtatatatgtccttctgttaactttatctctttcccatattaatactcattatccacaaagataaaaagtgattatttcgttgatatatatgataatctagagtgttatttgtctggaaattaggccaaataaaactcaaccttttcttagaatatttcatgcgtatacatcatcttatataaatattgcataataacaatatatgttaattaatcaactatttttgttagctagttttatatatttatttgtttggaatttttttggactgtgttaccgcaggaggttaccataatggtgctgaaggtg

SEQ ID NO: 14533 - DNA, 14300 bp, Cannabis sativa
aatatatttttagtaaaaaataatttattatagtattttaattaaaataactttttttaaaagttgggttgtaccagctttagtttttaactgtattttcttcataaattttttaataagctatttttaattgcttgccaaacactttttttatcacaacttttttataaagcagcttttagttttttcaaaaattgtgccaaactaacccttagacccatatatcctaaaggtgccactaaagactaaatttttagtagtgatttattgtttgatttaattggcttccattttaagatgcaaattagaggggttttaacaattatttatctcatcattcctatcagaacgagaaaataaactcttaactcttatgaggccgtttggtatgcagatttcatttcatggaaatagatttaacattgtttagagagtgatcaaaggatgataaacctaggaaagtaatattaccatgtttggttgacattagaatggaatgtgacaaccttttttttacaataataattttttttgtaacatactaataattcaatattttttttttctttctaagtgttcaaaataatttttatttattatttttcatataattttataaaaaaattaagaataataaataattataaaaagtaaatttatatacaaattgataatatattttattttaaaaaatataaaaaaatactttatatatcattttttaatttagggaaattacgtcatattttaaatatttttatatacattagtattcatatatataaaaaataattttataatgcaaaagtttgtgtcaaagagccaatagtattagaaaatcaattgcaagttaaatgaaaactacatttttattgggttttccttgccagccaaactaaagcccactacatttacttagccaacattaaaatattaaaaacctaaccaaacacagtaaactttcagattaacattcccacttctctcattatcgcataccaaacatcccctataagtaatacaagaagtaatgcaagcactcagctaactaataacacattaaagaaaaattggatttttttgtaaaattttagaagtgaatggtaaataacaaaatttaaaaagaaaattcactaatttatcgatacacaaaacaaattacattacaaaatagtgaactataaattttttggacaaaaaaaataaccgtcagccatatgctaaatgaagagaccgtctctcctctctctctctctctctctctcttttaaaagacaaaaaaaaaaaaagggcctaacactcttgtgatgttgtgtaatatcattattagtataatttagtatttggtctcacatattttacattaataaacatgatagatacataatcactaactaattataaagtatcactttataatagtctaggcacaataaatactcacaaaaaaaaaaaaaaaaaacaaagggaagaaattaacgtttgtttggcacgagtagcatgcatgagcatgagttattagttcgtctctaacaagaaattaatgaatgggttatggtgaagacttgaaaagggtgcttttctttttcatttatattttaaaagtttggtttatgtttattattattattattgttactattttattaatcaaatgagttgtaaggctcttcataaatatggtatatttaagtaactgtcaaggcaagcgtttttctcttattatagattccaaatatgacactgatacagataagcacacataccattccatacgaggctgctctgccactctctcttcctaactaaccgtttcacttcactttgcttccaaaatggattcttctctacacactctccccaccaaaaccagcttcttcttcaaaacccacttctctactactcctctctatatatatgtgtgtccagaccctctactggctgtgccattttcactctcattttcccaacattagttactcttttccctttttgaatccaaaaacctttctgggttttcttcatttttctcttaccaatggatagggatgttctcaggcagcagctctctgaatttatgacttccatggagctagaggtactctttttttttctagttttcttttctagagagttggtatgagtgtatgcatgtttgtttggcttggtttattttgtgatttgtgacaatgtatatgcttagatactgtttgatctatgtactgaataaactttttgtatgaatgttagaagattttgatgtgggtttagttctgttggtattggaagtactagtgtggctgctggtgaagaatgaacacatagaaaacacattttggaatatatttttaactggatctagaaaagaagcattcttttttatgctttgttgacagtttcacttacatactgctgatcgtgtgtctgctataccattttgattttctatgtaaataagtttataagtcccttgaagattgcagtttggaaatttggaggtttggaagttgtatataaaaagataggactttgtgtacttgttacaaaatagtgaccatgtattatattattgagttgattttgttgctgatcttgttgatgcagggctatgtggattttcatttcaacatttcctactcagtgaagagaatggatggtccattctcttttatagagctcctgaacaattttcgcagtgactctcaagctaccttaagagctatgacacaaacactgtatgatttagtcttctatatgattgttgtatatgtgctatgaactttcatttaccctgttgtgtatgtcttttttttttgctgatactttgtcctcattgatattaatttacagggagcaacaagatctgaattttgatgatttggaacagcattgtctcaagctcaaagggagtactgcatggtaatgaaaggagtgttacactccctacactaagctaacaattgtaactgcttttattaggttgcagatcttatagtcattgataattttttgaatctttgagatcagactattattttgtcacacgtgttgtgctcgcctgatatgggataagcaatcggcggtttttttctttctatcattcaataaatgcttgtcttaagcagagatcttcattacatgattatgattcacttatgttgattgtcgcgatgctataaggaatgttagttttccacacatgttgttcttgtgaaaagatatgaggctttaactttccatatattttctttttcattgaatacatgctcttgtcttatttggagttcatcgtaacggcattatgattcacttatgttggttgtttgcgatgctgtaacggtataactaactactatatacacgagcatgcatgatcgtggcctttgtggaatattctacaaagagaagcatgtttgcttagaagtatgaatgatcagagaccagcaatcgattctttcaccccttccatttaatataatttttacgacttcttaccaatattattccattgagtgaagctgtagaaatctcaaatgtggttgttattaatcaatgcatgttaaattgatatcctattgtttcaatctagaggaatgttatgtatgaaatatgatttctgttatgatcatttattaaaaaagtgaaaatttaagtaaagttcaatgtagtaacattttaaggagatatgtatgctatgccttatgtcatccacaatgttattgcttgtttaatttatttttctgtttcacagtcatttatattttcttttctatgtctttctgtttgtacttttctttgattttatttaataatgtaaaatttaattgagccttctacttgtcttgacttttgtgttccagcattggtatacatcgtatggcacttgcttgtggcgatatgatgaatgctattgctcgtggatccaaagaagagtaagtatattttcatcatcccaaataaatatatagcactgatatatgtgtataatccattggttttagaagtaaagttttaggtgaaaatgatacagggacaaacatgccttgaagtgaaaactcccttatattattattaatagttatatggatatttataacttattcatacaaaatttgtaatggataaaattggctcgttgcctaatatctgaagcatgtgttatgctggcagtactggatcaaaaaggaagataatacaatcattataatgacatctgcaatatatcaatcaaagtacatttatagttcataggaaagagatggattgtctgagtcgagtagtcattaagtttttttttgtgctcatttcgttgctctaacagagacatcgaatgctggataatagaagttttaacttttctcatttgatgaatgatctgtaatatattccaagttttctatattgagatgttcttgtgttagaaatataggtgctgtttcttttatgtgtctattattgattaatattagtaaatattgatgtccatcttactattcttttgttcctatactaatggttagtgtcaatatttgcagtaaacccaatattgacatcagtatgattatttttcactatgttaataatacaaaaatatatatatttattttgttccattatttttttcacttgcaaatcttcacaatctgatgtttcatttcaggtgcattttgatattacatcacatgaagcaactgtttcaagttctgcaagacaagtttgatatcatttgtcaggtaatggaaactatctcactctagtttactcatcaaggatgtagaatatgagtaactattactcattaatagatttttctgtttgtgaggttcttctcatcttgcgcatctctgctgttagaatccaacttagttgtgaaaaaggaccctacacaagaagagaatattgttatgcttaattccttttccaaataatgataatagatctgttacagctacgaaactctaaccaaaattcttctgagatataatgtcgtaatgatcctcgattcacattctaccaattactgatagtgacctttatttcaatttcaaatttcactgcattatttagttcttatgaatttcacatatatctgtttcagcttgagaggagaatcaacgagccaatgccaaatgcatgaaagatgaaaactgtgttgcgaggcggtgtcatggaaaggggtctagaatgtggttcgaaccgtttgaatctaatttcatgttatgaaaacttaattatctttatccttatgtgtgctattttccttttgtttgttggtgtcaagtacgcctaaagacttttgttgttgttttgttaacagttaatctatggttccccctttcatctttatttttgtttttgtataatgtttgctgaaatggtagactcaagttgaaagctttacaaagaaattcacacacaaaacatagagacagatttaatgcaagtttgaatttgaatcatgaatttctggattaggacttttttaggcttgagataaagagcacatatgcttaaataactaaatttaattagctgtatgattataaattttggcttttgttgccaaggttagcaacatgttgaagttgttggtttcatagttaagaatgtatgaatttgattctatgtagtctagtaattagatttgaggatctatttggatacatgataattgggtcttctcccattctactggacacttttgtctaatatatggtgttatttttcaagaataatttattattaatatgactataatgatataaatttcataatctatctaatctacagtagttcaccaaacaaataacagtactgatcttttttttctttttctttttggatctgcaattacagtactcaaattataatcctgagggtatgaagaatcatcagtatcaattttgaacaatcttagccgtttattggttttggattttttacaatattcaaacacatacacacggaaaataagagccatatatagttatagtaataatgtatatcacatcaagtacagctaagaaaacaacaatgcactttcaagacaaagacagtacatacagatatgaaaaaaaaacttgactatttatttatttattcattatttgaaaaactatgaactgtctcagattttcataacacaaataaaaattcttaatccatatttaattgcaccaataaaccttttaacatttctgtattaaacatcacataaattgttgttgtttttaagcaaaattgccacataacatgtctagttcagaattaaatttatatgattgctatttgccaagaagagaattgtctcctcaagaacaatccaaatgattctttttaaattgttttattagcgaccaaaaaaaaaaaaatcaacaatactaaaggtgttttttataattaatcttgaaaaagaaaaaaaatccattatttttagtccgaaaaatgattgaattaaactctagcattgagtcattgagccttgaaacaggtcacaaacaaaagatagtctcataatgcaacccatttctgaattcttatatattcaagaaaattcttgtttattcttccaatgtgggacttgggttgataccctatggtgctcatttgcagccaagaaatatttggttactttctccaattgatgaaataaaatgccacataaataaatagattttgtcctgagcggtaaattaagtacttggggggcattggatttgcagcagtgcctgctgacttgacataagtggacaccacaatgtctatccattcttctctacacattcaaaataattcagttagttgccactgtagctgtaccagtacaagaccacaccaccaccattaatggtataaccaactctgtatataatcaattcatcattaaattcaacataaaagtaactaatggaaacagattaccaaaataaataaaaaaaaaaacaacttaaatgattagtgtagagagatgagcaatttcaacaaaaccatttggattattcttggctttgtgtgctcctttcaatatctttccacttatgactgagatccctcaaggcttccatgatgtgaaatcaactgtcatggattttcagaacataactatcggccaagaatcaacggctgcagttaaattacagaaagtttacagaagttaccgcactagacgtcggttagcagactcagctgtggttgctgaagagttatggtatgtgaaactgaagcctttgttttttcttaacatgttttctttgagaaatgatggtttttgtgttcttattgtttttggaggtggcaagctataaattatgcaagacttaactatagtacagtttcttttttcgattaccataaatccgaaacgccagcctcaagatggagtaggattagcttgattgcttcaaaggcatgttaccaatttcttgagtcctttttgttatgttatagagctatttttttcataaaaattttgcttgtttttattttagattgggaaaggattatgtgaagattcaaaggcgcaaaagttagcttttcagcattggattgaagctgtaagattgaaattgacatgacaagtattattattagtagatatattttgaattttctcattcaactcattacaattattacttgtttctgtttgtagagtgacaaatgaaaatgatgatgtgttgcagatagatccaaggcatcggtatggtcacaatctaaaattttactatgaagaatggactagaagagatgcagggcaaccatttttctactggtatgtatgtacatatttaatttctagtgaagttgtgatatttggctaatcgattaatcttcatataatgaaagttacaaaatactagttctatctttgtataggttggatgctggagatggatataagattgatctagaagattgcccaagaccaaggctacgagaagagtgcatcagatatcttggaccggtaaccatagccaacattttcaccatattaaacaccaatattggtataacaactttaagagtgggaaaaaaactttaaagatgtgaaatattgaattattatgtccttcaaacctttacaatattggctcaaaatttcatggtctaatgatatgtgtaatataatataagcctgaagaaactaatcacatttgcaggattagcttatgaaacacttgtaatagcatcattacaactgttttgtttttctgcataaatgttctgacttttctgatattaagtgtaatcttcttcatgaaataagcaagagagaaaagcctacgagtatatcattactgaaggaaagatagtgcacaagctaactggagaactccttgatactaagcaaggcaaacaaagtacaaaatggatttttgtaatgagtactgacagaaagctttatgttggtgaggtatggtatcagttaaaatatcataatattggttgggaacattttttttatatgcttaatctctatttcatttttcagaaaaagaagggattatttcatcattccagcttccttgcaggagctgccaccttatctgctggagggctcctagtagaatggggaagagtcaaggtgagcatgattttttagatgctaacattgccccaaagagcatttttctttttcattttttgtgcagaataaatacagcttgatgttctttctgtttagtttgttaagaacttaaaaagtgtaacttttttcagtcagtatcggcttacagtggacattaccgtcccactgacatgaaccttagcagcttcctcacattccttaaggagaatggagtcaaccttgatgaagttcaggtacaaaactcaaatgtagtcatctgtaaaatgagctaccaagtcatcaaaaagccaactgttacaatttattgttaaattcaggtaatgtccaccattgaggataaaaagaactatgatacaagcgtgtcagctcggcgaggatgtacattacaacaacacataaaagaaaaaccatctgactcttgtaaatctgacaatgcaagcagagttagcagttttacaagaatgttatcgagtagtctccagaatcctcaaacacaggttcctaaacaagaaatactggagaggatcaagtccaggaaagaagcacaatcctaccaattaggaaagcaactgtctttgacatggtcaagtggagctggcccgagaattgggtgtgtggcggattatcctcgtaagttgagggtgcaagcactggagttattgaacctttcaccaatgcaggcccctgctgcagcatcagcatctgaacctttgaaagtttcttcatccaaatcgtgtacaacttgctgtataatgtgagctcaaattgtcggatttgcactcttacattcaagtttcaacaacatggacttcaaacactttctaaggtgtaactttctttcattttcctcaccatcttaatcatttcttcaaaattgttagccataagcattcataccgtttgtccacatttttgtaggagatatgaataacctctatctactttatatattaataaaaaagaaaagaaaaatactaatgtcttccctgacaatttgcttttaaaaaatgttgatttatttctctacgtgtactagtacgacttattttttgtattcactttgaaaagtattgcaaaactgtattgtttttctagatattagttaaatatcgctgagacatcattgaaggacatctcagtgtcgattttttccgattttttcactttcattagttgctgctattctcaactctcaaggctttttaagaagacaaacaaatccaaaacccttttcaggtggaccacaaatcaattcaactattctttgggttttcttgattacacggagaaaaataacacattaattgattttgaaaaacaatctgtcttgtaatttctgataaatcaatttcacgagaaatcagatccttcttttatcattttctcaccaaccaaaggtgtacaacagtttctatagagataaaaacacaagaagcaagagatgtcgtagcctgtaacaaacaagtgaacactgaataatacaaattaagataagtcaatacactcaacaggcctatgcaaatgcagttgagatttcaagcagcagcaacagtttctgcaggctttgattcggtttctgctggtttagcttccccttctgcaggctttgcttcagcctcagctggctttgcgggttctgcctcctcccagtaggcagtcttctttccagttttcgaaacagtctgaaaaactgtctctgctggcacattgcctttcactgtcaccttctgttgatctatatcaatgtcatacgattccacacctatagatgattaaaaaagaaaaagaaaaaactcacaagttcaatatcgagtcgaggtaatacaacaagaatatatatccaccaaagttttaatattacgattacaaagaatagtaagatgtaacaatattcagctaccgcaaaacaattacaaatttggataagaagaatgtaatcagtataatcgtaaagagctattctcatgataattgcatttgtatttctttcaatgacaatctaaaaagggcatcaaaatcttggatgcagataattgatgagaacaaaacaatttcagcaaaacaaaacagttttacagataattggaccaatgaacacctgtacctaaaagcattacacagttaacaacatgcatgatgaacccgttgaggaaaggcataaaaacaattgaatttccaaacaatgagaatattttgaaaaattatgtgctcaagggaagtgagcagagtatcttaaagcattgttgacagaatttattggaggggatgggggggtccatgatccctgtgatgcagaattgtttacaaacataatggctcattaaacttattatatagaacaatagcaccaaccttccaatttccccagaactcttttcacagcaccaacacaaccttggcacgacatgccgaccttgaggacaacggtctgctccaaaaacaaatccaatgtcaaaatgaaagaaaaaatcaaagtatattaatttagtggcaataagaaaaaaaaaagaataaaaaataaataaataaagaggaagaaaagtatcctctcaagctagaactccgccatataaatcaccatggttttcagaacataaagctgaacagatcaagggttccagacatcaatttaaataagcaaataaactatactttatactggaattgcaataacaatacaaacttctcggaaatctcagaacacagagaaaagcaaaaaggtatccactgaagggaatattcgaattaaacattttttcaccacgcaactaattttttgataaaagagataacgatgcccaagttcaatttctccgacccaaaaattaaaaaaaaaaaaaaaaaaaaagcctaaactcaacctaaaaataaaagatacagatgagtcaatcaaaatccctaaatcatctaaaatttgacgagggctgtcagcttgtaacttcaaactgcatgctaagtcaaataatcatcgatttctcccttaaactgaattggaaaagaaaaagaaaatagaaattggattcttctacgaatcaaagatgatgcttttagacaatttcgtttctgaaaggatccaaactaaaattaacaaacaaaaactgattcaaacacagaaagaaaaggatttgaaagcaaaacagaaaatagtgggtacctgagccatgggtgcttttgacaaaagaggaggagaagaagaatcagagagaataaaaagtagagaagttgaaatgagaatgaattaaagaattgaaatgtaaagctatttatacaagttcgatgaatataaaagttgtactgttcgaggattaaacgataaaagtcattttgtcagccgtgggtgggtgggtcgggtcaggtcaggttagtggaattatcaattatggaatcagactcagctaatgggtttcagtatttattatttatttattttagagttttaagaaaaatttattgtgtccacctattttattttgggatgtttttatttttatattttaaaatattttttatttatatttttatgaaattttatataaaaattcaataacacaaagcaatctaaattgtaatcaaaatttaagtagcaactattataaaaaaactaacagagtaatcaaaatcataatttaaaaaaataatatataaaataatttttctttcattttttacttattaattctaattttttttttttgaataacgatcatcacataaattttagtcgggagtttaattgttataaaaaagtttacacctattttaaacaaaaaattattatcactaagtatatttctttaattttgtaggagatgaaaattatgtgtgacattttgtttttaagtttttctttcgtgagataacttaaactgtaaatataaaaactacaagaatataacctataaactataaatttaaaaataaaataaaaaataatatatgcaataattttattttttactattttaatatataatcatcaagaaatatattttgttaaagtgtgattttttttttttttttcgttttagtgggggctatatcctatattccccgttggcattaacatgggtctgttcctgagacggtgtagtttattttagagctctaatcataaattttatgaaaatataccgataatccataattataacatatacacgattgtacacaaatttaaattaaaaaactcttttgtagccaaaacatatgagtccaaatccaaaacacctgttaaagaacgtaatgtagacttattattcttttttatatatatatatatatatatctaagtctaatatatatcacatcgtaacgaaaaaaaatgaaaaaagaaaaagaaaatgtgtttagatatttaaattattaaatttgactgatgtgtagggattacattatttttttcaattgaacgatagtttgtttttctgagaagaatagtatgatatatagttaattatacttatgtataaaaaattacgtttaaatctattaattatatattactaaaaggaaccacgatgttacataaatctattaattattatttactaaaaaaactgctggtatacctttatcttatccaattctgtactcctttgtacgtttgaaagaggttctattttaaaaaaataaataaataacttccattgaagagaagagagttgccttttcattattgtttctttaagtatttccaatggtaaattttagaagacgtttggtgaggtagatatattatgtagtaaaatattaaaatgttatatcattagagataaaaagatgtcattctaaaaacttgcaaggatgttatgttgtaatattaatgctattcattattttttaataaaaaattaaagttaaaaaattattatagttaaaaataattagaatatatattaaataataatgtgtgattataattatagtatttttaaaaagtattatatatttgagtatttgtagaaataagagtgtaaaaaataatgtggaaaatagataaaaaaaaaatattatatttttaaataatctgtaaatttttaggatttttatgtgcaaattttcacttgattgattgagcgtgattcatgccttcaatttttgtcaacgaagattgaggccatagagaaataattattatttagtagagtttttcttggaatgtacgtaaatgaaaaacttctttatccctacaaaaacgctcacatagtaaataaacataaagaaaagaatatattgctaaactgtccactatatattaccattattattatttgagatttggtagagaaaagaaaaataattataggttgttgggagcagctgagctgagctgagtagtaaccaaaccaacaatatatcatgatctggtattccacttaataattttgattcatataggtaacgtctacccaaagtgttctgttcttaagaaccttcattttttttttataaattcaacaacataaagtgtacgttaattcgaaatatgtaatgtgtacgtactgttgtagtacatcaaatttagaaattcatgtactaccatagtacatcaaatttaaggacggacacaaacatacaagaaaatactatgtctgataacgtgtatgcaattctctctctttctttatctttttttttgggaaattttatttacaccccaaaaattcttaagtacaccccattttaataatttttattttatataaagtttata

SEQ ID NO: 14534 - DNA, 5010 bp, Cannabis sativa
tgtaagggaccagtaatgggtatcggatgtagggaagggggttagcaggatggtgataatggcttggctaatatcatcagggaagatattatggatttttggaatattccattctttggtaggggttatgagatctgctactaccatactgccatctgagaggtgttttaggtagtttagcttgccatatcctggaatccaagcgtcattaaagattgagattgtagaaccatcacacacaaatttcttaagacctgacatgagaagttccttttttccaagagatattgatccagactagagaaggcctatgacccttagaagaatttaggaatgttgtgtagggaaaataacgagattttagtaaggttgcagcaagggagtgtgaagcctgaagaagacaccaagcttgtttggccaacattgcatgattgaaagctttcagagatcggaaaccgagcccgccatgaaacttggaatagcttagggaggaccaatttgccaaatcctaccaaaaagagccatcatagactcaagcttggaatgaaagaaagctgggagtttgaagtaagccatgtcatagtagggcatggcttggactaccaattttaagagaacttcttttcctcttttggagaagtgtttggaatttcatttgttcaaatgagaccaaacccgatccttgaggtagttgaaggcctctttttttgatcgaccaaaagtttgtggcaagcctaggtatttccaattgagtcatttattggaatgccaaggagagaagtgatgtggtttttgatggcctcagttgttttaggtgagaaaaaaaaagatgacttactgtaattgaccatttggccagatgccagactgtaatcatgaaggatatctttgattgtggttgctgcgattgaggaagctgcactgaagagtaagctatcgtctgcaaggaaaagatgcaaaattattggcacagtgcgcgctattttaataccatcggaatgcttatggggctgagattgctgagctttctgagtaatgagagacgagagactatcagaacataagagaaataagtatggatagagtggatccccttggtgaatacctcttgaaggttgaaaatatcttagagcctgctggttaagagagaaagagaaggtggctgtagagatgcaagtcatgacaagggctatgaattagggtgggaaggcaaatttctccatgactttccgaacgaaaatccattcaactccgtcaaaggctttagccatgtccagctttagagccatccatccaatacgacccgtcttgcgatggttaagggaatggataatctcctgaccaataatgatgttatatgagattaatcgattggggagaaaagtgctctgagtgggggatattatacggataagaatgggctttagtctattaaccaacactcgggagacaattttataaagggtggaacaaaggatgatgggacagtaatcaatgatttactggggatgagcttgcttgaaaataaggactatgacagtcttatttattgtggcaatgtcagcatccccattcaagaagctttgaactgcttgaataacgtccttccccaaaaagtgctagtttctttagaaaaaaactccattgaagtcgtttattctaggggctttatcactagctaattgaaaggcaacgatttttatctcatcttcagtaaaagatgcgtgaaaatttgtcattttcgactcaaaaatatgattagtgatcccaatcacaacattttcaatgaagtcgatatcaggattctgactcgtgaacaaatgagcaaaataatgttcaatggtatgtaagatggaagctgcatcggtagcagtagagccatcagggcgctggagagaatgaattttattggtagcgcgtcgagaagatgccatctgatggaaatagcagctattcttgtctctgaggttaagccagttaacacgaaaatgctactgccagtactcttcttctttatataagagtctgtgaagctcactttccagggttcttcctaaagccaattgggaattagaaggctgagagatggcattcacgtttttaagttgagattggatatcctggttttggtgagaaagggaggatccaagggattttttccattgcttgaggtggataaagacattttgcagtttgacactaattttgactctcgagtcttgcccattagttgcattgtttggtgcccaggcttgacgaagacagtcctcaaatctcgcttcagagatccaggtgttatcaaagatgaaccgcgagtttgggttggaggggtggccctgtgatagagggtgaataagaggacgatggtcggaaccatagaagtcaccatgaagaagacgagctgagggaaaagagggatcccaatcatcatttgagatgccccagtcaagacgctcttgggtatggatttgttgcttttgtttattagtccaagtataagggtttccaagagcattaatagggtgaagggcaaaagcatcgaggaagttttggaactgagctgatggacagcgagatatgtctccaccaattttatcattcagagtaagatagtcattgaaatcgctcatgataagctagggagaaaggtgagtataagatccaagtctatgaagaaattgccaagagtgaggtttatttattgggttaggagctccataaaagccaataaaagtaaaagtagtaagattaagaagcttaataaagcaatgaaaatgacttatattataagaaagcagggttacatccatatcatgagtctatagcaacaaaagaccaccactcagcccgactctagggacttttaacccattaggaaacttaagatgcaatttaaatttatttagtgcaccaactgggagtttagtctccattatgtacaaaagggttgggaaaaattgcttaactaaaagggagagagaacattatgctcatttactccccagtccgcgagcattcgaacttatgaaactcatgctcctggagggtgcgctaagcaacacctgcctcataggtgtgatccttatcaaggattttgcctaagtttcgagtatgctttagcatcttccaaaattcaatttcatttatacattttggacggcgtgacttgaactgacagattgttggaggagcagaaactggtgaagatgaagagtcaatggcaaactgtgggggctggttgggggtaaggtctaccaggatagtggagaaagattgggcaacaaggacggtatggccacttgtatcggtagtgaccgtgatgttagcaatcacgggattggttgaagtcggtataggtgtgagaagttgttcagcagtggtaacagcagggtgagggttggtattttgggttatagccgctgggtaaggcaaggggacaggtggccgaggagttagatcatcaaggacaacaacattacttgaagaaggccagtttgagaatggtgggaggggtggagcactattagggcaacgagtaagaggaactgaatgggatgagctagccatataacatcctaccagagtggtacggggctagctgaaatgttgaatgccataatcagaggttggctcattaaaaggacctttggagatgatcattggttggtttgatcgaagatgatgggtagcaaccaaagatttaggactagcaatgtgaggcctgaggtgaacaagtgctggccatataaaaaggatttgaggtaatacgaatcttggctctaagagagtgatcgtaacggaatagaggtggagttgatgaagagtcgcatttggcaagaaaatcatgacagtagttcactatgtggcttagatagccacaatagtgacagaaatcaggaaggttctgaaaacaaaattcaagccaaatcggaactgccattccttgaaaatgaaaactggctccccacagtagaggctgagttacatcaatttcaatacgaacttgcaaatacatgccctaagattctttgagcgaagcaatatcaactttaatgaagcgccctagaacttcaccaagttttcatgctaaagcacgagatcgttttagaaatgggatgccaaaaacttggatccagaaaagagttgaggtaaagcatatcaacagtgactaaagaaccagcttcaaggggtgtcatgtctataagattatagtcaaactgccatggctggcctataagcacacgcctacggtcaccaaaataaccaaattcgacagtgtagaaatttgaatctttttccaagatgtttattgaaaaccgttgaggccacatttgacaaagataatttttgaaagcatctggattaaaatggcgagtggtaaggagcttgactgcaagaaaagctgaaggctcttctctattatcctctttaggctgatcagtggattttgaaaatgagtgtatctttgtttcaatttcagtaagttgaagggtggctgtaagagtattaaagaggtcttccattttcagaggtgacaacgaaagggggaaagaggaggacgagactaagaaaggggctagattcgtatctgaaagagaatgtagcagatgggaacagggtattgggaataagtgaaaaaattcctttaaatagacaaatatagtagaaaccagtatctcaaagtattatgtagcagagaagagtaaattctccatgttaggaatttcaatgatataccttaaaatgatagtggcttctatagcagatataaagacgcctggagaaggggaaggattacctagaaatataggttcaatgattaaccaaggaggtgcagagggattaaattggttaaaaactccatcaggaggagggatcttatcgcgggtatgaaggggttctagggaaagaggggctgcggagttaatggtcgaactgggtaataagcagggccggccctgggcataagcgggctaggcctgtgcctagggcccacctagtccaggggcc

SEQ ID NO: 14535 - DNA, 6415 bp, Cannabis sativa
ttgtcaccagtggggagggtattagcacagacacgccaaagcatcatactcagacgtgggtgaatagaatgatcccaaatccaactccaaatcttcttgggttcaccaaatctggtttcctaagcttcccaatagtcctttgacagagaatctactcttagttgattatttccaaatgagggtgtcctattccaattctttagcaatttcaatttccccaatctttccaccaatttcaggaccaaaaagaaaattgaggtagcccgtattccaacttttagtccttcggtacatgagatcagcaacatttttaagactgggagcttttggtctaattgattccatcagatcacgaaagcttgcataatccagccatgggatccaaggctgccaccatacatcagtctactcccccaaagcaattaccatacaagcaccataagcaatggtattccgagcctttaagatacccttccaaacaaaacaataagaggttttctccctcatactctagaaagaatcgcgagggaagtattttcctttgagagcatagtaccaaggtctctccactttgatacaaccaagctagtttagaaaggaaagcaagatttacatcttctagtcttctgaaactcaaaccacctctctatttcggttggcaaagagcatcccaggatttagtagcaaggaatctcctattgtcaagagatccaagccatcaaaaccttctaataatagagcccaattctctacaggaagagagaggcaatttgaaagtagacatcgagtaggaaggcatggcaagagctacagagttaatgaatacctcgggagcattacgtgccagccgaataccatgaatgttaccgaagctttgttctcggaagatgagtctagagaggatctcattgcacaataggaatagatacggggacattgggtccccttggcggatacctttactcgacgagaatttctttagaggtctaccatttagcagaatagcataagagaccgtggagatacaagtcataatcatctttacaaaatgggggcagaaaccaaataatttgaggactttcttgagaaagttccattcaagccgatcataggctttgttcgtgtccatcttaattgccattaaaccacctttcccttgtttcttcttgatgacattcactatctcttgggtaagaatggaagattctgcgatccatcttcccgggagaaaggcagactaaataggggcaataaggcgatcaatgaccaatctcaatctttgggatattatccttgcaataatcttgtacacaaagttgcatagcgcaatagggcggaatcggtccacactgttggggttaactccgtgaggaatgagacagatataagtgttgttgaggccattttccaactcccccgagctaaagaaatgttggatactatgaacaacatcctccccaacgatgtcccagcactttcggtagaaaactctcgaaaaaccatcaggtcccggggccttaagaggatgcatctgaaatacatgatcttgaatttctgaaaattccgggatagtagtgagcatctcatttttggctggggataatgactggtcaatgagtgaatcaaggccatcaaaattagaatttccatttgaagagaaaagatccttgaagtaatcattaaggatttttcccatagtcttcacgtttgactgaagtattccattagcatccttgagattccaaatgtggtttctcttctgtctaaccatatagaagcatagaaaaaagctgagttccgatcaccttgcattagccaagtttcccgagacctttgcttccttattgattcttttcgagtccacatttccttaagatcgtgtaacaccttgctttcaatatctaagtccacatcgtgggcttctttggattgaagagtttggagctgagtttcaagatctttgatgatgcggtcacattccccaaaggaatttttgctccaagagcgaagggcatattgagttctcccaattctcctgttcagagggcaggatctctcgagatgggaggaatcataccacgcatttttgataacctcccaactagagggatcgttgaaccaagcctcaaagaatttgaaaggacagaatccagtcggtttgttccagcgtgtgtcaaagaggatggctccatggtcagagtgtaaaatagggaggttccgaaccccacttgaagggcagatgtccaaccagagagtatccacaatgacccagtcaattcgttcctttataagatgacctagtgatcttttattttgccaagtatagttgcatccaccaaatcccaaatcaactccccctgtagcacaaaggaagtttctcaaaatggccccatcattgaatctaaagggacgtccacccgttttgtcatctttggatagcaagacgttaagatcacctatgagggcccagggatcctcataggaagtgatagtagaggctaaatgatcccaaaactccgtcttacaatcatcatagggtgtaccatactttgcaaataaattccaagtcttttgagtagcaagatcagttaccatacacacgaatcccgtatccaacttagccgtgttagtaattccaacattcttgttccacagtaaacagaagccacccaccaacccattaaaagagataaaactaccacaatcaaagttgagagtactgcaaactttcttcatgtgatcaattcccaccttagtttccatcaaaaacaagcaatcaatctgtaactttttgacccaagccccaagagcttggattgccgacggtctggcaagacctcggtaattccaggatagggctctcattggggaagggggggcttgataaaggtcgcttcctctcccacttgaaaattctggtcaatcttaactttatatagcatttctccaacctcagtaatacaattttaagagttacctagtgtattaggaacctccccatgaggaccgtgattgggttgacgggttgccttgttgcaaactttcttttggctgccggacttctttttactcccggaactcttactggatgtatctttcccaagaacgaaggaaccagctgtgagcaaacccaagttcagttgtgcatcagggactttcgaagtaatggtgtcgctgttgggatctttaataataataggggagacattccctgtgcccttccttttcttagactttgaatccgttatacaagaggaatcctgtaattggaaccaggaaacgttgggctcatttggaattttaccatccttcaagagaggcccaataaagcctttggatccctcctccacggggcgtataactatggtgggctcaagatggtggtgtggggtcctagacttacacacaatttcgtggggtacctttatcatttgggccgcaaccgggcccacatgggccatcatggtgagaatgaccctttcatcagcagggtttttccccaaaaggttcatatgatgcctagcaatattcccttcccttgaattctaccagttggcgtccgaggtgtcaccttctcaatagaatccttattgattgtagtgcgcacactaatactctcattccgtactgcatttgtaccaacggtagtagcctcaaccccctgtccttcaccttgtacaattctaccatctgtactactaatctaaacgttcaaattatcctggagcgctgccgacggggcttccctttcacagatgagaaccggtcctttagtgtcaaaacagcttcgaatcggaacggaggctttaatccacaggccatacaaaggcacaacactccccaccggagggaaagcaaaggctcgattcctcgggcaagaactgctgtcatgggcaatatagccgcagttaaaacaaatcttaggtagttttctgtatttgaactgtatccattctttccttcctctgtttatgctaagataaaaccccgccgggatttgttgttcaatcattatatccaccttcaaagttagaaagcctcttctagcaatgattctgttatccgcaccatctgaagctatgaactcccctaccttagccccgataacactcgagttctgcccaaccagataaggggtaggaagtccatgtatttccacccagaaggtagctttctccatcgacacgtattagcagagagaaaatgaaacagagtaaagtgttttctcattaaactgaactgaagcaaggattacaatatttatagagcaaagctcttgatacaaagggatgaagcaacagtattctgttgtaacagaataacagaatactgaagcaaaagaaactaacacgtgcctaaaatacaataacaacctaactgaaaattaaccaactgagatgactaacaacaatcttaatagcccccctcaaggtggagtgtacaaatctttgacacccatcttgctgatcatagctttgaaagatgctggaaacaaagccttggtgaagatgtctgctaggttgttgttggaggaaacgtgcagcattttgattgtcccttgttgaactttttcccttactatgtggcagtcgatgtctacgtgtttggtgcgttcgtgaaaaacgggattctcagatatgtggagtgcagcatcattgtcacaatagagaatggcaggtgtggggtgacagattttgaaatcctttaaaatggcaagtatccatgttatttcacaagtagcatgtgccatagctcgatattcagcttcggctgaagagcgagatacagtggcttgtttcttggatttccaggatactagagagttgcctatgaacacacaatagccagagatagatctcctagtgtcaatacagctgccccaatcggcatcagagaagactttgatgttgagacttgtttctgcatatgcagagatgtgagaatcggatttgtttgaaaaaaataggccctgaccaggggttgttttgagatactgaagtatcctttgaacagcgagtaagtgaggttttcttagagaggctaagtattgacttagcctattaactgcataggagagatcaggtcgagtaatagtgagatataagagttttccaatgagacttcgataagtagtgggattggaaaggagctgtccatcagtggaacttaattttagattgggttccatgggtgtagagacaggtttggaaccaagataaccggtttcatttaataactggagagtaaaaggcctttgagagatatagatgccttgaggtgatcgacttatctcaatgccaagaaaaaatctgagatgtccaaggtcctttaatttgaatttattgttcaaaaaggttttaaactcaatggtggctgaggcattgctgctagcaatgacaatgtcatcgacatagacgaggacagccatgaaaaggttattgttggatttgatgaacaaggaatagtcggattgtgattgagtaaatccattagagattaaggttgtgctgagtttggcataccattgtctggaagcctgtttaagaccatatatactcttttggagtttgcaaactgcatttgggggaagttttgtggcagatttatagccaggaggaagtttcatgtagatttcttcatgtaagtccccatgaaggaatgcattattgatgtccatttgatggagttcccaattgtttattgctgcaagagcaaggagaattttcaatgtattgaacttagcaaccggtgcataagtatcaaggtaatcaatgccatatttttgggtgtagcctttggctactaacctggccttgagtctatcaactgccccattggggaggtatttaattttgtatacccatttacagccaatgggtgtgtatccaggaggtagagacaccacaatccatgtgtgattgtcttctaaagcttttgtttcaacatccatagcattgttccatcttgggtctttagcagcagcagagtagtgtttaggttcaaagatagtatgggcagatagaatagcactaagaaattgaggagatagtttatgaaatgacatatacttttgtatagggtgagaagtagggtctgtagtagtgcctatagaacaaatgtagtcttgtaagtgctgaggtttcttgagggttctgccagttttggaagtgggaatagttgaaccttctgtaggagttggtacgctgctggtttgagatggaagatgagtaggggattgggaagagggaagggtaatggtgtgaaacaattggtctaaatgttgtgtagaatggtatttagggaatggaaaaattgtttcatgaaagatgacatttctggattgaaaaatggaattggttttcaaatcgagaagagtataggccttcattccagaaggatatccaaggaaaacaca

SEQ ID NO: 14536 - DNA, 7798 bp, Cannabis sativa
aaaacaaaaaagcaaaaaagatgacatttttaagggaagaaaattacagcaacgggaagcatctccggctgacgaaccacctcctgcaacatgggccttctttctttcttctctttgtccttttttttttgttggttttttttttattattattatttttttttggtgggttttaatttggaaaacaactctcttaaaatagcaaaaaatagaaaaacaagggtcttgtagcaacaatattaattcaaaccgttttcttctctcctctgtttcaactttcaagctcaaaataatgtgtaaaaaacaaaacaaaacaaaaaacaaaaaacagagtgcttgcttatttttctttgaagaaaaggagatttataatgtttttcttagctaagaaaatggggactaaacagttcatatatataatacaaaaaacctatatagttgggaacacagggcatatttggatgaggttatatcatgtatatatatatatatgtgtatgtgtgtatatatatatatattgtatataatgtgtgtgtgtccttaacaaggttgtaccttacgtaggctttggcaatgggtcaacccgagcctcacgcctcaccactacactggctctcaaccttctatttcactatatccacgtgtcgctattttattcgtttgggtccggacacgtggcatgtgtacatggtgacatggcattttctatactaattatgtaattaatatttttttttattttattcttgggtctttaaaccgttgaccaagcctttgctaattccgttgccgatttttagtatagtggtcaattaggtcccataatagccatgttttcctaaattatccatttggttttatttatttatttttttaaaaaaatatatatattatttgttttttttattattattattattatgacctgtttataatatgtatatagcataggtgagaatgagatgaagtaagagtaggtcatgagatgagttttgggtgacttggatttccataaataggtttactagaaagaacataagttaatagctatatagtactataatagtcatcagactcagtctacaattagttttaactttgtaggatgttagatcattatgagcaatgcttcactatttattattattattattattttgaataattttgtggtgtcttgcaaataatatttagtaatattatttaatcaaaatatgtataatggaatacttaattatacaagtagtattatagcattttatgtaggtactagacatttgctttccttcaacatttctaaattttgttaagagaaaatatatagggtaaatattagtataattatttaaaattttatgtttgtaagtagcataaactcaacgtttatttttagcggcataagtattcaatgtttgtaaaactgtaatttttttctaattttgtcagtacagagtctgttattgtcttaaacatggcacatataaggctagattctagatcattggttctagccagaaacatgtagtatcagttactttaaaatattctttaataaattaaaattgaagtttgtggtgacgaaattgaaaaaaattatagttttataaacactactaaaaaattagtttttcccgacaattttaaacaatcgagtaaagtattcctgtcggtttctataaccgtcgcctatttgaccgttgcaaaaaccgtcgcccaaaaaatattctcaacggttaaaaatcgtcgagtatagtgtgcactatagggcacggtttgaaactgtcacctatagtattatacgcgacaaatttaaacagtgccctatagtataataacccatcttttttattattttaaaattttaataatcttaactttttattatatattcgtttgtatcataatcataattgttaaacaactcgagcataaataaaaatttattaataacacaaatataattacaacatataagcttataaaattttatactcaattctaattctatatcatcatcaactacgaaacaaaaaagtatttacaaaatgaaatacactctttaaatcctaagatctcaactttaaatattattagtattgctccaaagaatgacttaacaatatacatgtacattctaaaaaaaaccattaatgaattagcacgtaagacttataaataataacttaccatattgaaaatacctcaacacaaaagaaattaaaattttttaattattccaatatcaagtaaactttgtaaaattaaagtttaaaattaaacattagctaaactatactaaaattataataacattacacatacttttttctattaataattaaacattaacaataaaattaaaatgctataaataaatatatgaatctttataaataaattttttctcaaaatattatctttgtctagatcctttggcaacaagaagtgccttgcacttttcaacagtaccactgggtctcaatttctacttgcaacctataatcttacaatctggtggtaacacaactaaatgccaagtttcttttgactggagagagtctatttcgtcattaataacttcattccacaaatcaacatatagtgaagtcaaaacttcttaaaggttagaaagatcctcttctaaagtatattttactaaacgatgcacctccattatttctcaatttaaatgaaaatttatgttcataaaaatcaacatcattaattaaaatccaaaataacacgtgcatttaaatcataaaatttatatgctttactaacatcatatatatccaataaacacacattcatatacttttactagccattttaattctcttatgatcaattttgatggagcgttgtttgaggaggcccagagttttggtgttgggtatgtggcacgcaattcaggtgggttcttgatagaaggttgcacaaagctattccaggggtcgaattctcctgaagttgtcgaagcaatggggatccgagaagcgctgagttggataaaagatcatcaatggttacgggtgatattcttgaaacagactgtctttttgttgtgcaagccattcgtagctccattgttatgatttccacatttagccaagtggttaatgattgtaaggctatactaaattctctgagaagtgtttcaattcattttgttaaacgatcaacaaatatggtggctcattcatttgcaagagctactatattatacctgattgtcgttttaatttagcgtctattccaactgttttgttacctcatttggtaacagaggttatccattaataaagacatgtttttaatttcaaaaaaaaatcttttaggatcaagaattctaatgcatgccaaacaaccccaagttttaaaatatgaaatattgaattgtttattttttaaactttcataaatcaaatttttgcttttagatttaagaactctattaagcacataatacacagttaatttctccccaccaatgaaaagcaacactagaactcaacaaaataacaacaacaaattcaataagagttctattttttctttcaactttgtcattcatttcaggtgaataaggtacagtattatcatgtatgattccatgtgggttataaaaatcaacaaaagtagtagaatcatattccgtgctctctatcactacgtaacatcttgatcttactattaagttaattttcagtttcagccacaatagtaaaatatattgtggcaagaacaaagaaataaggttgactattgtggttcaaattcactctgcgattctgattgttaaaatttgtcccattaggtttcagatgagtagtgaatattttattagtgttttatttttagaaacaaaaacctcttctttttggtcttgctttcgagcttcctccttaatgcaaaggcgagtgatcaaactttctaacaaaaactcttttgttttgtgcgtgagagtacttttaaaatctttccacaatgagagtaagttatcaatcataacaacaacttaaaattgttcatcaattgtcatactcactcgaggctaactatattaattttttatcttgattctgtccttatacatgtgtatatatatatttacaaatttatctaatagacatttttaaaggattgttcaagtagacccatatctgttttgcattcacaaaatgttattagtctaattttgttctataactacgaacgttgtaactatttaagactacttgtaaatttttaaatttttttaaatattttaaataatttacaataataaaaataagatttaaacaattacttactatacatataagaaaaatagtcacgcagtcaaaacagagaaaagtctaccgaaacaatttagggtttagaggtgtactgtaattaacgtcatctccacgtacgaatgatgcactttaattttagggttgttatagtgtagatataagagaagagcatatatatatatattatatatatataattgacatgcagctaaagataaaccagaacaaaactaaattataaagactactataccaatccacagtactaaacttaaaaacaaaaacaaaaagtaaaatgcttccttaacataccacccttttatatattccaaaagtagtcgtctgtttaaaaagtttaagaaaattatttaagaataacaaaatctaagatattttgatagaaagttttttttttttttttgatagaaagttaattacatgatataaacatttctctatagccaaatgtccaaacccatgttgacacctatctataaagtgtacatatatatatataaaaaattatatgcatagatttgcatatggcccacacgtatatcttcaccaaatcttggagtactatataaggttcaacaaataaaaaaagagaattttataagcaacaaaaaaaaaaaactaaggaaatataaaagaaaatctctatatacatgtgaattttgtgttaggttaggggatttatttatttattttttaaattgttcgtacaacatgattcttatttggtacgtaaattgattatcatctcagattttttgttttttttatttatgatatatagtgtttattaatgtagtcattgaagatttcctccaaatttttaaaatgttcatatatgaatattgatatctgagttcaaaaaatttatatgttagtgtaaaactaatttatttaagtttatcatacttaaaatgattattattggatctttttggctctttgccttttaataaaattatttttttcttataaaaaatgttatgtacaactaattttttaaactctttttctttttagattttataggtaaataattaatattagtaaaacatttatattataattacaatatacactaattatatataaaataaaattatattataatttctcgtgcgttgaaattaaagacgaagaatattgttattaggtaccttaaaatacacatcaacatatcgatatgatgcgttgtaagtagtcaattttctatgttatgtattaaatcaaaatatttaagacccgatattgaattgtactaataaaagtatatatgttatattttttatgttatttatcaaatcaaaaagtgtggaaccagctgatattaagttacatgactaatattaacatctttcaaagtggaataatgagggcaaaaataagtcaagtgccataaacttttattgtagctgagaccaatcccttgttgaaacgtagtctatataaatagtatatttatatgcatgcatgcatggatgcatgatatatatagatattatatatatatatatatatcttgaagtataaggtttcaaagatagaaaagtgagatcatgtatagtgtatatatatatatatgtaaatggggtgagtgaacatgttctgttaaagtctatacccaataatctctatcactggttgttgggggactttgcttatgctaatgtggcctgctgtttctctttttacgtactttgagttgatatcttatttcttttttatgtactattttataccttatagaggtgtcaaaataaaatatatacattttattctaaagccctcactacataaccaccatatattatatataaattaacaaagaattatacttaattataaattataataaatcttttaaggcataacgcaagatgatttatattgaccgcgtttttattattatgtatgtcggtagggttggggattatttcgttaaccctacaatcttaaccaaagcttaattaaaacatcaaactatttataattaagctaaaaaaaatgggcaacaaaggggatgattaattagttgtagttagggtaattatatagtattataatggttttttttttatgaatcagacagtgttttcattactccaaaaactgatttacaaactacgagcatcttcataaagtaatctatagtattatagtattattacttgttatatataaattaaaagaaacttaagtttaaatattatatatagattatagtttgtatttagtaaagaatagttttaaatagtattttttttttatttaggtgtaattaagggacaacaattccaatatattaatttttttcgtttcataatagatttgggacgacagcccacgaacaaacatcaccccattataggttcaagataatactttacatacaagttagtatcacctcatataatatggacgatatactttatatagaaaatcgtcttttgttacatggaacgacaattttttttatcttgcatgagaattgtgtcaccatatggcgtacatgaaaagatatagtcaccttagagttatcatctcatcgtgctttgcacacatttatatatagtatgatttactatgtaagacgataactagtgttaaatatcaattcaaaattgtcgtcccaacgttacgctaattttttagtggtcatgtttgagtccatattacatgaccaaaaacatataagacctaacctagagattaggcctctatgttggagagctatatagcactacttgaaattggaattatagtgttgccactttttctaatatgggaaagattcttcctaagcttccaaaacatggtctataatataacatgattccattataatatgatcataataacaataagaacttaagatattttctttgaatataaagcaaaacatctgaagaaagatatgtaataaataaatgattccaatataagcatgaagggacatatataagagagtacacaaggtaattatatactgtttcttccatcatagtatggccacgccaagtaatttggtaccaagattctatagctatagcccatcatcattcacactcactctacatatagctacctatatactatataatcaactatatatatgctcatcaactttacttcataacgtgcctatcaaattgaaaagactttatattttatttaattgatacaacaaattaatcataagattaaatctcaacaaacattacaataataataagatttttgccagcgtattttatgcaaaaagtaccgaaaacgcactaataaatatcaaaacttctttgttgcgtacgtgtgtgcgcttttatgttgagaacaaacatcgataaaagttcaacgaaaataatattttttttaacaaattattaataacaaaacgcatatgtgaggaaatttgttctaaaaaccactcgttataatttttcatttgtttctaattaaatataattttctctctcggaactattact

SEQ ID NO: 14537 - DNA, 7276 bp, Cannabis sativa
aaaaaaatatgtttataacattgtgaaaattgaaaaacttgttagtttcaaggactttaagaaaagtttttactctattaattaccatagaaagttccactcttgatggaatcctgatttgcatctcccaaagctgcctcactcatgtacttgtcagccaattgaactctcttaacattatcttgttcttggacaagcatgtttccatattcgaggagcttttgaactgtcattttaggttgatcaaaagtaggaggaccttctttcgagttcacaagcttcttcccaatggtctcaactccaacatcagagatccatttccttacttcatcatcataaactctggccctcaaggcgccaaagaaatctgcaaaagcaataacaaaagttacattttccaatgttcactgtcccatataataagccttaacccaaaaaacaagtccatctaataaaatctaaagtaatagcaaatgagtaaagttatacaaaataattcttaccaatggattggccagggaaagcatcaacaagcttcacaatatcctcttggggaatattgtcagtcttgaagattccaatgcagacaccgatccggtcatccctagtaggagcccagtaaaacttctccatacgaccatcacgaatgagaggtgcatacaaagtcgagaagtcattaccagtgactataattggcactctggggttatcctccttattgtacataccagggagctgaacatttgtggggttgtcagcaatgttcatgagagttgcattcaccatttggttgttcacagtgtactgtgttgtcccacccatcctaccagcaccagcatccagatcattgatgaagagagcacacatctttcctttcctgattatgtcagctgcctctcggtacctttgtctgatcaacttagcaggctctcctgcatttccactttccaattctccagcactcatcatgatggggctgagatatgtagtgacaatgacattagtaaccaaattgtacaatatcattatgttatgatttcaaaagcaagcaaataagctaaaacacttgttagtccctcaacctacttgattcccatcttggcaagcacaagctcacactggaaagatttaccctgacctttgcctccccaaataccaagaatgagaggaacctgaatatgtgattagattggtcaatacatgactaattatctgagctatgtatcaaaaccattcatacatgtttattatgttcttgccttaatgttaggcagtgtcataaagttcttggtgatgtgaactacaagcttgtccatgaaagctggagcgatgtagaacccatccatgctgttatctaagttgtatctgaaacatgaatcaacagagccaagatgattatatcattttgcaaattcgaaaaccacaaaatgtaaacaaagaaatataaggatgtggtttacttttcttactgtttaagtccagtactaaggtattcatatgagctcatgacagcaaagtgagtaccagtccccatgggagcttggaagagagaatcaaccaatccctttcctctggtaatgtcctgttgatcatcggatacgtcataggcaaggcccttccacttgtccttatcagtctgagtgtcttcatcgatttccgccacaactttaaagcttccagaggcaactttggggtaggcagctctttggttcaccagcttcttcaagttagcaccaaagaaagtcgaggttggcacagaattgccaccagaagcaacgttgttcaagctcaactgcacaaaatatgaacatggtcattagcatataagacattacataactacaaagttcaatcaatcaaattactgtgtcaaaagttaagagaaactgcccatgaagatgttatttaaaaaatgaatgaatgaaaagtagcagaagaagagtgatcaaactagtgagaaagtgatgaagacattacagtagttctgataacagctccagtaattgaaactgcagaagccatggctaaagagggtggtgatcttagtttatgaaacaaaacaagaaagttctggtgtgtgtgtgtttaggggaatgagtttgttagtgtgctgaattttgagcctttaacagtacggagatgtgatgagagactgagaaaatttgtggtgtggttgataaactactaacggccaaataactcagattagcctcactcacacgtggcttgtgttggaccaataaaagattctcatgaggttgggatccatctctctctctctcttcaccactaaaagtctttctttcttttgttattttgatttggttggtttgtctttgtccccactactgcaatagattttctttggataagaaacgagtcactgtaatagattcagtttaagacaaacgagtccctctaactatgctctaatgagtaaaaaaccaaaggaaaaaaagaaactaacacaaggattggacatactttaattattattggtcccctcggtgtcaacatttgattgagtacttcagccaatagtaactaaagaattgaaccaacttttcacaaaatgattaaaaagataataattattgtgatccttaaccagttttcattgcttctcagtcatactaactgaaggattgagccaacatttaacaaaatacaataaaattttcttttcaaattggcatcttcaagaagtcccttttctgtaaaggtatgcgtagtaaagctatttgagttgaaacacaagctttgaatcttctctaaattattgctaaaaaaatcgaatgccattatttatagcttacagttccctttttcaagtctgttcaggtaaagagcataaatatataattacagaacatatcattatctctcaaggcaacactagtatgcacataaaagtcaacagagttatcatgaaaatacgatggtggtggcaattgctgtcttggtacttatttgttcaagattttggattctatatcttccaagctcattcctttggtttctgggacataaactacaacaaaaataagtgataatagagcaatagctccaaaaaggaggaaaaggttttctgctcccaacaactcctgcaggatcataagttgtgttagttgttgatctcttatcaaccaaggcataacaatggaaaacataattcaaactgaaatgacaatattgacaatgtaaggataacgatgatgacgacctttagtggagagaatgcaaatgttacaacagcatttgaaccgaaattagtaagaactgcaagactaattcctcttcctcttgtacgaattggaaagatttctgacaccatcagccaactaataggcccaaaggatatctgagatgacaaaagacaaaaaagaatacatattgtgtgaaagttgatcttaagttccaattctaaaaatgtgagaaccattactagtagcagcatacgtatctagtcttcaaacacttaatcaggaaataaaattgagtggaaattgataatagttaagagaaaaacttttacctggtaacaacctacgtagagaagcaaagcagctacagcaacaagtggataccccccaagaaatttgtaataagcagagagaagaaataaggaaacagcctgtggcggataaaacaaaagcagaataaggctaagctacaaacgtatttttcacctctatggatgctactgaagtagctagaagaatttaaggctttagatcaaatgcataaataaaatggatgcatattttttctcttttattttaagacaagaagcaattaaaggtggggaaatcttaattttgtgaaataaatttcaaaaatagttagaagcatacaatgccactgacacctccgatcaacaagggtcttcttccaagattatcaactttcaggacagctatccatgtcattagcaactgcagacaaattaatcacaaagaaagtatgatcaaacactaaacagaaacatgagaaaaagttccccccaaaaccaacaataagaacaaaaagagtactagatgcaccttaaacaaaccaattacaactgacactcgggttgcatcagaggcagcagagaatcctgcagtctggatcaatattataatgaatccattatactgtaagttaactaaaggaataacttcacttcaatttatgaggtcaagtttaatgatcaattacctgaagaattgaaccagcataatatagtacacttggttgcccagttatctgttacaatcaagaagaaatttagcttataaatatttcatacactccattgttaagttttaaaatgaaaacgagcacaactaacaaatatatgcagtagcatatatgaagaaaaacctgctgaaaaagaactaaaccaccaccaatcacaaatgccttcaaattcgggccttgaaagacctccatgaaactaccctcagattcctgatccttataggcatatttcaatgaaaccaaagtatcttctatttgcttctcagatactttatcaccaagaggtcgtcttctcagtttgctcagggctacaatggctttctctttcaattcttgcacaggccctttaccttgaacagccctgagaagcaaccaccgtggagacggtggaagactccacatgcctagcaacataagtacagcaacaggggcactaagaccaaacatgaaacgccacccccctacagcattaatctgaaagcttcctacaaagtaacccaactgcaggaggatgcaaaagaagaattatttcacttagccaagaaaatgtgggcaaacttcatcaatgtttgtttaaaataccaagattcccagaactatgaaaagctcctttaacgatactagagttccacgaatttgagacggacatgtttctgcaatataaagaggagccccatgcattgcctgtccaaacaaacagatgatgccaaaagcatgtttgagtacatgaactctaccagaatctcttccaacatacatatacacttttctattatttgggaggaaaatagttataagaagtttaccaagccaataccaaggccataaagaagccgtcctactaagagaacactaagccctggtgcatttgcagtgatcagacctcctaacagatatagtaaagctgctatgataagttccctcctccttccttttataagccaattcaagaagttgaattagaagacactcgtaaacaagattaaaatttcaggacaaagtaaacaagcaaagtatataccaagaaaatcagcaattgggtacacaagggaggaaccaagaagagctccatatagggatccacttacctacattaacaatacatagtcaccttaaaatagaagtataatccacagtgatcaaactttagaggaaacaaattaaaaagttctgtacttgcacggatacagtatttgtatgattcatgaccataccacaagaccaagctgaacagcgccaaagttgaaccaatctgtgccgctaagctcaggagactgaaatatgtacattacagtttgaatcaatttaggtgcttttgtacataaaaacacattacacaataagcatttaaaataatgagaattgccaaactgaagacgtacttgcaatgagattgtggcgccggaagtcgcaccaatgtcatacccaaataacaaacctcccaatgcaggaaacaaaaacctgaaattttccttaagatttaataacccaagtaaaattatactgtggacttaattctacatgttcacgtatatcatagattaagcaaaagtacctatataaacttgtgatgcaacagtatagaagctactcgtcttgatttagtaacagaagcaaaatactaatgaatgattcaccatcatttttaattataaactacaaaaacctattaaatttatagcagaaaaaacgtacggcaatatcacagaaaaccaagaaaactcctcttgataatttgcctcatcaacaagcgactcagcttcttcccctgaagaatacccttcctgagctccagcctaaaaagaaaaattagtcactacccaaaacttgaaaaagctaaatacaaaatgggtgggcttcattattaccttggcagtgaatccaagtctagccccttttagacttgaagaaacggcataattagagttgaagcaagtatgaaaggttgcagagaagtgtgtggttgggtaggacttagtagtattaaagaaaaggagttgagttttctcattattaaatctgtgaaagcggaagcgtttctcagagagtttcaggttcaacaaaggtccactaccactagagacactgtaagccattgtgaatcactagacacacaatgatcactcgtttacttcttggcgccttattatctctctttttctttttctttttctattatttattttttttattatgtaaaagaaatagccaattgcggatgaccacgtaattggtttgtgatttagtgattaggtatttggttttttgtttgtatatggcgtaaagaaccaaatatgttgatagttttcgcaattgacttgcactttagatgtcatttgggtttgttggttggttcgttcctggtccacaggtagagcttttgcagaacacagaagaaaataaattatacccaattccatttatcttctcccttacactaaacaaaataactattcttatcactttatttctctcataaaaattagattcgtaacagaaacataataaataaaacagtttgtttcagaagttacctgaaaaaaatgatgatgagatctctctctgcctttacattgcatgactcagcttcttcgatagatgttgatgttattgttaagagagagagagagagagaaaaagagttagtcaaaaataataataacaccaacaaatgcaaatctcatgagccgttacttattttgtttccttttttttctcttgattgtattgtaaccgattcaataacggactcttattttaggttttttttttaatttgcttttgctttaatttttcgccatattcaaataaattgcatctcaatttcattgactcctcgaaaatatttaaacagagatcaatcgattcattgaatcatccaattcatttcattctttcgaaaaatagaaaaaccactactagagactaacataatggaagctgaagcgaaagccgataacaagtcgccgacgaggctgaaggctcacgcgccgccgtgtcttcttcttgatcagatcatatcaatggccgcggt

SEQ ID NO: 14538 - DNA, 5747 bp, Cannabis sativa
  modified_base (3181)..(3186): a, c, t, g, unknown or other
  modified_base (3212)..(3217): a, c, t, g, unknown or other
  modified_base (3243)..(3248): a, c, t, g, unknown or other
  modified_base (4136)..(4138): a, c, t, g, unknown or other
  modified_base (4407)..(4407): a, c, t, g, unknown or other
ctttctgctccatctgatttactttcaattgtaagggatgatagtttttcaagttgattaataaaacttcctttttttttaaaaaaaaaaaaagccactactagaaaataggccacttctgtcggtaaccaagacgatcaactacatagaccatcggtaaagacaagctggtatttatctcatcgttttttaaccgaagcacgaaaactgaagggtcaatttatcacatcaattcacaaccatcatttaaagttatcctaaaagttataaaccgtcatttaaagaagcatttcttatcgattacattctgacggaagcctttctcatctattttatattgtcatttaaagtatttttcctgacagttataaaccatcatttaaagtgacttttcccgatagttataaattgtcatttaaagtttcatatttttatgatgcccatatagccgacagttttatgaactgacaaaaatagtatgtaagataatttcaaactgacaggaaaggtcaattttgtagtaatgcatgtaacgtgccttagatttttggacattgcaatttggtatcaaagccttaacccagccaaaagtttggtcgatgaggattttggaccgcaaaatgggggtgattgtgacagtcagtaatcacgtgatcattaaagggaaacactgagtaagctgtgtaatcctacatcgtttggggaatgtcaaatgtgatgattcaaaaattatgtaggtatgagactacatagttgaagatagcttaaatggattgataggtacctatatcaataaggtacatcttattttttgtgacccatcatttgagaactccaaacttaagcgtgcttgacctgaagtatgggtgacctattgagaaagtttcccagaaagcgtgcgagtgaggacaaagcacactgtaaagactcgtgttaatttccaaggaaagtcgtcatttcaggaagcaaacagaccagattggggttcgtggccagatttggattttttttaaaaaaaaatcaggtgtattaatgaaaaacgatgcaaacaggttaacacaatcatatattagttagttgcattagttttgaactaacgataccactcaattgtattggttgataggcatgttaaaaagatccatttagttggagcggatcggagctctaattcgacaaatcatttctgatctgaaacattcggatacttattggatcttggattagatccgctctacctcgccttattttttttttggatcggatttgattttaatatatatatataaaaacttaattcaagacccagactcagacccaaggcaggaccgagatctggatccagacctaggactcagacctcggacccgtaccctagacctataccccagacccggacctggactaagacccagagctgaacccggatcgggacccaaaatcagatgggatctgggacctagacctagacctggacctagacccgagacccaaacttagacccaaacctggaccctgacccatacccagacttatgactcaagattcgagacctggtcccaaacccgggacatggacctggacccaaacttgaactaggatccagacacgggactgggctcgggatacgagaccgaagtagacctagcatcgaactcgagacccgaactcgtacctatgactcgaacccaaacccaacctatgacccgggacctcgacccaaacccagataaaattaaaattcttaaaaaaaagagataagtcaggttgactcctagacctatcgggcttaaaactaaaaataaataggctttctcttcaattttaattgaatgaaaaaaaaccaatccgaactcaaatgtgaattaacgttttttttaaacaatatcaaaattaagatttgattgtgtagtgtcgtaaggaaaaaaaaagaattggaaaagaagaataatatcattacataatttgaatcaaattggattatagtcagatcagattggaccccatgtatttacactcctattggttaacaactgacaacacaaatatttctcaatttgcattggtagaacataagttggttcttatgactgacacttacatcagttacaaaggctttttatactattaatacctaatacaaagtgaagaggagacatcgaattttcttgtgttaatctccttttaggtttaaagtagttgtgcagtgagccattataaataagcatcaaagaaaacctcttcgacaatggaattattctctttatttcatatttatttcttttttaagaaaattaaagttttatactcactacaaaaaaaaaattacttttagtgataacattttagtcacaatataatattattattttttttttactaaatgtgacttttgctcacaataaaaattatacatagtatttagatacaaattataactatttaattttagtcacaacaaatattgttactaaaaatacatttactcaccaaaaattgtaatttttgtgactaatcacttacctacaaaattaggctttagagacactttttttaagggctttcagcgttaattttaaaaaaattcactaccgacgctttaagggtaaaaacaaccagacgacatagggccctatggcatcggttatttcataataaccgaaccgacgtcatagggcccctatgccgtcggttattatacaataatcaacgccataagattattataaaataattggcgctataggatcattctatggtttttttttcagctttatattttgtgttttagcataatttatatatattattttattattaatataatgaaattatgtataaactatatataataagcataaataaaaattaaaataaaaagttaaataaatacacattaacattgaatatagataaaagatggtgcagattttacttcgagtatgtgatagggtacagaaagtgaggtgagtgaagagcacttagtagcttttgaacaacataactttttcatttttaactatataatttagcaatgtgatcacttgtttttatataatttttcaagaccaataaaataaaacaataatttaaggaccaaaaaaaaaatggaaaaaatcagagaaagggctaaactttgcaagaaaatttttgaagactttgaacattaataacttttgannnnnnactttgaacattaataacttttgatnnnnnntttgaacattaataacttttgatccnnnnnntttttttttttttgaacatgggtagttttttgcgttctacacatcccaaacagcctacagtggttttgccaatcattttatccaaaaaatactcttttgtatactaaaatcatgttatgcatccccttcactcaattttttgtattttattttgttattttacttaaaataaactaatagaattcttatgttaagtattagaatcaatgtttatgttgtatttgttaattctactacaatgaaatgtgcaatactaatttctttttatatatctcttctaatatttaaataaaatcatactagctaatttatacaaagattatgctttggtatattcgtaaagacttatcaatatatctttttggtcacaagttcaaatcccaatagacccttttttgtattttttttagcttactatatctatcattaacactcaacaatatctatcctacgtattacatcaatattattctaaaatatctatcctaaggattgtcaaaatatatatataaaaaatattcttataaaattaggttaaagaaagcataccttataccaaaaatcatgtactttacttccgataaagttacttccgataaaatcctaacaaccaagtttaagagaaacgaaaaattaaataattttatcctaattctacaaaaatttcggcaacatcatgactataattgagcgtttttacaaaattcaaacatattaatagcaacaaaatacaattcaaaacaatataaaataatcacaacaacatttagcaatataaaaatttaccacccatccgactgcagtacatatattcacaaaacttaatttactatcgatgaatatttaagatattcaaactcatctaacagaacctacttcactacggannnatatttaagatattcaaactcttcaaagcattcataattaattaatattcaaagttaataaatgtatacctcgacctagctagaaaccgatcaacaccaaataagttggatccttgcaaattgacttcacaacatacaacataatgaaatactacaaaattacagttttctttatttagctacttactagttatataatttatgagtaactagttactaactagttagttatttattactaaatagttactaatgagtaactaattagnaataaaaatacatgaatatgaataaaaattagtaacttgctaagtagttgtaactaactatttactagctaataaaaaattaaaaacacatgaataaaattgaaaatagaaaataattgttacaaaataaagttgatttctaaactaattttttagaaattaatttctaaatttttattttaatactctcctatctcattctcattcacaatatttaataaaactattattttaaaatattcagtatatacacatgcatacaatatataaaatactctcctatatcatattctcattcacaatatatatacacaatacatattcaatacaacacaaaatacatatatatactattaattaaagttaaatttttagcttattacctccatccaaccaccaatgtcgataaaatttcggtcactacgcacaaccacaataacacaatcttaataatatagaaaaatcttaaaaaaatttatgaaataaaaaataaagcaatatacattactaaaattagtagaaattagatttttactttaatgaatgtaaagatacaatattttctccactaaaaacattgaccggaggtataaccaccacagcaactacctctaccttcggtttatcctaaaaaggagaaaaaaaagtgatctttttaggtatatagttttaggtatgaaaaatagaacatttagaaacaaaaatgagctaaaatagtaaaaaaaatcactacaagaagtactcgttttgccggcgcattattgcactggcaaaagtacagtatatgtgtcggcaaaaggtgtcagcgaatcttggttggtaaaggagtttttactgccgattaattgcgccgacaaaagttaaacgctggtgtaaacgaatacccttatcctacgtattacatcaatattattttaaaatcattctatcctacgtattacatcaatattattctaaaattattctaattatttaaggattgtcaaaatatatatatataaaaatattcttataaaagtaggttaaagaaagcataccttataccaaaaatcatgtacttgacttccaataaagttacttctgataaaatcctaacaaccaagtttaagagaaacgaaaaattaaataaatttatcctaattctacaaaaattttggcaacatcaggactataattgaacgtttttaaaaaatttaaacctattaataacaacaaaatacatttcaaaacaatataaaataatgacaacaacatttagcaatataaaaatttaccacccatccgactgcagtacatatattcacagaacttaatttactatggatgaatatttaagatat

SEQ ID NO: 14539 - DNA, 8228 bp, Cannabis sativa
actgtagcgtgccttagcattagggtgttacacatatgcggttcattctattaatcatggtggagtgatgcaccattttgtgttgcaatgttaggggtatgaacaatgtcagtaaacaaaggtctattttagatctttgtagatcaaataagattagttttggtgccttattaaaaaccaaagtcagaggtgataaaatggctggtatgatgaataataatttccttaaatgggaatactatactagtgtaataatttaggggtgaattcttttgctttgaaagaaaaagtttgtccaagttgagatgttctttaaggatactcaatgtgttcattgtaaagttaaagtttcttgcttcattctggttttttgataactattgtttatggtttgaataccatttctgaaaggaggattctttgggatcatttggatggtcttgggctgagaaacgtccctaattgattgttgggggctttaatgtcatgttcaactatgatgatagagtgggcaacagggctattatgtatactgacatctcaaatgctcaaaattggctcgctttaggccaagtagatgctctaaagtgttctgattctaattttatttggtcaaataaatacaatcctagtgttcgtatctattccaagatggatagagtgttcaaggataaaagtttattcgatttgtttccttccacagaggtgataatgcaatgagatgttgaagaccactgttattttcttgtaaagaagttggaaatagggaaggttggcatcatttttttaaatttattggatggattactctttacaaatctttgatgctttagaattagtgtagtctgatctctggtaagggattaaagtgtatcattggtaagttgaatagacttaaatatttcctgaaaagagcttgggaacattcccttggattatcaaacggctaaagacaatttcatttcttctcaatctaatttggctactaatcctttcatttttagtctccaattggctgaaagagaagctaagatgaaatacattactgctagtcgatggtatgcgagttatattcagaaaactagaaaattaattggttatgaaaattccagatatttttatgctagtatggagaaaatgatcaaaactaaattactacttttattgataatggtcaaattatagatgactatgatcgagttatttccgactagttttcccattccaaaaattttatgagaatatgaagctcaaccaccaagaagattaacttagaatgttttttttatgacaaagtttttatcaaacctataataacacactgaagcagtgtgaccaggtttatggcaaacttgacatagtaatctaggaattgagggagggctacttcttgaaaatctatcaggaggttgattgttgtatccataagagcctctattttgtatccatagaagcgattagaggcatcaagacgagttcttgatgtgttaatactaagactggtagaaatcattgaagaaagatcattaacgttgtaatgctgttaaatcctgctttcatgagttagcaataacgattgaatagattcgaaagacagattatcaacaagactagtcacatgaacaacaacaaggtcatattcagggcccaatccattccgtttatgcatgatacatccattagaagaccaaaagtaaaaagagagtcagctaacatctttaccttatcatagtgttgtaactatatttcaagcaacaaatatgatcacgacacatgtaaaagggcaagaagatgaactagctcgggtattgaagaaataaatatgttgaacaacttgccttggagaatacagaatgcagacatatttaagtctctccttaatcaattaaggacgagtcataaataccaactgttatttagtaagaccaatgagataaataactaacaaaaaaagttcttaggaaatacagagtaaagaataagcaagacaagatgatatatgagatagacgaggcagtgtaatgactttttaacccaatgagcacaaaagatacaatttgaaaagcttattataaattcttataaaaattatataaaggcttcattgtaagcggctaacacgagaagaaggtcaaagaaagctcgtcaaactcatttcttttacagtgtatattgcgaggcataaagcaagatgtaatatcgcatcacaacaaaaattagtcagcacaactgttttggataaagacaaaagcaatttatataagttatttattttatccatgtgttgtaaatatgaaatgtggggattatccatattttatgaacagttgtaacgataaaagcacggagaagaactgccacccccaaatacctataaataggggaagaattcccagactaagggagagacaaattctaaaagcgaagagaatatacaaaatattatatgagttgtactctgtaaactcatcaaatctcgataataagatggacttgtggactatgaagatttacctttaaaaccacgtaaaaaaaaaaccttcttatttattatttattatttattattgttataactgttatcctcctaaaaatatatttattaagtttaggctcatttattggttaacaaaaattggcgttaacaatttggtactttcattgagagccttctttttttttgaaaaaaaaaaaagaatgtagaagacacatctcccctaaataacattcaggtcttttcaaaaccaccatggaaaatactccttaagatgaaaatgatcaacagagagaaataactcagggtcttgggaaagaaccccagggatctcagggaaagaacatggctgagaacccacactctgggagaagaaatgttgaatgttgtttcaaaagaactgaggacgagatccatgcaaggcgtagccaggatacatatgattcgacgagatacgtacccttggtggaattggaaaatagataacttcggcagagattggcaaaatcgaatcgaaaaaatactgaattggagcgtgaggctacgcctgcaagagcggtacatggtgatacgcctcccactcaaccaaacacatccataaggtggccttggggaaggcctagagagttgagaaccaggaggaatgaggaaacccttcctagagaaaatgtcaaagaaaatcccacaaatccccatgatgaccaacctcaaacttaacacctagattttgaggcatcttggacacaatctttgggaggcatgatgttaaagataagatcacctggtggaaaaacaacagtgacttgaaataaaaataatggcctcgccaaggggatttttactaaactaggtaattaaggccaagaagcttctcgcaaatagtatcgtctatgctcaattgtctcattgatatatcgcctacatcgagtcgatgcttcctcttgattcactctaaggttatgtgctctaatcttttcatcatttattttaagaatagattggggtttgtgagtctgaggttttaaatcaatggcttgaaattggaaattatcaagtttcataaattctaggtattcaaactcatgttcaaaaaagacattatcttatttaaaagaaaagtgcctcaaaattctaaaaatgcaaggacataaaaacttaggatacataaatcacaaaaccctaattgtcaatcctaaattgctaaagcccacacaaaaataacccaatataaataaataaataatgcaaaagaacattgaacaatgcataagaaagaaacaaccaaaggatcagaataagaaacttagggggtatttgaatgaatggaagtcgtgaagaattcctcactggaaattttctatacaggggtcttgtatataacagagtccaggttgagaaaaaaatggtgggcctgattcgggaaaacaaggtaagagaaagagagggcatgcaattgtgagggagacagggttgagaatttcaaattttttgagctcaatgaaacagaaatggtggaatgaagggaagcatcaaccttatatgagaatttctgaggccatttgatcgtaatgatgcataatcagatggatgagaacaatagaaaagaaaggttagtgtttttaatcctgaaatgttgttttctcgaaataagagaaacttccaaaataaagtgcattcagtacaaattaggcgaaaaatatgaccgtaccctttgttattaaaaagtcattttggctctcaaaaagtactttttagggggaaattgttatacccatttttcgagcaacaaatatggtcatgacacatgtaaaagggcaggaagatgaaccagctcgaatatttaagaaataaatatgttgaaactcgtctcaaaaaatacataatgcagacatatttaagtctctccttaatcaattaaggacgagtcataaataccaactattcaactattatttagtaagaccagtgagataaataactaatagaaaaagttcatctcgagaaatacagagaaaagaacaagcgagacaagatgatatatgagatagacgaggcagtgtaaaggctttttaacctaacgagcacaaaagatatagtttgagaagcttattataaatttttataaaaattatataaaggcttcattgtaagtggctaacgcgagaagaaggtcaaagaaagcttgtaaaactcatttcctttacagtgtatactgtgaagcatagagtaagatgcaataccacattacaacaaaatttagttagcacaactgtttcggataaagataaaaggaaattatagcagttatttcttttattaatgtgttgtaaatatgaaacgtagggattgtccatatttcatgaataattataaagataagattaggggaaataattgccacccataaacatatacaaataggggaagaatttccagactaggggagggccatattctgaaagcgaagagaacatacaaaatattaatattatttatactctgtaaacttatcaaattgcgataataagatggactcgtggactatgaaaaattaacatcaaaattacaaaaaaaccttcttgtttatattatttattattattattattataactattatccttttgaaaatatatttcttaagtttatgctcatttattggttaacaaaaaattagcgttaacacatagtaatcagaaattgagagattacccttttaaatggttgaaaggtgagatttgatttgaagaagacaggctttgtactgactggaaaatcgttgagcaagagcgcgccaaatatcataagatgaattgtgatgaacaagagatccaagaacactctttgtcattgacgacggagcccactagggagcaattgatctttccttttctaggtggtgaattcaaggttgatttctccgatgacaagtcgctgaattggtgcaatgccagtgagcaggatatcatcaagtccatgatcgatgacagtaggaatcacttgagatttccacacaagatagtttgttcaatcaagacgaactgtgagagaagagtttagagagttttgaaatagattccattaatgcattggagcatatggagcatttggtggtgcttgtgtagcgagcagagtatttgatggtgttggaatagttgtggtgtgttctgggtgtctaggatccatgatcaacgcgagtcaatgacttcctgataccatgtgagagaagcttatctatacaatttctatcaggaccaatttcttgaattgaatctcaaagaactgcaaaagtttgaaccagttcttaagttgagcctttatttatataaagagaagagatacaagaagaagatgttgaaaatagttgaaacaactaactaactctgttaaaacataatacatgtggtaaaaattaacaacaaactaactctagcacataactaactaaactgaatgtaagtacagtttgttacttatcagagataaaggcaaagaaaaagatacatagttaaatgctgataattaagaatgatggcaaggtcgaagtggctcaaccaaatctttacccttcaatgaacgagccactaaatgtagccgaactcgaaggtgaaggcatgatgaatgaggtgcttcgaagtcaaagtcaaagcatcgaaattgaagttgaagtaagttgaattcgaagtcgaagtcagcaaaggttgaagtcgaattttcgaattttcaaatcgtgaagaagatgttttttttttttttttttgcagagataattagggttaagaaaacaatgtataaataattttaaaaagctaatagaatgttatttctgtaaaagtatttcataaaattagaaatttaaaaaacgaacatatatacatgaaaaaaaaaatggtaaaagtgaatttaaatttctcttacttttggtccaatttaaaatatgccaattaaacaaatgaatttactttacaaatacctcttaatttgtttcagtaatatagagtaaaaataaaataaaaagctttaatatttcaaaatttcaaccattatttatataatgtgatataaattaactaaaaagagtcatatacccactaaaaaattatatttataactattaattaaatactaaattaaagttggtttaattttatagaataaaccaattttagaagtatactttaatcatttagaagtatactttaatcatttaaaataatttattgacaaatgctttataatgataacattgaataataatcactctccattttttctattattatactcttcttatttatatataattaaagtgaaacatcctaaaattataatatataacactaaaatcatttttaaattatacttaattgttttgtgatatttattcattttaaattaatatcttttacactaattaaaaatacttaaaatatttataatattggataatacttcaataaaggtattgaaaatgactttatgtagagtacattttttaataggtatcattatttcattttatgtccatatttaatttgattttcttatttattctttttataattatttgtcaaaaatactatatccacaaaaaaaaaattatttttggtagatatgatctcagaggagagatatgtacaattttttttttcttgtattgttctttggcttcgccattagaaaaaaattgagtctcgacctctatttttcttaaaagaaaaaatatcaaagctcttagttttggttataattaaggttttttgataagtaatttttgaaaaaatagagggaggaaaagaagagagaagtaaatgataatttttttgttttgtttaaaaggaatgacagtgtttttaacaaataattatatatataaaaaaaaataaggaagtaattttgaatggacataaaataaaataataacacatattaaaaaacaataactttacataaagttgtttttaatacttctactgaaacattatcttataatattaataagattttttattagaaaaaaataataataagtgaaatatgtctatatatggtacaaccaaaaaactactattactagaacaatgaaaagtcattatagatgtggattattagacagaaattataccttatatagccaactacaatgacattggatgggttattgcatatctttgagttttttctttttttttttttctggttcttagtcctgaaaattagattttaatgtaaattgactaaaatatccaaaaataaaaatcaattatggagatatatataactatataaataaagtttttggtagggcaagtggaaaagttataatatatttttatgagggtgtttcattattatatattaaagatattataagttttcagaataatatatggtactgaaaatatatttcaaaattataattttcatgcttcatagcttattttggtatttttagtatatgaataggttacaatctaatttttttatgagtattttgtggtataaatatttaagtttatttttcggttacaaataaatattccagtttattttttgcggtaataatacataagttataattttgaaacgtttgtaagtatttagctattaagtgaagtaaattggtctaggtcatgatttttttaaaaaaaaaaattaatttaaatatacccataaaaaatgacgcataatatatcatatttttaaatatatattttaaatttaaggttttttt

SEQ ID NO: 14540 - DNA, 5356 bp, Cannabis sativa
  modified_base (5295)..(5300): a, c, t, g, unknown or other
gagagagagagagagagaactataggcgtgtagaactgtcgcttaaaatttataatctacgcaagtctgcgtatctattgcagttatttactcacacagataaagtcgaaccacgaagaattgatattgagtactacttaattagatttgtgtttctatttggttgaatcaaaaacatgattggaaaataaattaacagaaaataaaacaaaaataaaagatttaatttgtaagtgtgtttgactatggatgaatgattaggaatacgaatcttgttattttagttatccaattgttaatgcaatatattagttttctccacttaagtgatgacagattataaaaataatcctaactattctcagatcactaaggtcctaaatcatgtattatctacttgcatctctgaaataaattaacatataatttgcattgattacataatttaaatgtcacacaagctatgtaaatgctctcgttttatatcaaaacttatgtttgttgtattaaagcattcttaatattcacttctcagttttatattaggatcatagatcacattcaagatgactagtctaaaacatgtattaaagcaaataatcaaatcacaataatccagagaagaaaaattaataatcgcattaactaaatttggaaaacatcaactaacattcatcatatccctaaattagaaatttagttcataatattcatgttcacatccataataaaactattaaaaaacagaaattaacataaaagaaataaaaagagaagaaagaaacttattgtggaaaggatcagagttgccactttcgatctagccatcgtccttttctacttctagggttcaatctttgagtgttttccctttccaactcaaagttcctttaaatagagttaattgaaactcaaaatatcacaaaatacgaaattatccttgactcgtacagactccctaaccgcgccaacttcaataagtcgaaattggttgtctctacccaccatctcgtcacggccataagtggccctctcactgcgacaagattgcatggccgcgggctcattcttcctcatcgcgggcaatgaacaaaatgcaaaaatacccattccgtagcattctcgtcgtggccatatgtcaggttgctgcggcgagattgctaaaaaatttgtctttaagcctgatttgtctcgcctcagttcttttttttaaatattgatgcaattgacttgtaaaaaccacgggagcctataaacacaaaaaataagcataattttatcctaaaagcattaaaaatgactaaaacaactctaaatatcaaccagaaacttaggctaaaaatagcctaacaaattcccccaaactaattccttactcgtccttaagtaagactaaaactaaagaccacaaacaaacaaactaacagataactgagcccccaaataattaaattaccactgccacttatgaaacatcattcaataggttaaatcagaattttaattcaaaaactccaacaattaactcggatgcttctttcgagctacaatatataaatataaatttaatatcaatatttgaaaaatatcacaaatattttacatctcatcaattctctaccatccaatgttcaatatgctcgcatgacctatctctctccactaatgttgaccaccctcattctgaatcataagattctttctaggctgtaatgttttggcttaggtaaaaagtagatgaaaagtcatttaggttctattataccataagcacattgtaaaccaataaagcatccatataatttcacaatttctcgtatttacacaagaaaaattattttaatcgattgagaaagtccacttttcgaatccaacaacgctgttttttttttctttctctgtttttgctttcttttttcattagttccacttcttttcagtgagaaattttttttattttttttcttttcagtgatgttgaaaacactttcacattacacaacttttctcaatctcccacttttcacttgatttcccccataacaatccactcttccaaacgtatttatgcacttatggcataattcaaggttcattgggaatacatgcagtgaatgggaatattataagctcaaagagtggttaaaattttcaaacaagtttgggctcaaatttgcataaactaaggatacaacacaagggtcagctcgaaaggctcaattgttccaataaaatttccttaattattccaagttatagatattagggattttgcctcaagaaaatatatcatgaaagttctattacatccaaacaaatagtccacaaactaaagtagaatacaaacaatattctctaatattgacaatttacatcgatacacaatttcaagtaagtaactaaattaatccaaagaatttacgaattaagcacacagtttacatctcaatccatttcacaattaacattggcaactcaattaatcagttatcatcggctcaattatcaatactctaaatacattaaacttaactaaataagaaacataacactaaacaaaaatagaaaaaaaatagtagaaatttttaagttccctcctcaaaactaaaagtatagattgtccccaatgtgtcgtgtaaaataaagaaagaggggcttacctgcaacccccatcaaaaagagttcggtggtggtggtggttggtcataaggatagaatcattgtggatttgccaaataattatggtcctctatccttatattcatccgagtgatcaaagaattcagctgttgaacttgtccttcattaaaaattctcctttgcgccatgtagttctgcataatgagatagttcagttgaacttatatgtacaccatgactgggtcaatagggccagcaatgtggcaactcttcatcatgcacttcttcacactcaggaggatttattgggctccttgttgttgtggtattgggttctgacgaggaggaggttgtccatatggatatggatctttaaatctagatattatccctgcattgattaagcattgtggagggaccttcgagtcatatgaaaattgacaaattccataggcctcacataaattagtaatgatgtcacctaacctaagtcctccaccaaaagctcctcccaccattgtatcaaaacttctccgaataatgtcacccacatttagattgaactccttcataatggcatgtacatatttcaactgatccatctaagaatctgaaaagtgtttacttggcaccaacctgccactcacaaagtagaaccaggcacgagccacttggttcaactcacaccaatacaattgataaggttctccatcatattcataaaacattatgctcgggtacccaattgtttcagccacatcaacatagttaattttttcatcctcttcaataattctcaaatgttgttcctcatatgggaaggtggaaagcgaatacaaagcatgaatcgcccgcgttgtgactagaatatcggttccccttaatttcaccactttattctttctctcaagccaattagcaaaaaattcaagggctaaagtttggttcgccctttccttgacatcaacaaattgctcgcaatctcttctttgaatttggagcccaatagtttcaaacaataggtgattaggcacatgcaaattactatactcaatacccctatcttgggcctcaaggcttacaaacctcgccatatccaatgttggccttcccgaatctcttggagggctggatgatgatgcacccgctgcacttacccttgattgctttagacccattatttaaaactcaagtgcacaccaaaacttccggaaaaactcaacagcacctcccctcaattttctcacttttgggtgacttcccaattaattatcaattagtgtatatccacacaatcaacctcaacaacaaattaatccaaaataaacaccatccacacaccaattcttcaaaaagcaccaaaaatctaatacaatctcacaatctttgaagaataaatatgagaaatacttacattgatgagatacaatttagacaacctctattgttgactattcttgagaatcttgaggttgaagatgatgaatagtgaacttcttatttttgagtaagaatgggtgattttaggaatgatttataagggaaaaagatggattgatgagagaaaagatatttggaagtgaatgggagtgaagatttgaggaaaaatgaagagattgtggtttttgagatgagaatttgaatttttggtgatgaaggtaatgattttgtagagacagttagggctaggtttagaaagtgtttagggttgaataagaggtttaaaagtgttttagcctgagttgggcctttaaatagtcttcatgggctctttcaccgcaatgagcattggcctcgtcgtgaccaaatcacttgaaccaaatttttagggatttttgcccattttttactgcacccataaatcaggcttgtcgcggccaggtttaatttgttgcggccactatacgtggtcccgaaaaaaaatcgacttttaacgctttgcacggtttgaaaattatataaaaattctacaaattcaaagaacagaaattaaaaagctaaaaaggaataaaatttcaaatgtctcaaacttaattaaagtaataaataacttagggtgtctcccaagatcgctgtcgttatcgtcatatagtcggacgttgatcttctcttcatagcggtgccaataggaaggcagacttggcttggtcaatctaactacccaagtaaagctttaatctttcaccaatgactttgaaagtcttcggtttctcgcccttcggttccaccactccatatgggaatactctaaccaccaaaaaaggttcagaccaccttgactttaactttccaagaaatagtttcaacctcgaaataaataataacacttgttgtccaggttagaactcttttttgaccaactttttattgtgccacttctttgtcttctctttgtaaatcttgtctttctcaaaggtctcgttttgaaattcttctaactcattcagttgcagcagtctcttttcacttattgctgccaaatccatgttcatggtcctcatggcccaaaatgccttatgttatagttctactaatagatggcatgcttccctgaacaccaaccaatatggtgacataccaataggtgtttaaaatgcaattatgtaagcccataaagcatcatctagctgttggaagttattttaccaggatctnnnnnntactcacaagtatgttgatttaaatacctaagtatgaacttctaaaacgatatgaa

SEQ ID NO: 14541 - DNA, 8554 bp, Cannabis sativa
  modified_base (6075)..(6080): a, c, t, g, unknown or other
ctaatgggccatcctccaacaggcgttcattgctcagccaatcaccaatgccaagattcccaattggctctgccactcagagtcctaattccactgctctgacgaccagaacaagggaagcagggagttattcccttgagacatccagcaccttccagacacctccaactgaatcagcaaatcactcagtgaacaacagtgaagagtcaaaacaaatacaaatgaagaatcccagctcagaagccgtgccttgtacaactggtgtctcctctaacattgaaattgattatggtggccggaaaaggaaattaagcttttatggcacatcaagtagttctattccaactctaaacttggagccagaatttcaactgcagtatgaagctgctggaggaagtgaagctccaaaatactgtgacaaaaatgatgaaatggtctgcgatgatgaattctatgagggacttgatctagatgaggttgaagcacaggcgactttgctgctcaagcagaaagcagaggcacaaagacgggaggtaattgcaccttatataccaccagaaaatccctctagtcccagtatgccgtcgtttgatcttggaatatgatatgttatggatgatctgtgtagaggagtatttgaagcgtttcatactcgaatgtatagagcacatgttggggcaaatttatatgtaaagtaaatgtaagttatatatgatgggggctggtaaagtgtatatgatagtatgtttccttttagctgtcaaaaagtacggataggaaatattttttggggatcaatgatatattttaatttcataggaaaatttaattgttaaaataaattataaatgagaaataatattttttttagatatgttctaccacagtgtaatacaactacaagtatgtaatcatgctcagacaatgttcttattagaataatcatgctgagtatggatttggccataaaatggatagtaagagattacttttcatattatatttagtgcactgtctttgaagaattgagttaaaaatttacgcatatttgaagtgttgacataattacatgaaaattacaagatgatcaatttactttacatgactgtacatgaaaaggtacatgtatcaacaaccattgattgaaacttggtatggtatcgtcaacattttgtcattcaggcaaaagaggcagcctagcagcactgcttgctccacggccacggccaccagatggtgattttgaaccgaacttcgtatatctggaagaactcttcctagttaatcttacaggaagaatttgcagccttggattctgctcggtgcctgagttttcagctgccaactgatagcttttgaccagctcaagctgtcgcgcaattatttccgagcgtcttggaagaagctctactgcttctccaccagggatcacaatgtactctattgccagacgaacctcctaatgaaaaggaaaaaggaacactcataatttataacggagattcaactcaatctaaatgaggtgaaattatcaactaacaattctttcataacaaaaggaaaatgttcaagtaagcatatgatactctcaataagcacaaacccaatctaaaaataaccctatgttttccttcctgaaaaagtgatcgtgaacctaacctatacaaatttaatgtaaacttttctacattttctggtacttactaatgtccacaaaagagttatgtaaagacacattaactaatttaagccactgtcattttaagcgagatcacatcacaaaagagttatgttaaagacacattactcttccccataatcacttaccaaggtctaaattacgtaccaattccagcaggcatcagttttctactcctaatcatttaaaaaagagtaaaatgaacatggatggaatgggaaagagcatgtacctccaaggcatcaagttcttccagagatggttttctttctggtgcatcttcttcaatttcaatgtcagaagattttttgattggttgcttcgacgaagagtcaaatgattccattccaagaatcatgcggaatgctttcaccatttgtgccatggtatttgactgcatgcatcataggtaccaagtttagaaacgagaggaacccatatgcatacacacatgcattatactgtttgaagattataccttcattacaaatacaggcaactggtggaatttcgctacactacggatccaagggttctccttcatttcagaactgcaagctagaattgcatgggccctgccaatatcatcagttacgtctatttgatcctctatccccattactgttgcaacttgtagtagatcagcctcaaggatctataagaaacacaggccaacaatgaaaacgattatgtaagaatttatgtgctgtatagcaacttggaaattttttattattctattgaattggagaatgataatgtctatttatacatataatcaaatgaaattacagcactctcatctgcacaattgaacatgtaaagacagataagaaagtccaatcaatgtaccttgtaagtatataagctcactggcaaattatgcttgttcgcagatctaccaccagtcgatttcttggaatgactggaaaaatgttcttcattttcaatatcagattctaaatcagcaaccatttcttcatctactgtcgaatcagacacatctgagctggtttttttggatattgaagtatctttttgagaattgttagcatcgccatccattttacggacttcaaacagaggacattttcctgcataacccatcaatttcgaaagagaacgaaaataataagaacaactttcgagcaaaataaaaagagcaatcaatgaaatgttgttcaattaaaaaaaaatagagcaagaaaaaggtttattaaagacctgctagtatagcatctacagttgcatctaatctgtgatgaacacgacactctgttttcgaaatcatctcaacagcacaagtaaatgttggaggtcctttcctttcaaggattgtcttctgcactttcctcttctttgcttcctcatcaccaagtgtgacactctgttgattttaagagaagacatggacacaattaataaactaatgcccaatgtcaaatgtataggattcaattccttccagatgatagagttgttttttatggaaaattcaagggcacagttcctgaagagcttatacacaagaaattcatgtatagaaaataaaaagtttattgcacctcaatgccaccaacaaggatctgcaaagaagggttcttcataatattgtctatggtcattccatgtgctgttccaactaactgaactcctctttgagcaatagtacaagcagctaatgcttcaagttctgttccgatttcatcaataataatggtttcaggcatatgattttcaactgcctcaatcataacctgtgcaaaagtaggtacaaaattcacagttattcctgttatgggaacctatcacaataaaaaagccaaagagcaacttcaagcttacattatgttgcaggttgacattaggaacctgcatcctcctagcacgacctattcccgcatgaggaacatctccatcgcccccaatctcattagacgtgtccacaatgacaacacgcttcatgttctcatctgccatcattctcgcaatttctctgcaaaacaaaaactgctttagactttaccttctctctttatgctacatcaactggcggaataaagtaaaaaccacacactgcccaacattcttctcgttatttttttcagtgtcagagtgagtaacacagaaaacaattaggcagcaacaggaaatgaaaaaaagagacaagttgatattcataatgccacattagggaaacaaacaatagtatggtaagttgatagctcaaagctcttaattggttattggccccttgcttcttaataatcaaaacaatttaagtaccttattaaggttgtctttccaacaccaggaggtccaataaccaaaatggatcctcctccttcaattaagtcgcgtaaaatctcagcacttccagagacagctctacccacccggcaagtgaggccaataatttgcagtttacgatttcttatagcacttattcgatgcaatgaattgttaatacctgaccggttatcatctgaaaagtcaccaacctaagaaaagaaaatgccaactttatatagagataataagcaaacaaagaagaaaaaagagtaatataatctagcttcacaaaacaaagagcttaggactctagttgctatcaatgagtggtttaaaccaatcagaggagaacccttttcctcattcagcaaatacaggtaaaataaaacaatttattagagtatatttaaacaattgttcattaaattttcagaataataatcattaattaaagatcacaaaaaaaaaaagtcaaaattaatgcttgaaaccaataaatgattaagttagttcaccttggatattgcgtggcgtaggtcttcttcctttataggactttctgatataacccaatccccagaaggaaacctcgcaatcggcttccttcccaaatccataacaacctcaataagctgttcaatctcctcgtgcttgttcaactctcttttcattctcaaaggcaacaactcaagaaacatatcgagctccgtggcagcctccgacgatgtaaaggcaggattttgagaattgagaaaggacccgtttccagaaaagaaccgatccgagggtctacgaatttcaggggccggtgtgtgggacgaagacgaagcaatagcgttaagcccacgacgtgttcgaggaaatgagtgtgagacagttgaaatgaaactggaacatgggatttggttggctgagtgccatgaggtgtgaagatcaatgagcagaaaatgagaattcaaagctctcattctgaaatccaattgctctctccaaaaaaaaaaagattgaatttttataggagattgaaggtatttggttgtgtaagagattaaaagtagtttaataaagaagaagaagaagaataagagaaagaagattcgtgaggatctcctctgagattggaaccaaagctgacgtgggtccctccaaactgagttaacgaccactgcaacgaaggacgttcaaccacgtgtcctctgctcaccacacaactcagactctcatcctacctactcaagtaagtttatttaaaaatattttaaatttaatgtgatcagaaaaaagtaattatttattaacaacctacggctactagaactagaactagagaatagagatgagattagtctttaactgtctattgtggatggtagactagttttgttctgtctcttaattttttatttagtttctttgttaattaaaatacatcccctttagaagagttgcactcagatctgagcggtggctagtctaagttcgaggtctgatattgcaaaatcttatgtcacatatgagcattgcatttataatttattttaggttaattagtatttttactccctaaactttaatatgtactaaattatgttttttgaatttttttgggcgttaaaaattctccttgaactattaggattattagatttaaggacttttatttaatttcattcaattttattatttcagagattatttatgtattaaactatgctccattttgatatctactaaatcatgtccctcgaactttgattgacacatactaaatcatgcttcatgaactttcatccatgttagattttttttactaaaattagacaaaagtctttaaatccaacaatctcaatagttcaggggtatttttaacgagcaaaattaagagaacataatttggtacatatcaaaatttagagggtaaaaatcttaattaacctttattttaatattaacaaacaacatgaccaaaaaatttccttctatacttgagtacatttaataaaaaatattataaaaatactataaattatttttatcagatgcatataatataaatttatatttgaaaaaaaattaaaaatatnnnnnnaataaaatattatataaaataaattgtttataataaattatattataacattatcatgattataataaattttaaccatttacagtattttgaaatttataatttatcaaatacccagttcagttcttttttaccagtctaaaactgttttttctcacaactacagttactttatcctacactaatacccaattagctcttatatggacaccaaaatttctctaaataaaatataagagacttaatattaaattacataaacaattatattaatttatataaaatattaatttataaaaatttgatgtggacaaattaacttattgggtctagatagaggtgagtaacatccaattcaattcaattgaaccgatctaatctaatttaattataaaaagttagatatgtaattacaattggattagattgagatatctaatcttatgtaatttttaagttttttttttatatatttatgttaatgttaaaatttagatgtggaattagatatttaattaaaaaatctatttaattcaatgagtaattagaataaataggataataattttttaaatctaattactaatttaatccgattagatggaaaaaaataattaaattggattggatgacgaaactcttccctcctcgccttaaagtaattacacgccaaacattttgacttgtcaaatgagaaatatgctgtttgaacaatccctttctttcttattattttatttatgcacatacttgcattttatcgaaaattatttaaaataataccattagcacgcatttcttttttttttttagaaattcagataatataataagtacatgttgttcaaaaataaataaataaataagtacatattattcggaaaaaagaaatacaggcactatttttggctattagagtggttaacagagtaccggctgagctccatttcagtttctcaacttcaaattagggtttccagctacttctcctctctcttttctttttccgaagaaggcatgctcggcggccgtagagatggaccgttgatgagggagaagggccacaccggaagcggatcacgaatcgctatagcaattgtgatcggaatacttctcggttgcgtgttcgctgtgctctacccttatggattattcgtttccgattcgattactcaaaatcgtcgaatcgatcgccactcggatcttcagaaaagtttgccatcatgcgagtcatcggacaagattgatgccctgaaattagagagtcaatcactttcgaatacgaacttagagttgcagaaacaggtcagagatctgagtgggaagatacgactagctgaacaattaaaggatcatgctgagaagcaggttttggtgcttggtaataagcctcataaagctgggccaatgggtactgtcaaagccttgaggaccaatccaaatgtcagtcctgatgaatctgtaaatccaagattggctaatattttaaagaaattcgcagttcaaaatgagattatagttgcgcttgcaaattcaaatgttaaaagcatgttggaaatctggtttaatagcatcaaaaaggttggtatcacaaattatttggttgtagcccttgatgacgagattgtagatttctgcaaatccaacgaagttcctttctaccaaagagatccagaagacgctattgattcgattgcaaaaacaggaggaaaccacgccgtatcaggaacaaaatttcgcatcttgagagagttcttacaattgggttacagtgttcttctatcagatgtggatatagtttatttacagaatccatttgattatcttcatcgcgattcagatatcgaatctatgacggatggtcacgacaacatgacagcttatgggtacgacgatgtatttgatgaaccatcaatgggttgggctcgttatgcgcatacaatgagaatatgggttttcaattctgggttcttttacatacgtccaacacttgcttcgattgagcttttggatcgtgtggctggaaggctttcacgagaacccaattcatgggatcaagctgtttttaatgaagagttgttttacccttcgtatcctgggtatgaaggtcttcatgctgctaaaagaaccttggatttttatcttttcatgaacagtaaagtcctgttcaagacggttaggaatgattctaagttgaggaagttgaaaccagtaattgttcatgtaaattaccatccggataaacttccaagaatgaaagctgttgtccagttctatgttaatggagaacaagatgcactagatcctttcccagagggttctgactgatcatcttctttgttttgtttctcaccttttatatgctttgataggcttacaaattcacgtgctacgacaaaacttgggtcaattttattgcaggtttgttcatggggcccttccaattacttttattagttttttaaagaagactt

SEQ ID NO: 14542 - DNA, 8013 bp, Cannabis sativa
  modified_base (6347)..(6353): a, c, t, g, unknown or other
  modified_base (6969)..(6977): a, c, t, g, unknown or other
ttttttttttttttttccatttggtgactaaattgttctcaatatcttgtgaagagagattattatccaattgccaaattacttgaatttgaggacataagatatgatctctaaggatgtgttgaacatatttaatcgcttacgatcctatcatattgtgatatataattgagtatttagtttattgttgtggtgttaggacctaggtgcgttacacttatgttaggagggctaagagagagcactactgccaggggtggattggtctttctcttgagtgagggtacttatgtaatttgttgaatagttgcaagctgttttaagggaggtgagtgagatttatggggtttatgcatgtattgggttcacatagagctcttaagcatttagctagtgttgaatacagggcacatcaattggtattagagtctacgatcgtggtgactgccgaatatcagaagttcaaagaaatagatggaatatgtgggggaagatgaatctcaggcaacaattccaaatgaattaaattcaatgaaagagaaagtcgactcccatgatcaaggaattgttattatttcagagaaattggatttgattctgctgggccaagcacatatggctatggaattcatcgacgatccacgaagtccggtaggtaaggttggccagcctccgattgggtctgcacaagggtccagtagtaacagccgagaagttgaaggtggtagatagtgtgaatccaaggaagattgaactgcctgtgtttacaggttcggacccggacgattagacttaatagagccgaatgctattttagtttgcgacgattcttagtggaacaaaaactggaaggcgcgattctttgtttggagggaccaactcttcgttggtttagatgggagaatcttcgtcgggaaattcaaagttggggtgagttgaaatttcttcttctctaacgatttttcccaattcatgaaggcactgtgtgtgattgatttctaagtttacaacaaactaccacggtacaggagtaccgacaacagtttgagacgttggcagagttgctgggcacggtggcggaatccatgcttgaatcaacattcatgaagggattatcgatggtgatttagagttccctgcgtattctcgaaccagtcgacttggagaagacgatggagctggctgagactattgaggccaatcagttgcgggcttgggcctattgtgttgggacaggtagaggagcagacccatctcgatcatcaggggtgaatcacttaaacttattgggcttcttgaaaactagtttagtgggcctcaataaatggttgggtttaatacttataagggcaacccaaaatctggaattgatggaaataacaacccttatttccagggaaattccaatcgcgtaacgactatgttacttgaatcaacaaaagcatatcgaaagatgacagtctaaagttcaggagaagagggccaaggggtgtgctttaaatgtgatgcaccatggtcctggaaccattgatgcaagtcactagaattgcaaattattttggtacaagatgaagttgaggaaacagagggatcaacaaccatggaagactttttgggtacaaagatggatggattaacttaagctcaaatggtggaagtttctctaaactcaatggttgtgggtggagttgagccatacttctaccaatgagaatgacgtagaaattccaggagtgttggtgagttgttgcagcagtattgaggcatttttgacatgcctaacacgctgccaacgccgcggccttgagatcatgctatttgcctctgtttgggagtagcactgattaacatctgcccttatcgatactcgcatgtttagaaagatgaaattgaaaggttagagttggaaatgctaaaggtgggaatttgccagccaagtgtgagcccgttttcaagtttcgtgttattggtgaagaaaaaagatgggagctggcgcttttgtgtggactatcgagccctcaacaaagtgtctatcgccgacaagtttccatacccgttatcgacgagctaattgatgagttacacgaggcacaaatattttctaagttggatttgaaattgagctatcatcagatttgagtgtggtttgatgacattccaaagactaactttcgaactcatgagggtcactacctttggtctcactaacatgccaacaatgtttcaagccaatatgaatgagatctttaagccttatttacatagatttgtgttcgtcttcttcgatgacatctaggtttacagcccgaccatggaagcacatctcactcacttgcaagtggttttggaagccttggctaaactttagttttatgccaatagaaagcagtgttgttttgctcaacaaaaataggaatacttgggtcatattatttctgctgaaggggtgtcggttgacctctaataagatccaagcaatgttggattggccactacccaaaagattaaaggctctttgaggcttcttgggtcttacgaggtgctaccataagtttgtgagagggtatgactccattgcacaacctcttatggagcaattaaagaaagacctatttcgttggaatagagaagccaccgttgcctttgaagctcttaaacatgccatggtcattgtttcagtgttggctctacctgacttttctaagtagttcgtaatagaggtggatgcctttggttatggtcttggggctgttctaatgcaagagggcaaagccctcccctatttcagtcaagtgctgaaacttcacgcccaattaatagtccatttatgaaaaggagctcatggccatagtgctcgctattcttaaatggcgaccatgcatgttgggtcgaaagttcttggttcgaaccgaccaacaaagtttgaaaattcttttggagcagtgtttagtctctatggagcattataaatggctggtgaagttgttgggctatgattttgagatccaatgtcatctcggggtagccaatagagctgttgacgcactgtcgcgtgttttaccagttgtgcatgccgtgcttactacatcttcttggttggattgggacctggtgcgcaacaagaattcagtaatgaccctttcttggctaagatccgagctgatttggaacaaaacaaagaggttgttgggttattgcttgagcatgggtgacttgggtatcatggcagggtggttcttgctgcctcttttcttgaaagaatatcatgagactgccattagggggcattcgggtgagccctgcacttatcgacgcctaccagttgatgttttttggatcagaatgaagcagcaagtggtggatttttgtgaggcgttgtgaggtctgccaactaaataaaacaatggctgtctctagctggtttattacagccattactgctgcccgagcaagtttgggatgaccatggagtttattgaagggttgccttgttctgaaggggtggatactatactcgttggggtagattgtttgagaatgtatggccatttcattcctttccgacatcattttttcgccaaaacagtggctgaagcttttattaaaacatgtagtcaagctccatggcattccatgctcgaatgtttccttcttcaacaattttccgtagattttgtgatcgaaagtaggtcctcattttaatggaccaaaaatcatagttttctccatggaaaattggaatcgatagagaagagcgattggactccaaactcatgttgatgagtggaaaagattacgcccagtgatgatcgaacggagctgtgataccactgatggtttgagaataaatttgtattggtttagatttgaataggtggatatgagaaataagtgtttaatggttgttatggtaattgaagtagtgatgttgatgagtagtgttgatttagtatatgaaagtggtttgacttagaagaaagggctctatgagaaggtagtaagctttattgatagtttagatattggttgttacactagctcctcaacccaagcatggtatttatagggagctaaggttaatactacaagtttttagatttttttattttgaattacaatttaacttattaagaaattttagaattttttaagttttttagcttacaaatatagtttctaagtaattttaattttctctaatttttttttagctttgtatagttaatattaaaattttctagataagaaaagtgtagatatgtgtagcacttttcatcactttcactcttgatattaacatgctatgtttttgtttgatcaggttgatatttgggaagaaagaaaagtttttggctctcgagggcagagtcttaaagatgaaatactgggtaaaatccctcctacatctgtaagccaagtaaagagttcgaaccctatcaagatagtcaagagggatgcacattccgtacggattgtaagtacatgattttttatataatatatatctatttttattgttcttgaacatgactttcagtggcattccagaaattgtctgtgggagatttgccagaaaagattattactgcatttcaatctgttcttgatgaacatgtcagtgaggaagctgctataaagaagtgtagcacagctctgcaatatgttggcaaaattgaagaagatgttgaaaatgcctcgactcaaggtaaagaattcacatccaggtttcaagtcagtttcataataccagatcatatctgaattctcttctgtgtcttcatatattctattttttcccatcaaccaaaatggctagcagcctagcagatagccacattttgtagcttaccccatcaactcaaaccctaaaactagcgtctgatgttttgtagtttgattacttttaagctttttattccaaatattatatgttttcatttaaagagaagaaattcattagaaggtatattagtatttatacctatttcagttggatgattgattgtcttcagtcttttgtgcacatttagaatggttaaacaatttttcttcctccgtttatctcctccactttcctctctcttcattctcacacatttgttaaaaaaaataattgtactcatcaggaaatcagcagggttctggatatctggatgagctgcaagagcaggaaaatttactcattcattgtattgagaagcttgaaaatgctgaggcaacgagggttttgttggtttcgcagctcaaagaggcacttcaggaacaagtatacgttattcctatttgtgctcattttcctttgctaaagtttaaaagttcatgttggcttacttgcttttataaattttttacaggaatcagagctagttcacattcgcacacagttgcaagtaagaaacacctatctatttcttgtcacttaattttatttctgttggctgtgaagaagtcgatatcatattcaatttccttttttttttcttcccttttttaaagggatagaggtcaaatgacctgaccaccatcctaatttattaatagggtcctcatgtaaggatgaggaaaaccatgtaataacaagacttgaaagttcctttataaaaccaagaggcaggaacataagtcctaagttacaattggatccatttaagcgtaaatttaaaagatggcatacctctaacgcagtaggttcccccactccctacaaagatctaagaagcaaagattctcaaaatcctgacttaaaaatccacgtggctattaagaatttaattttctcccacacaatctctgcagaagacttaccctcaataattggaatattcaaaaattttctattaggttttcatcaggttaagttattggattaatttcagatttttctaatcattagaaggcattttcattaggttttcatcagttagtttagattccacattttaattgagatcattggataatgatttactgaagatggagtgatgaaattcaggtagtcctctagctgtttttgcattttgaaatgcgtagctgttttgaaattcaggtagagatttacgctggaattgattatattaaactagagaggttcatagctttaaataatgtaaaagccaaaacttggattttgtttagcattttgggctgaagaacttaaatcacttaattcaacaagaacatatgctgagtgtttggtaaagctatagattagaagtattgtgagttggaaaaacagtaattgataaagggatgagatgtaaaatggtcctaaattttaaaattaagttagtagatatttttttttaagaaaattaaaaaaatgaccaaatataataaattagctaatnnnnnnnataaaaatacatttactacatattatttttttaaaaaatatttatagtaattaaattaagttatataatttttaatattgcatattattatattgtaacaaatacgaatatatacaacaatatttgatacatcgtattactgaaaattaatataccgtagtaataaaattatatatcacaaagaaattataagaatactaaattaatactcaaaaattatatatatcatgttaataaaattatatataccactattaaaatatgtatacatattaaattttttttatataatgaaatagatactaaatattatcttaaataaatgatatattatagacaataaaaatcatataccatacgatacaacataatatatatacttagtaatataatattattaaaaaaattgtatataccatattaacaaaattatttacaaccataaaataattatactatacttataaaattatatatcacttttatataataaaataaaaactccattaaaaaaaaataaaaataaaaactaaacatgcataatctaaaataaaatgatatactatacaataaaatttatataccatataataaaaaatatatatataataacaannnnnnnnnataaaaatatataggatgctaataaaattatatatattttcaacaaaagtacaattgaaaatagaacttattattttaaaaaaataatataccatataacaaaaaatacatatgctattcactaactaggcgtttgctatgaggtgttcaaaataatttgattgtaggaaatattatgaaggagaatatgattatagagaaatgtgtaaactgtgtttggatgtgtagggtaatatgtaatcatattcccgttaattgattgcattgtttggttgagtacaagaatcttatatattattttaaaaaattaaaataaaaatacttttttattatatttatataatcttaattattcataaaaataaaataattatgcattaaagaaatatatttattaattaaaaaatattaaattttattgtattttttattaattaaaatgaatacttctatgtattttatctctctattatttatttttgttctctatgtcatttatgtacaccatcctcataaaatttatctataatgcatatatatatactagtaagaagttacgtgcgaggcacgtatactaaaattttatgctaggtattttctattttatttaaaagtgataccatcaataattgaagaaaaaaaatttaaaaaaaaaataataataattgaagaaaaaatattattaattgttaggtgagattataatataatatatgatacacatatacattctaaatcgaaaaatcttcctcacgtatctttacttttgaattgtgaatccaaatggttacaaataataagtaccgtacattataaactggtaacaataagtaccgttacaaatatcagttcaaatattaatgaatttattttatttttatttaattattttattaaatataaataaaaagtcacccaaatattcaagtaataggtagaaactctattattaatataaaattaattaataaataataaaataatattataaagttaacggagggttgtgacactcgaataattagcatcaaatatc

SEQ ID NO: 14543 - DNA, 7366 bp, Cannabis sativa
tgtggatacgacatatagcccgtttactaccacgaccgcagtgtaactaattgggcgacatcagtgatgatgccaaatgcctttgtttttcattgacattaaccaagtccgttgaggattggtgaaagagactgttttccggatcgattcacggctagaaagagttacatctaccttttgaaaacaatttatcactactagagattatgacatggaggtcggttccccaaccaatctcaaataataaccagccaaaagcttgaagaactccatccaacggatgatgaaagcagtagccaaaactaaagtcagtgatgacatgaagctcatggccctccagtctggactaattgtaggctcttttttatggagcaaaatgcaaagaaaaatgtctgagaccttttctaatgtcatgtctagggcccaagggatcatcaatctaaaagatgcttatatgcaagctttttggagtcgctcctataccaaccctaccagctgcaacacccacttacagtctgcaagaaactgtcccgaccgttatgcttccatgaacccaatttactatagtaaatggactcgctgtctctggacatgtacctgcacaaactaatttctatgagtttggagcgacacaaactggatggagtatttctccccgacagtcaatgaaaaagacggaggttttagaatcaaatgttagctatttcagaaacaaaaggggtgggaagagtcagaactagagtgaggctccaaagaaaggagggaaagaatatgaacacaaatacaccgagtacactagtctgattgatactcggcagaatatttacaaggcaccttgtaatatggtccattaccagaagcctccaagagtgttctaaggaggaaaacaaaaaaaggaccaaagtaagaaatgtgagtatcagggtgatgtcgggcacaccaccaacgaatgtgactacatgaaagatgagatagagacgttaatcagagctagaccccttggccagtggttctggattccgatcatttatcatgggcagcgcatagctcacggataacttgtcgttccgggataacatggaaccgtaactcctcccaagggagtgggtccccctcaagctcctgaaacaaaatttttggctttattgctctgccagcatgcgctgatgtggtagtcctagccctgggaccaaaaaatctttatctactagggttagctcccccacccgttgacgaccatgtcgccactatctctggaggctcacatctcgttggaaacacttgcaatttccaaaagatgaacgagttggaacatgaagaggaagtttgcgctttcgtacaatcactgactcaatgtttaaaaatgatgaaccttcccatcacctttacagagaaggatgctaagcatgtgcactttcccacaatgaccctttggttattgaagcacaaatcaagcacaaaagattatccaaagtgttagtcgacaatggcagctccgtcaacattttgttcaagtttgctttccaagcgatgggactgactgaagtagagctgtcaccttgtctgctacaactacaaggatttaatggagattctctaataccgatggggaagatctagctcccagtcaccttgaaaaggtgaacacaaatgtcactgacttcaaacactacatgtttgtagtagtggattgccccactggttacaacactatactgggacgccctatcttagttgattttggggcagatacttccatctggcacttatgcatgaagcttccatgtgataatggaagtgtgggagtagtttgaggtgatcgatgggtcgtttgcctttagatttattggtgagagatttaacacctatttttgaaggttttttcagcaatggtgatgggcaagatgaagactgagtaatagtcatttattaaacaaatcaaagaagaaaaaaaataaataaataacgtgggtagttgatggaggaaggatattgaagacaatggataatatcaattttttttttaatgaaaccaggtttttgatcgtgagaggaattttgaaacagaaaacgaaaatgaaaagtgaaaaaaaaattgaaaataaaaagaaaaatgataataaaaagagagggaaaataagtgcaaaacttgtcaaatgatatcatgcatgctagtagagtgtctaagtggtatttgtgtaactaaaacactatgaaaagtaaaaaagtagtaatggtcatgtaagcgtattagtgtaatattattgagtttttatattttttatatatattttccatagttatagctattaatacaaataatataaaatgagattacgtaaaataaatttatttggtgaaatttttgatgtaatatttagtgtgaattattgaaattgttacaccaaaagtaagaaattttataccaaattagtataaattctacactaaattagtatcatcatcaaagatggtctagagattgttctctctcactttttttaaaggagattattcattttacttgaatatacgtaaatacttccaaaaaaaaaaaaaagagcattgcagctctccccaaaataatttctttggaactgctttctttaatacaaatctcagttgaggacaaaccaccttattattcatggggaaaatgggtgaaagaaagggggaatacagagagcaatatcatatctcaacttattagtagctcatcgtcgcctcattttaaattattaaagggaaaaagaagaatggaaaagtaacaactaaatctaaattatacaaaatcatgtcttgaatttttgggtgagtttctccactccttccctacaatctcccgcaactcgctttgcaccatctttaatgaccgagctaaagtcggaggtgctctgctgaagcttttgtgccgaaccactagccttagcaatggcatcatctcttaaatcttcagccctttttccagctttgcaggcccattccttcaaatttgatatcaacaaggctattgtttgaatgattctatcaagtgtatctctggatttctctcttacgcctgctgacattgccttgagcttgtccatcaagttttcggccctgcccactgtttcatcaactgaaaattgcttgctggcatcaacccatgtagctccagcgatggactcttcacggaggtcattgtcaacaaccaccttgatgccacgtctctcccatcgatctctagcttcctcgagtaccttagcttgttctcttgctcttcttgcctcatcttcagcccaagccctgtaacatgaggaaaatgagcataaaaggcattcataaaagttttgcacaatgaacttagtattttgtcagttgtctaattacttgattttctaatttgaagccatcaaataaatgctagctgcagttgggatttgttgcatcaatacctggccatggacaaagcttttctttcaacctctaggtcatgttgtaagcgcaaaatttcctcactttcaacttctgcatttttcctaagtttggtaattctttccttctcataagatatttctactttgttactcataaggctctgcaactgttcctctacctcatgtcttaatcttgacaacacttccatttctgattcaatagctgcacgctccttcaatagagtgatactgtctttttctctctcagctcttaacctttccaattcacgagtagcttcttctgccattttctccaccgcatctatcttctctctctctagcaaaagctctctctcaaaacttgcattaatatccttctcaacttcagctactaaagctgtatgagcagatacagcattttctgccatagattctgcttcaatacgagcaagctcctcactgactgtgtcagaagcttcaccggtagctagagcaatagcagcctgggcctttgtcactggcttatctggctggaaaagtcttgtgtagcctttcccaagaggaaaacaaatcaaagagaagtgagctatcaaatttgcaaagagcttgtaatgacaattagaagacatatcactaaccaaatgagagagcaataatcccatgttctccagcagacaggtcagcaacaagggcaggacatgcatcttgatgtattttatcagtgtcgataaatccggatacttgatagagtgcctgtaaaagagcatgactgttaaaaatacaaactacagtaatcaaacaataaatagaagcaggtactacacagaactgaactcaaacatcatattatcgacctttctgtcagcttctggcagatgccttttctctagtgccatcttccaacttacaagatcttgacgagatagagggctgaaataatttcaaagcaaaaaataagatgtaagaaagaaaactattaactctgatgaatcttagcagcaaaaaaaaaaagccatttatgcagacaactcgttatggaaatatagacaagcttaatggatttaagataatgcaaggaataagaaaattggaaggggactttagaaaactaacttaaaggggtagaaaactaaatatcataatttaattgaagcctttttggcaagggtatgaatagcagtaatatgagcatttctcaaagatcagacaaaattcatgtttcaagaaaaaaatcatccaactaaaactagtcatgcgtttcaagaaaagaattgtgaacacctttccggagagaagaagtatgaactatgatcttcctctacagaagaaagcatatcacctctagaaagcttgcttgatataagtccagcttcggccaaacctgaaagattaaaaacattttagaaaattctatgacacaaagaaatcccacagcaaattcagtgatataacgaaatccatcacacaaacatgggagtttttcagccatgttaactaagaaattaaaatcttctacacaccttgaatagatgcaaaatcagggtcttgaggagtaatatcatcaaatgcaagttcagttacattttctatgtacattgcaggatatactttagacattgagttcctgcatacaccatgtcaaatagtcagttctaaacaaggaaagagttctatcctacgaagtagaaaaagcgattgatatgtaccttgagagagcattgctagcagtcactaaccaccgagcatactcacgccttgtacacaaatcactaggttgaacatcggcctcaatgacctaaaaatgtaatatactttcttaatatatgattataacttcaggtcataaataaatcacaagtacaatataaaagcttgatcagaaattatcagttaactgttgatgatggttcaccctttagcaagaaacccaagctccatattcaacttctaatactcaagtggactaacaatacttgaatataaaaagtaaatgcaaaaaatgagagaataaagtacctttaacacttgcaatgctgctagcgcctgcccctgagcctgatcaacaactgcaggaaccaacacctttccaggatgcacctgtagagctgagaaaaccacagatggagcaggtatgccagcagaagagaaggaagtcgcaggtttgggtgattctgaagtgcttccattaatttcattatgaccctcatctatgctatgcaattccaaggttaaactatttttctcgactgagacctgagggatatcactcaactcaaaattttcattgtttgaagacaaggctatgttggatttggaatcaacatgttccaaatttgtgtttggttcggaaccaaatggcacattaggagccacaggttcaaatggtacttgggcaactgaactatcatcaaaagaatgatcactacttgaactaggaattgtatccttatcaaggcttaagtttgatggaacatcatcggaaatgagcaagttgtttgattcgacattgactgggatctctttaatatcaggaattgattctgctatacctacagcagagtcactgtccaactccttaaaaccagaaacgacagatgaatcattgctaatttcagaatcatacagactatatgaagttgggacagtgtcagcatcaactgacttatcattagaagtaaagtcatgttgtgaatcttcttgaattaaagaattgttgacggcatcaataccatcagatgtgtttttaacatcatatacagacaaatccctgattaaagaatcatcaccaactctattttcactgtgaacatcaacaagttcagaagatgaagaaaaatccttataagtacctgtcccaccttctggactacttgcgtcttgcttcacagtgtcgtcttcaatttcatcttccaaaaggttatcaattttttcatcagcaaacaatgacagttcctgctccgttgttaagggctccatgtgttttgcctctgtgtacagcaacatattatatctagctcatgccactataaacaaagggtcttttgaaaattttgacatataaccattaacaaactcaatgaaagagaatccaacaaattacttgactcggataagaagaaacgacaaagcttaatcttatcaagagagaaagaaaaggattgagattactcactggaaatgcttcgttttcccaaagataatgctgaaaaggtaagccctgcaacaagaacgattcccgctactcctgctcccactgcccctgaaattcaaactaccttcaaaatcttaatcacttcacattccacaaaaatacaaaaaaaaacccaattcatacataataaaaggcatcaacgctaacattacctccaaaccatttcttcttatccgagtcaagtgattcctctcctccagagtccttaccagaccatcccgaaaacccatcaacgctagaatccgacctgatcaacggaaccacataacaacgtcgttcaagtcgagtcccattcgtaccccaaagtaggcgaggaagcaaaggactctgcttcctcacatgggtccgtacaagaaggaaaggagaaggagaaggaggtctccttgagtttccggggctgagagcgaagcgtagctggagcgagctgggagaggacgtggcagccatgaaaggataatgagaaaataaaggaaggtagttgagttggagttggttggttaatggttacatacaagaaaattgaaattgagagaatggagtggagaaattctagggttttgggggtagttggtctgtgaattttgattgattatatgatatgatcagacaaagtaatgtaattgtataaaattatcttgtctccacaaattacatacacgagagacgatgttgtagttgtagacatttggaccagtatatatatctctcaaacatttaattaatatttaaaaaaaaaaaa

SEQ ID NO: 14544 - DNA, 6298 bp, Cannabis sativa
gtatgtttctatttgaaaattaatatctgctattttgattatatacaatagagaatgatatatttccctcattttaatctatattctatagagactatacgaggacatgaagacaagaattgaaagtgccacaaaagttggccaaatttcagaaattatgcgaagagaacacaaggggttttgtgagtgggactctattttaagcaaacgtgatcatcagaccattattcaagtattgccattcttactagtaacaaaaacataggatcttaatcgattgattggtcctttaaaagtttccagttagattaaattactatttatatatatataatatgtatgaattgtagattcttatagatggaagagaccccaaggcagtagacattgatcaacatcctctgcccactttagtatacttggcacgtgaaaagagaccccagtaccaccataacttcaaagctggagccatgaactcactggttatatatagtgataatttagtactagctattactaattaagaaagtttaacttacactaaaagcttaattttctgtttggtagataagagtatcgggacagattagcaatgctccgataattctcaacgtggattgcgacatgtattcgaacaattcagagtcagtgagagatgcaatgtgcttcgttttagatgaaaagaaaggtcaggagattgcttatattcaatttccccaggcatttgagaacatcactgagaatgatatttacaacaattctttaagagatttaatggaggttggcatgtgcttaattaattaccatattatataatagtacatgtccttacttctcttgatttgataagactatgcatgtaatatgatgatcccaaggttgatcttcgaggatttgactctaatggagggccttgctatattggaactgggtgctttcatagaagggaatctctgtctggtaagaaatacaatgaagcggataaaatattactagattgtaaaacaaagagtgaagatgagggaattagtgcagaagctctagaagaaacaagcaaagttcttgctaactgtagctatgaagaaaacactctgtggggaaaagaggttaattgcactcaaataaaatatgttcagctttggtaaattgcgccgtgtttttgtactaatatcaatatttgtatgcagatgggtttgatgtatgggtgtttagtggaagacatgttaacaggacttgtgatacaatgtagaggatggagatcagtgtattatagtccagagagaaaagcttttctaggagctgctcctacaactctgctcgaggtccttgtgcagcagaagagatgggctgaaggagatcttcaaatacttttatcaaggtattgtccattgacctatggctacggaaaaattccccttggacttcgactttcatacttagtctactttctatggtcccttaattgcttcgcttcactctactatgtcatcgtcccatcactttgtcttctcaaaggaatctccttatttcctcaggtaacaaattaaccatttgggattgtaaataagagtagtgctgatgagtagaataatacaaatatcataagattaaatcgaaacttgtcatggcagatgtccaacatatggtttgtaccatttgtctatgtcttctttggcaaccgagtgtacagccttggagaacatctgatgtgtggagggtcataccgagaatggttcaactgtcaaagaatgtggttgttcaaaaggacaacttcttttttctttggtttcttggataacatgataaggctattgggattcagtggtgcaaccttcatcataactgcaaaggtggttgatgatgatgtttctgaaagatacaagaaagagttaatagaatttggtactacttcgccaatgttcaccattttgacgacccttgcattgctcaatgccttgggcttgatttggggtttgaagaggttgctcttcacagagcagggtttggttctgaacccatttctattgcaagtggctctttgttgtttgttggttttcatcaatcttccaatttaccaagctatttttataagaaaggataagggtagactgcccaactcagtgatttaccaatcgattatgctcaatctagtagtatgttcgattgtactttattagaatatttggcaaaaaaaaagtaatagttgtacttggtcaagccagcttgaattactctggtcattccatttgtaatttatataagttgaactatgatctttatgctatggttttctttttgtagactaatttcatttgtctaaaaacttttcatcatgctgtttcttttcatggataattttctctataactcccatactaggactaggagaaatggaaggggctagaaagaaatgtcacccaaatatattatgtttgtgatcatataatataaaaatggcataaaaatcaatgaaaaattgatgtttattttatttttatctaattaggatttttactcttaaattttaactgtactaaatcatgttgtttgaatttttttggctattaaaaattttccctcaactattgaaattgttagatttaatgacttatttaattttattcaattttactgtttaggtattaaatcatgctccctatattttaatgctccccatattttgatatgtagcaaatcatggcctcaaactttaatatatactaaatcatgataattaacttttatccaaactttttttttattaaaattagaaaaaaatacataaatttaacaatcaatagtttaagcagtatttttaacatcatcaaagttgaggggcataatccatctaagggcttctctgctgattgcacaaacacgcgaagacaccagtaaatggcagttaataatattttgaaataataaatttaatttctaatttcacaagtctcatctttctctctcgactctctctctcttgctatcgctcctttcaatttcttatcacccaaaccatcaccattgctgtcaagttctcctcggcatgggtaagtacatcccctaaccttcactgcatttgattttccgtttttgtatgtttaatcgttgattcattggtaaatatatggatctatccttattttctttgttaattttgtcactagaaccatgattatagtgatctagactagaagtgcctctatttctacatacattctgatttagtcaattttttttatcaaagttcttatgattggtgattgatgctacaaattacaacaaaggaaatcaaagttattcaataaaacaaaattctactttattggccatgctctgtacctttaggttttatatattctactttatttactgtttttagatattttatatggtatttatgttaatttgagatttaaaatttgaaagttgttatttgataagttatattatgaaatattgtttgtatttacaatccagaaagatactgcgttacagtgaaagaacaattaaggaagtaagaagaaagaatcacaattctcgtcggatgttgacacctggagcctcaagaaagaaaaaagagagagaagctttctactctttcaaaccctcgactcatcctctctctgtttcggcttcggctcaggctcaggccgcagctaagaggcagcaaccagtatcaaagccggaggagccggcctcatcgaaccggctcttagccggatacatggcttacgagtttttgactaaggggacgctgttcggtcagaagttcgatccggctagagcggaggcggttcctgtgggaggcggcgcagcggagtggaagagtcagaaggcaggaggaggaaaagaggggagtttgaagaaggagcaccagagttacgctgaggttgcgagcattttgaagagcgatggggcccacattccggatgttgtcaacccgacccaactggctcggtggattcagatgtaactaaattgtgtacgtatcgacgtagggaaacaattggatgagactgtagacgtggcgtcttcttattggttgatgcgttttagttattttttaaaatttttttgttaaaaagaaaaaagtccaggtagatcctctgtggtggagctagtggttattaaaaagaaaaagttgatgatgaaaatgtgaaaatgaattagatgatataaatgtttctgatcagtcagtcactctatttttgtttgtatgttttgttttcttttttgtcattaatttttatgaagaatgatttatgcttaaaagttaaaagtattaatgtgattgtttcagttatatattaagatctatataaaacccaaatgaatcaagtgttgtcgtttagatacatatatagtatatagtacgattggaaactggagtatgtttataaagaggtagaaatattgtgtttgacatgatcaatcttgctttgttgcacaacttactggacatatagtagatctttttgtgaaaggaatttcatgctggatccaggggtatgatctgtttgtttctttgacatttctattgaacaattttatcttttgatgctaacataaaattacttctttcttctagctcatgtacgtgtgatacaaaacgaataacgactctaatctttcttctacaatataataagttcggagctttcttcctttcaagtacttttgtaaaatatggtttttagtttctagctgttttatcaatttgtaagctagacttctataattaattcattttcactaatctgtcaaacaattgctgatatatggggtgatcttgtttgccccttagctggttattattgtacacgaaaataattagcaaggcaaactatcattcttctttcaaatggatttgatctttctggtttgtttacagaatccacactccctgccttgtcgatcatgtcaagattggctgctcaacatttcaggttggatgtgaaaaaggacagagtctctgaaaatggaaggtagagaaggacgaatttcaagtcaccctgagatatatgaatttacactctcctttcacctgattaggtaagcaaaatgaacaaattgagatacatataagacaagctttaaatgaaattgttgtttgggcatggcaaggtgaacaaaagcagtaagaatgataacaacaccatcaacatttagaacttgtgttttgtcttgttttgtttaattgatttgatgtgtttttggtattttgtacataattaaggtggaaagcatttaactgtgtatctctaaagtaaagttgtttttcaacaccggacaagggctaggaccagagtaccaaaaaggtgattttcaaattcactattcaatgtatcatacttgatccctttttgtgcaaaatagttttggaaatgactttttttttagatggtaaaaagtctacatgataattggaatctttttcgtttttatgcaggtttgttaaacttcataggaaacctcatatttgttgggagaaaaaatagacacaacttcataatcttacgaggcatagataatggtcactattagtgctctacaatcttatgagaggtgacagcttcattttatagatctatattttaactaggatagttcatccaatatatgcgagcaaatatgacttgcaggtgcaaaagaagctcattcaatttcattacattttgaaattttagcactaatcagtgcttgcataatgttcatttcttataagtgaaggcccattttaccttatgagccttttttaaatctttactcatttattttcagtattttatagtgttttaatcaaggtttgaatcattgtccgattcttgatgatgaattagttcgcaatcgaatttgcattcgcaggccatctttgttattatgggatttgtttttagatgaaacgaagtgatgtgaaaaatcatctttaatatatataacatttattaggaaatctaatatataagttgctttttattgtattttctctcagtcttatgtaggtcatgaacatagctagtgatgctagacttggatgcttggatgttacaaagaaacagcacttgagaattgttattgtactagttacacattgtattgtatttttaaggaacacatgtattagattttttttaaaggaaggaataatcccattgaaaaggcacaaagccaatagagtcacagacattgaaaaataatcagagttggagagcgagtgtaaaccaggccaccaaatttgagagacatttaaaaattaagcaatacgaactagtctagaattagtagtctgactacgttg

SEQ ID NO: 14545 - DNA, 3214 bp, Cannabis sativa
tatatatatatttatatagctagttaatatatattcaaatatattattataaatgaatatgaagactacgacagatgactgtttattaggacttgggattatggcgcatattcaacatcttccacaggacaccctatttattattaatataaattatataaaccgtgaacaatttttttttctcttaatgattgttaaatttagtgtttgtatagaaaagtgtaaataaagtattgtactgtgctttcttcttattttcattctcgaaactagctttgttttctaaaaccagcttaattgagtgcaaagagggattactagaaaacacatatagtgccatgccatatataaataatataaagatgtgagagagtactgcaaagattcatattatttggttaaagtttacacacccccacatgcatatatacaatgggaaattttagtttttgttcatatggacaaaattagaattagacttaacattttcacatatctcaactatactagcacatgtggtattattctttaaaccaccaactaagattcagttaattagttagttgttcatgaattaacttaactatcaagtatgacatcaactatattgagttttttagtctatgtaaagaggactactcatctcattttatatattaaatctcttcgacatggtagaacaaggaaaggcaaaccagaaaagaatcaaagaaaaaagaaaagaaagagagagacagatgctgaaagaagataagtatttcattgattaacaaagtcattaagcatgacttatatacgtacatcagtacacttaatccaaaagctaacagaaacaattacaaagttagttagaaactaacagctggacagagctaaccaacaagctaaatcctaactaacttttaactaactcattttaacaagtcccctcaaacttacaattggaactactttcaattgttagtttgtttctaaacagagcaaacagaaagctttagatagccttggtcaaaccatcagccacttgatcaatagcaggcccatgcttgacttcaagctgtttctgctaaaccttctctatggcaatatagagatccaattctatatgcttagttctggcatgtagaacaagattgagtgtgagcataatcgtgctgaggttgtcacaccaaaccattggagacttaggaagttggatgtgtaactctgaaaacaaggaatgtagccaagcaatctcaacaatagtgattgcaaggctcctgcattctgcctcagtgctggacttgaaaacaatgtgttgtttcttgcattgcaaggtgataaggttatctcctagataaatcacaaaactagaagttgatcttcggtcatttggatctgctgcccattcagcatcacgaaaacaagttagctcaaaattaacaggtcttgtaagatgcaaactatagtccaaagtgcctcaaacataccttaagattcttttaactgcaacccaatgagcttataatgcatgaattggcatactttgttgacactgtacactatttctggtctggtgatagtgaagtattagagagcaccaaccacagaccaataaagctgagggtcttcaatagggtcactcccatatgcagaaagtttgaggccacttgtcataggtgtagaggaggatttggcaccttgcatttttgccttgcatagccaatcctaggcatactttgtctgagatagatgcataccctcagctgtgtgagacacttcaattctaagaaagtaattgagtttttccaaatccttgagagagaattaatcattgagagctgtaattatttaagaaatggtctcttgattgctgtctgtaattataatatcatcaacatacaataggattagtgttgtgtatgaattaatgtgttgaatgaacaaggactgatcagctttggaggaagtgaacccaagagagaaaagacagtgttgttgtaatgaaccagaaacttaattatgaataactaggatttattatatattatgggttaattaagtagtaataagtaggattatgatcctactaacttaatttagaataaattataaattttactataagtggataaataagcataatttgttaattacgaagatttatttgaaatatgtggatataatgtaagttatttgtgaaataaaaatatttttaggttcattgaccctagagacccgattggagaccaaaaatatgacaacagttttagttaaaaatattgatgggattattgagataagtcgattttaaaaatattgagctattttagggtaatcaaaattgactaaataccctaaaattagagatttcttagtggctaaaaaataataagataactattaataataaattttttattaatattattaataaacgttattcttatatcagtttaatatatattatatattatgtttttaaaaatgtatcagttaagtaatatatatattaagtttataaattgaagaacgaaagaaacgaaactctctcttctccttcctgggacgaaaccctctcttctttagtccattttctttgattttcaacccaaaacctagtatttcaagctccggtagtagcaggatagtaaatcactcaagaaggagagcttaaggtaaggattaatttcgttttaaggtaaaaactattgatttttttatagtggctttgtgatttagaatacttatggagattctgacttcgtagaattattctttggtagctatgggactagttttgatgtttacttgttcaattggaggtgattttgagttagaaattgagtttggaacttaaagcttaagtgcaaacattaatggcattttctatttaagggcttgatttttatttctgttacgtaaggattgttgtatttatagtacatatgtgccctgtgaagtttgaaatgatttgaatatgtttcaggggtgtttcggtgagtacgaaatttgagatttttgtgctagaaaatagtttgccgtttttgaaaatttctacagattacaaattatatttttgtcataacttttcactggggtatatatttgccgtttttgaaagtttcgaagcctgtgacgagctctacaatatggtatatattttagagtcaaaatataagttttattttagtgtatttatactacgggattgagtaggaacccttaggttatc

SEQ ID NO: 14546 - DNA, 5104 bp, Cannabis sativa
gcaatatgagtttctctgtagaattccgtaaaaatgtaaaaaaaaaactgtttcgaagtgtaaaaataaaaaaaacttttttttttttcctttttgcttagcgaagcgtattttataatttaaaactttatcaacgcatttttgtaaataaaaactttagaatgtaaaattataaataaaaaaaatggtatttttgaaactttcccaaaaaagaaaaatgagtaaaacgacattggtatacatgtgaataacgacatgtcgtatctaacacctggtgcgctccaagcctaaaaccccttccctagaatgaattagcaaaacctcaggtctccgaatcacagcagcaaggtgaggcaaacatggttttatcgaacaagaagctgaagcaacggctcagagcagagttggctgagtctttagctgcatctgtagccaaaccagattccaacaacgatgcctcctccgcaaatccaaacggggatagtcatttgcagcagcctaagcctcagcctctaaaagttcttttggactcggcaactcaaaggcagagattgtccaaacgtgaaaagcgcagaaaaaccctatctttacaaggtcccaaggcggtacactgtgatggttctgaagagaatatcagtaaaggaggaggaggaggagaagaaaatggaattaaggaaactgggtcagatggtttaggggataagaagaagaaggagaagaaaagaaagagagaaactaatgtagacgagaaagatggagttttggtgtcagaggaaaatggggtcgataaatcgactgagaagaagagcaataagaagaaaaagaagaataagtataagaagaagaataataacaaacaaggccaaagttaaggatgagtgagggagagagaaagagaaagagaaagaggacgagaaaatggtaatggaaacgaatacgaatcttctgaatgataggtactttaaattatacccaatgcccatatttagtttagtcatttccctttcaatttaattcacatttggtttcattgcgttggtgtttaatttgaagttctatatagtttttgttgtttttgcatgttgtttattggcttgaattttatattgaatcttaacatgaacatctctgcctgcctagtgcctagagctcagcatagcttgtgtattctgtttaacataaaattggattgttgaatgactgttgaatttgttcaaaggaaaattgaactattagaaggatttgaaagtttcactctacatttctatgtgcccttaaattggaatttgtccaaagggagagatgttatgatttgagactgtatattcatgaatgacatgctttttattttgtggcacagtgggaattagcgttaatgttgtttgatattcaagtatgctctggtttgtttgttctatattttcactggtcctggttttgctgagcacctaagcttgtgggatttacactgataattatttcttcttcttttttttttttttcagtcaaataaatggaaatgttactacaaaggtttatgttggaggaattcctttctactcaactgaggatgacattcgaagttattttgaagcctgcggcacaataaccgaaattgattgtatgacatttccagagagtggaaagtttagaggaatcgccattatcagctttaaggtaaattactgtgtaaagtaagtttgcattatagttatgctatattggaaatggatctgccgtaccattgtgttgtctcactcaaaatgcactagtctttttatgactgtactaattatagattattttctatagcattttcaatgattcattgtacgttctttatgtataaaaatttgaccatcggaatatgatgtatgtatcttaaactttggctcttaagaatttagaaactatgatctttacctgatacagatctttctttgccttgaatttgtagactgaagctgcagctaaacgagccttggctcttgatggagccgacatgtgagtaaacaaattcttctctttaaatcaattaaatcactattcttgctcaattctcacatcaagcatattgcaatacatctcaggggtggactcttcttgaccatccagccatacaaaacaaatcgaaccaacaaatcatcaaattttgctccacaatatgtagagggttacagaagaatctatgttggcaatttgtcatgggatatcactgaggacaaactaaggaattttttctcagaatgcaaaatatcatctgtacgatttggtatggacaaggaaacaagtaaatttcgaggttatgctcatgtggatttcgtagacaatctttctttgacattggcactaaaattggatcagaagcacgtttgtggaagacccgtgaagataagttgtgcagtccccttgaagaaagcagcagggacggagttctcaagacccattcctacatctacagagattactacatcaagaactgtttcggcaacaacagaaacgactgcttcaagacctgttccgacaaccacagaaactactgatttgaatactgtagtgcctgctgttggtactggtaagatgaagagaaggacatgttatgaatgtggtgagaagggtcatatttcttctgagtgcccaatgaagcaagcagctgtttcgacaactacagaaactagtgatttaagacctgttccgactaccacagaaactattgattcaagacctgttctgacaaccacggaaactattgattggaataatgtagtgcctgctgttggtactggtaagttgaagagaaggacatgttatgaatgtggtgagaagggtcacatctcttccgactgtccaaagaagcaagcagctgtttcgacaactacaggaactagtgattcaagacctgttccgacaacaacagaaactactgattcaagacctgttctgacaaccactgaaactaatgattggaataatgtagtgcctgctgttagtactggcaagatgaagagaaggacttgttatgaatgcggtgagaagggccatatttcttctgactgtccaaagaagcaagccactacagattaaacctgtatgccatctttctatgtttttttgtgaaacatatgtaggggaagcacttttcagttagacatgtaacattgttttcaaagtcagtattgtggcttagtttttatttgacttggagaaaaaattttgtagctctgtaagtcagcacattttttccccctctttatgaaagttttaaagaagaaaactattatcccaagacttataattatgaacaacacaattacttcattcatactgttaataatggaatacaaaaactagtttctcttatatgaacagcaacacccaaataacttcatatctttcactccaatataatatgcctaatcatttgatttggattgcacattctcatcatagaaacccttctgttaaaaccagccggcaaaagagttgacctgaatattttatttggtatgttagcttgttgcaagtggtgtgtgttactaaaaaaaaaataaactattttttttttggcttaaaattctaatgtctgaaattattgctaaaacaaaagtttataatcttaataatagaagaaatcgtaacaaggtcaaggaatatggacacaaatagaggcaaagcaggcagtgccataagtatcatggcatgtaatggccggacttggggggcatgatataactattgttcattctcttttacttattctgcttggagctttgtagattgtctactaaaaattctcatttttttctgtttacaagtgagaatttgtcaaactgtgttaactgagtttcatggtttcatgggattactttgacttagtttatatcgaaaaaagaaacctttgtccttcttctgacttgggtccctaaacttgttaataagatattagtcaatgtgattaaatgaacgttttagagtttggtccctatacactaactacaataataataataaaaaatggtattgattttattaagatcaatatcatataggataacatgatgaaacaaatgtagtacttccaagctttgttcttctataaattacaaacttccttcttttcctctcagctgttccttactactaaatttattcattactaataagctaaacctctttcagtaaagctctgttccaacaatggcggttagcttactaaagcaggctgacatttccatgccacaaaaatggcaagatatgaaagagaataatagtagcagttgtagtaaccgaggaagtagagcttggacagagacaaagtcagtgaaaacagataaaaaagttccagtgatttactacctttcaaggaataaccagcttgatcatcctcatttcatggtggttcctctctcttctccccaaggactttatctcaaaggtaaaaacttatacatgaaaaataacttctaacatcaaattcttaccttgtttttgtacttaacttgtagtattgcttatctttacagatgtgataagtaagttgatttcccttagaggacaaggcatagccaccatgtattcttggtcttcaaagaggtacaaaggtttagtttattagcaatcattgttatcatttcatgattttccttcattaaaagtttttgacattttcaggagctataagaacgggtttgtatggcaagacttatccgataatgatttcatatatccatgccaaggccatgagtacgttgtaaaagggtcacaactgcttgaatcttctttgagcttcaggtctttcgaaagcacgatctcatcaaactcatcatcgtcttcatcctccttaatttcccgcgaaacagatagtcctctcgaggaacattccagtgttgatcttgatccaaccaaaatcattagaagaaaaaatcagtcatggggctcatttgatgacctcggagaatacaaagtctacaagcctaaaatctctaaagaactggctgccaaaggcacaaacgtttctactcaaactgacgagaaggtcaggccaagaaaatcaagactcagtgaggtttctgggcctgaaaggaatggtggattggagagctcg

SEQ ID NO: 14547 - DNA, 8737 bp, Cannabis sativa
aacctgtttgccaagaatgagaagcccaggtttctcaacctcaacaagagccctcaaaagctttgccacagagagtgggaataaagcttcagttgactcaacatgaatacccctatcagctcccatggctaaaccagtcctaagagtgtcaatgcactgagctggacccatgctgacagccaccacctcagaagccaaacctgactctttcattctcaaagcttcttccagtgcaatctcacaaaaggggttcatagacattttcacattctgggtctcaaccccagtctacaaaaaaacaacaaaagattgaaacttaaacgatttgaaagacaattcataattgggttttgattgattgttcgtaccttgttgggtttgactctgattttcacggcatagtcaactacgcgcttaattgccaccattatcttcatcgttgttttctgaaattgaaggagaaaagaaagaatttgagtaagttatttatatagaatggagattaattggctaagttctacaactcaatcagacgtgtacatattaaagtgtacaaatttgttaaaactttcctatttattttttaaaaaactcatctttatccaaatgatcatcttggttttatgaaaaatgccatcttttcttaaagatgggaaatttaacaaaatactacttttcatattaaaattgtccacttttatccaaacaacatgtttagggaaattatatggtcgtatttttgagatcttaattgaggtaaatagcggcataagtacccaaaattaattttattattgtcggggtacatataacttttcttttaataaattcaaatcagaatctgtactgataaaattggaaaaaaattacagttttacaaacattaggtacttatgctgctaaaaataaacattgaatttatgtcgcttacaaacataaaatttttggtacttatgccactatttacccaaatagttataatcttaatataaaaagagatttacatagttattaagttattttgtaaattttaaaaagatttaaaataatttaacttgctaaaaataagttttaagcagtaaattgtacgacaatttcttttattttattagcatgtaaaatagaaatagacagtttaaattctattttcggtatggcaaattattcataaacactgaaataacatttcaatggcggattcagaaattttgttcgggcatatttagaacatgtagaaacctttcttgttcacaattataatcaataccaatctacaatagttctatgatctttagcttcttctcactcagttcatgataagcttttacattcaagttcaactccttatttccaacagagtcaagtgacattatcatcaagccaaaatctttgccatttggatgatcaaaactattaaacaccacaccactcgaaaatcggtgtttcaggcaatatgaccggccaaactaagaatcttgacatgcttttttcgcctcaactcatgaggaactggaccgaaaactctagttccaataggttgaccttgcttgtcaacaagcacgacggcattatcatcaaacttgacctcacttccatcgcaacggcctttttgcatggcagcacgaactacaactccgtacacaacctttcctttcttcactttaccgttgggataggcctctttcaccgatgcaactatagtgtctccaagtcttgctcctttctttcccttcaaagcttgtatgcacatcactttcttcgccccggaattgtctacaactttcagtacagtcctcatctgtataaaactcctaatctgctataaaaagggaatgaaacaaatgaatctcaactgataagcagattatgaattatgttttctactatgtaaaatcggttaagataggtttggttgggaagaataaaaacacagaaacaagaatgaaaatgagaatgacatttcagtactaccaaacagaggaatgggatgtaaattgattcttttccattccattgcattaacctcacttccatataagtactacattctatcatcatccagtaaactcaatgataacaacaatgaacacaatgagtcaattcaaaagaaattcaacagtttttaacactatcctaacacaatcaaacaccttatattacataagttactcgaaacctcattcagtcaagagagcaaatcgcatgcctaaccatttgagctatccacgaaattcaaaaccgaaacaaatgcactaacctgagacaagaaactgttgtttgccatctcatgttgtgtgcttactgttgcagacaacttgttcccaagacctcccaacaatgaacggccaactattacatcaaaaaccaagaaagtgagaactatgaatatgcattcagaaacccaaaaaaattggaccaaaattatcttcttccacattgactcaacacattaggtcaatgtccaaggaaggaagccatgatagttcaaaaatcaaatctttaaatgtctaataatttttgaatggatcaaagtgaaaaccaaaaagggtgtcatgagataataagatggtaccatgagaacactttgaagctaaaaaaccagccattgttctgaacccaattgaatataaatcttctttatcttcctcctgtcaatgcctatatccaaaaatgaaaaacatcatcataaaagggactaaacactgattaaagaaattgagttaattaaagattagattagatcaataccccaaaacggtttctttaaccacacaaataggagaaaatctaaattaaacaaaacaaaaaatgattatatatgtaattatatactgagaacgattgaggggactgacctgaggaagaagagagtgtccaaatgaagagcagagagaagggtcggcggcggcttaggaactcaaagtgtgtgtgtgtgagagagtgaggggttttagaaattctgtaaatatgttttcaaaaatgctatctttaatcattttagatggagaaaaataccacttttctcatattgacaagaaaaaatgtcatctttatccaaaggaatgataaaaatgctctcttttttttttttttgtttatatgggaaaactcactagcctacgtggcaagaagaagctgtttgttctttcctatgattcttttgtagagagctcatcctttagcttctctgttcctttcactccttttcagctcagctccaccgccggccggtatcgcaagtatgtaaagttcacccatttaactatcattctcattatggatatatggtttctgtttacttagccctttcatctttatccattgtttctttaactacattccaaacatgcccttaatctaaatttttgattttttgaagtaaatctttcatgttgtctgtttgtttcaagtttgggtttttattgatttgattgtttaagaacttgattgtgccaattttaacagtttttagtattgaatttgtttgattagagaaaagaaatgctctactgaacaccccatttgctcaaattcaaaatggtttattcgttgatattgtaaactgctctaatttgtatctgcttagctaattaagatcactgtacaatgtataggaacttttgtgataaacccaattggggataagagcaaagattgggaaaactagatttaatactatgttcaatttctgtagctgcataaaatacttttgatttgaatattttaactataataacttgttatgagaatataggtactaatctctactcttgttatgtgttggattgtatatgtatcactagatcagaatcgttctcaacgagtgcataagaagtgatcccatttcatttcattacagtgttgatttcggaatctgtatattgtcatccaacaaattgtttatcaataaatgaagaatagtattttgttttcttgaatttctctttcaaattgccttatcagaaccaccatagtttggccgagtcaatctcattccttgttctgttgaagatgtcatcaatggcaaaagcagtactacaatctcctatacatacctcggtttcatggcctttctctcttcctccccctcacttgtttaggccatccacacttacaacgaaccagtctatgataggacacgggggagccttaattctgcgtcgcagcagtttcatcattgctgcagcgtctggatcatcatcggcttcagcagtcacgccaagcagcggctcagctccaccggtaattaagaagagattgaggtataggaggcagtacccgggagagaatgtgggcatcaccgaggaaatgaggttcgtggccatgagacttcgcaacattaatggtaagaagtacaatggtaacagtgatagtgaaaacgaggaaagtggagctagtgaatcagaatcagaaggtgatgatgatgagtcggggacatggaagcctagcatggaaggtttcctcaaatacttggttgatagccagctcgtgttcaacatcattgagcgcattgttgatgagtctgatgatgtttcttgtgagtatcttatgttccttagtgcttttctgtttgtaggttttcactctataatcttagctttttgcttaataactgaacagattcttactttagaaaaaccgggttagaaagatcagaagcgattttgaaagatttagagtggtttagacaaaagggaatggcgattcccgagcctaccaatgttggagtttcttatggaaagtatcttgaagagctagctgagaagaatgctccaatgttcctctgtcatttctataacatatatttctcccatatctcgggaggtcaaatcatagcaaagcaagtatgtctctaaagcattactctctttttcggtttcactatgctatgtcaagaattgataatgaattgttgctttaggtttctgagaatcttctcgatggagtggaactcgaattttgcaaatgggaagcagaggtacccgagttgttgaaaggtgttcgggaaaagcttaacatgcttggagaggtattcattacaaacgttctttcgttctttctcgtgcttgtgaatactttattgatagaatttttatgatacaatcaaaattttcaatacagcattggtctagagatgtgaaaaacaaatgcttaagagaagcatcgaagtcattcaagcttctcggtcagctagttcgcctaataattttgtgaaacaagttttttcatcgttatcaagtaagttacatgttttccttctcattgttaaagaaaattttgcataccattttcttatctcttggcgggtcagtactgaaaatcgaaaatgcctgcttacctacagttcttcgggttccaatttttgtatataaaggaagagattcaacatcacttgaaactaaagtatgattcttggtttaccttgattattagtaactctttttattggtttgaaagtagctaaatttgctcttaatatttgtgtatatattttttgaacaatttgaaattagatttgtatggtggtttagataaagtgatatgaaacttagcaaattgagggtactcaagtttaacttccaacttatgtcttgattttcatgataaatttaagatatcgatgaatgttctttgttttcggttgggcattgcatgcattcccctcacatatgctttctagggtcggtcttggactaagacaggctaggcttgcgcttagggcccactcaacccaagggccctgcaatttttttcccttttaaaaatacggattttattattgatttttgaaaatagtacatatattttaaataagggtctaataatattttttttactaaatcctcacaaatctcagggccaacctaaactttcagctgtcaaaagacatttgtgttgcttatactcgattttattttatggttcttctagaatttttctatcccagtcaaattttttaaccataaagttttatttttgccgaaattcctgacaagtcatccacttaagcatgaagaacatccttcatttttgagctttttaggcaaaatgtctcttgtttggtatcatcttttaaagatatcgttttcaatgaaatacaatatcttaagcttgtttaaatcgcaacgttttcattaaagctacgcgaatttcttgctgcatttgccaacataaaaatggattataagcgtgttgaatagatgttaattgtttgagcctaaccgatatccatatccatgcatgtttcggaaacaatgcaatgttgtatcaaacaaattcaaattcaaaagcgacaacgatgaacttctctactcctcgaattaagaaaacccagaactggtatgctcttagcaagaccgacatagttaggatcgcgaaaatgcaagaacattttgtagaaaacttgaagtaaaaccatagatggttgtcagaattttaaacataaactaatgtataataggtatgtagcattgattagtgttcttggcttatttagatgaaagtagagacacatgatgggaagaacagtggtcctcctttgcccatacataaaggcacatggttttgattagaaaagaaatatcaatatcaagttcccaatagctaattttattattgtattcaacaaacattgacatccttatttattattatgtttatctaaacatcatgtggagaagttgacacttgacaaaaaggcaactatcatatcattaagttgatgaaacaatttctccaatcactaaaaagtgcaccaatagtattcaacatcattaaaagttgttataataaaagattgggtcttacatattttaattaattttaataaagataacattttataactatgttgcacactaatagtgtctaatagtaatatttagaagtataggaaaaatttattgtacactccctaaaagaaatgtttcgatatactttaatctgtttcaacatttaaaaaatagttttagtagtttttttattattttataattgtgtatattgtagtaatttagttacacctgtaaatatttaaattttttgaatagtttacagtatcgaaaaataaaatttaaacagtacttagcacacatataagaaaaaacaattatgtttattcagaattttctcaaaatttataggtaatttttgataactagaacgtgtagattaaaaaaatatcgaaaaaaataagagatacattttaccgaaatatctttttagagatgtactgtaaacttatcccaaagtatgcaatttaatttgaattttattaaatatatatatatatatatgtattataagagttcatgcttcttcactatattaatgtttatcacagtaaaatggtccttttttctgcactattttggccagaaatattgtcactaattctatgaaacatcataacagtcacaccactcactattcacataaacttttctgttttaaaagagaatttgttcctttctgctacaattttatacactaatttttccaactcaccaatcactctactcattctttctgcaataatattattcactttacactattgtatagtttgttgttgcaatagctcaaaaatttgacaaaataaaaataatactttgtttgtctaagcatattaagtttaggtaagataataattgagctataaataataaatacatataataaaatgaaaacaatatgtaacatattggaaattaataataataataataattatagcagccattgccaaccctatgacattaccaaacttttcatttaaaccataattgccaaccttacaacacacacctaactattttcagagtttggtgtgtagtgtaatgctcaacattttgtgctatcaaaacttttaagtctttgtatttgtgcaaaaagtaaacaaatttgtatataataaagtatattataataattagctatatatctattgatttatagtaattatttcaatttgatagtgtaatattatcaattaattctttgtttctagatctaaatgagaagcaattttctttatttttctaattatcaaaaatatacaattgtgtgatgagacaatatgtattagagtttagaaggggacttaactacataactctagttagacagttagacttggtctgatcatcaaagtctgcttcaactattttatatcgaaagatgctaagcctgacccgttaattattgatcactaataatatggattaatacaataaagaactatccaattaactcatattttatttaaaaaataataatattttattaaaacaaaaaaaaatgtaaacccaaataaaaaatctaacagttgcactcttttttttttattattccatattatgcttgttatgcatcaaaacggtctacattgagtaatgatatgtgtattcaaaatatgtatcaaaacgttagatatgtgcatccaaaatatacattcaaatgttatacatagtgatgcactgactaaaagaataatttgcgacataaatacttaagtttaactctcagttgcagataaatacctaagtttatttgtttacggatgatacctaaagttatatttctgaaatttctataggaatctaaccgttaagtgttaagttattttccacatgtcattttcttattaatatatttaaattaacttttaaataaaaataaaaatttaatgacctggaccaattaaaaattattacgtgaatattgacttgacacttaa

SEQ ID NO: 14548 - DNA, 3306 bp, Cannabis sativa
  modified_base (132)..(133): a, c, t, g, unknown or other
tgaaaaaattggtataataatttagtgggagcaagaaaatgacatttggtaggtacggttggagctatcaaatagtcacaagaaaagaaagcctctcatcggatatatatgctgagagagagagagagaganngagagagagagagagagagcaagtgagcaagagagatgtcacaagacggggaagatcatgccatggaaagcaaagaaggtgaaaccaatatggctgcctggcttcttggtattaaaacgcttaagattcaaccataccatcttcctcctttgggtaacgttttcctttatcctccaatatttttcatgtatcatttaattcaatcatgatggatgatcggatggctaacaatataatttgtgttggctaaagtcccataaatggtaacttgtagtattcctatttgatttttgagttgaggctttgaactaaagcaatcacatatttaaagtgaattcttttgttaacaaagcttgtatcttcttaggaccccatgatgttaaagttcgagtaaaagctctgggtatttgtggaagtgatattcaccactttaaggtaacaagaaccctaatcatttacctcaaattttaatatacctcatggcagctttcgttatattttatttttttaatatttttctttttattttgctaatgtgttgaaaagacaatgagatgtgcaaatttcatagtaaaaaagccaatggtaataggacacgagtgtgcgggtgtaattgaagaagtagggagtgaggtgaagtcactagatgtgggtgatcgtgtggcattagagcctggaatcagctgccgtcaatgcacactctgcaaaagtggtcgttacaatctttgcccaaaaatgaaattttttggctctccaccaactaatggttctcttgcaaacaaagtatgacccttataagctttcttaagtcttattttctttactttgtggcctttattagaaaattcagtacaagaataaaaaccagattctccaaaaatatgagctttttcattatctttgtctaggtggtgcacccagcagacttgtgctataagttgccagaaaatgtaagcttggaggaaggtgcaatgtgcgaacctctgagtgttggtgttcatgcttgtcgccgagcaaatgtaagtccggagaccaaagtattgatcatgggagccggacctataggccttgttactctgctgactgctcgtgcttttggagctcctagaattgtcataactgacgttgatgatcgtcgattgtcgattgccaagagccttggtgcagataagattgttttagtttcaactaatatagaggttctttgatctcccctttgaatctttttcaacccaaatgtttgctgaaaagaggtttctaaaagttatcatcttaaacaggatgtaagtgtagacgtgggggaagtccaaaaagccatgggttccgacattgatgtaagctttgattgtgttggttataacaagaccatgtcaacagctttgaatgctactcgttcgggtgggaaagtttgcctcattgggttagctcagagtgagatgactgctcctcttacccctgctgctgcaaggtgagtaagctatttggactttgatcaaacatgatctctttttttacaaacactaattttatattgattttgtaacagggaggttgatatcattggaatatttcgttataggaatacctggccactcagcattgagttgttgaggactggtaagattgatgttaagccactgataacccacagatttgggttctcacagaaagatatcaatgctgcttttgaaactagtgctggtgggggcaatgccattaaggttatgtttaatctttaagtgctcacctgaataactacaagggcaatgccaacatgttttggtccacccaattcaaccacaatatcacaattgatgtgctatggtatgagttatttatttgatgttagaccattgactttgatgggagccaaatggcttctgcagattgttcgagttcaacaattgtctccttttcaatatcatcccatctatcaataactgcgtaagtacttgatgaaagaaacataacacccactacacaaagatacacttcaagaagcttctttgtgacaacttcagatagggccacatttccataaaacttacaagtacttaacaaaattcttcaaacgacaacatctggaaccacattcattttgattataaagtcatgccataaaccttttccatagattgaaaatcccaacaaaggttccatgattctgttctctgccctcttttaacatttgcaagaagatttcaagtgccaaatttgcaaaattattcaacaagacctgaaagaactgaagcccatgacattgaatctttcgtttccatctcctcaaacattcttaacgcattctcagcccctccacatatgcattacatatcaattaaagcgtttccaacctacataaatatcagtatgtctgttagtaagattgaataatgatcatagtagtccacgataccacatccgtttggacaatctcattaaaaagttcccttgcttgctacaactgaattccctacctttaaatatcacatgatcaaagcgttccatgaaactactctcagttcaattatggtgctttccaagtaggcatccatattaacatggttatcaattcatttgtgtgtttaaataaagagtgtgggactccatattggcccaagaaactacatgctaaaataactttcatcattgtcacagaatcaagtctcacatctgccgcctgcattgtttcaaaaagacttaaaacatcctcaaaccgatcacatttcgtatagccacagatctctctcagtcattccgtcgaacactctttgcgcaaaacccaattagtcacaggaagaatacaaagaatgacagcatttccatcaaaaagataggtgtcgaaaccaattaatgtgaatattttggccatgtaaaacatcagattctcgagcacaggcctggctatacatacgcatatgcatgtcatgatgtcaatagcttttcttggctggtaactgcggcagtcaaatcatataactccaaaagcaaacaaactgggtcgctcgatatggtcaaaagctaaatgggctttgtccaaatttagatgagaagggattatttcatatttaaccaaaaaattaaaaataaattacaaaatgattttaaaaatttggaaaggtctatagtactcccgtgttttgctagactctattttttgggggtttttttttttt

SEQ ID NO: 14549 - DNA, 8434 bp, Cannabis sativa
  modified_base (6299)..(6304): a, c, t, g, unknown or other
  modified_base (7212)..(7215): a, c, t, g, unknown or other
tcgaaatcatcaattagaaaaaagggaaagtcaagtttcctaaaattagacaactttccgtaagagaatttcttctcttacaagaagtttccaaacaaataaaagtccagctgaaaaaatgattctttcctaagatagaaagagcaataaaatgcacaaaatcaatgtaataaaaataatttaaatgctcaataaaaatacacattaattaaaaaatattttgacaactaaattgcaaaaaaaaaaaagacctaacaatggttatcatgacttggataaagaaagagagatattgggtgttgtaaggttttaatttgtgatattttttagggtgtttcaaagtactcttaattagttttagtttcgttttgttcaattttatgctttagtttttaatattttccagtttagtaaataaagaggaagtgaacaagttggagaaaaaatgagaaaaatgatgaattgattgaagtcttgtcactagtgcaccaaaagatcaatccatgaaaaaaaaaatcttgaagatttggtgtgatcggagctcttgaagttgaagaactagagaaagtggagtagcgtcgtggcatagaaattcaatgccatggcgctaaaataccaaaaataggcagaaaggtcgtgtttcaaaggtgtcaaggtaggcctcaatattggaatcttaagttaaggcattggaacacttagagctcactacctaaaaagagccttcaggagtcgcgacatggagggctagtgctgcggcatgctctacttaacttcgaaggtcttgtacatgctttctacacacggaccacaacatgcatccttcaatgtcgcaacccgctatggtgttttgcaaaaaattaaggtttttagacactaattttgagattaaaggggacttttgacactttcgagagcataaactttgggagataaaaaatagaggcagaaagcggcttaagagactatcatcattatttttcgacaagatctttcttcttctttacttttcatgttcttaattagttattgttatcaatttttgaggatgacaatgagtagctaaatattttattagggtgtcaatggagattatttgatttttctttatggtttaatgtaatttagttcttccccaattttttatgtgcatctattttatttgtgcttaattcttttaattgtctaattaccaattaattagttatgattttaatgcaaaatttaaaaagtgagtgttgattattctctagtaaaatagacatagattttgatattggacaagagtacctgtatggtctatgtagcatttaggattttcatgtttgatgcaaattgtatgactaatttatcataaaagtgtaggactttaccatacaatttatattctgtagatcctaacaagaatatagattgaaatagttaatccactatcaaatagaagtttgaatatgaactaaaactgtattagaccataggaaatttatacaattgaaattaattgacctaagtttagtcattgttattagttcttatttttattgcttttgatttagttttatttttatttttaaaacttattggaaattattgccaccagattgaattagaaattgaattgtttggtacttaactacagttctcgtaggaaggatactctacttttactattattacttgtaaacaatatgtgcacttgcttaatgattactgtcctaattgtagcttcttgtcatcattgggacaacatccttctttaaaacaccttgtcactgagagattaagaaatatggtgagaataggttcagagttttattatcctacttctactgcaatacaaatacaaacaaagccattttttagatctttggaaaccttgagatttgagggtttggatagtctccaagagtagtcatttaatgaaggtggaatttttccaagtctcaagaaactttgttttgatgggtgtagaagactcaaagtagcattgtttccaaatcattttctattgttgagaaagcttgtgataagggaatatgagcaactagtacctaatttactagccgaaagtgttgctcacactacatttccaaatcttgagaagttgaaaatatttagttgtggaggtcaagaatgatttctagaagggagatttcctttgagtttaaagagcattgaaattaaatgttgtgacaatcttaagtacttagatgaaggagcctttcagagactcattttgcttgagaagttagtaatttatggctgtggaaaactacaatatgcttgcctaaagaattaccagcttctctttctcatttacacattcatatttgtaaattgctagcatgatgagtcgagagggagacaggggaggactggccagttattgtccacccctaatatctatattacaacatagagatagaagtaactgtgacagtcagtagtctcgtgatctttaagggtaaataccaagtaaactatgcaatcccacatcacttagagaaggtcaagtgcaaagattcttagattgttgaggtatgaaactatacagttgaagaagacttaaatagattgatgggtattgttaggttctagattttgttattgttaagtaaacttttggagtgttttaattagatttagttgtgttttgttttattttacgctttagtctattaatatttttaggtttaataataaagaagaaagtgatcaagttgaagaaaatgttagtttttattgtactaaatcaggtacgcatcggaagaatttcgtattatttgattatcattgtctcatatcccattgaatctcaagatgtgtgtacattaaatcaaaataataaaaaataataatgtttagagtatacctcttgaagcctatgagagtatcctcgaaacttctcataagttgtatcctactcttgaaaattttattgattataggaaagttaattctggtactgtactaatgcggaatgacaattcttgcagggtaattggcattggaaaggtggccatgaagcactatgatggcactattagaatgctgcatgaagtaagacatataccaaagttgagaagaaacctgatctcactaggaactcttgaagatgaaggctacagctataaatccagtaatggccatatgagaattgcaaaagggtctctcaacatcatgaaaggtgaaaagaagaatgtcttatacattttacaaggagaagcagtactggtttctgaagctagtgttatgcaacatcaagaaattgacatggaaatgtgttacagaatgatgggtcatatgagtgagcaagggatcaaagaactgaccaagcaagggctcctaggaaatttcaaactcaattcactaccattatgtgaggcatgtgtgttgggaaagcaccacaggttaaagttcatggcaggatataatagttgaaagaggccattagaatatgcccatgctgatttgtggggtctcacaaggttggaacacactcaggtaaacactactttctgtctattttagatgatttcaataggcatgtgtgggtttatcttcttagaactaagaatgaatgtctagaaaaattcagagaatggaaaattgaggttgaaaaccagtatgaaaagaaacttaaagtgcttaagacagatactggcttagaatttatcaacactagatttgacttgttgtgttctgagtttggaattttaggcataggactgttaagcacactcctcagcaaaatggtgttgctgagagaatgaataagaccttattgaataaagtaaggtgtttgctgattagttctggtttagggaaaatctattgggggaggctctcattactgcttgatatttgataaataggagtcctagtagagtcattgatctgaaaaccccatatgagaaattgcatggcactacacctaaattgaatcacttaaaaatctttggctgcattgcatatgcacaccagaaacttgataagttagaacctagggccattaaatgattctttcttggatatcctaagggtgttaaaggatataggttatgtaaaattgaaaatatatctagggatgtagtctttaatgagcatgatttcatgcacttgacagccaagaaaagcaaagattctgatgttgcaggcgctgatagagatgacatggctgaattggagataaattttgacagagtagaagtctcaactgaattatctcatacaccaacagtagggacagaaactaagatggaaacacatgtaactatggaagaacatgatgctgacacatctgaggtggacactctgggaactggtcaagataatcaacctgatttgaccaactaccaattggcaagaggcaggacaaggagagagataaaacccccaagcatgtatggtgaggctgatttgatagcttatgccttagctgtggtacagactaaaagtgctcccgagccaactacctatgaagaagtcattgctagtaaatcaaggaagaagtggcttgctgctatgggagaagagatccagtccttgaagaagaacaaaacctagatattggttcccatgccataagacaagaacgttgtcccttgcagatggttgtttaaggagaaagagggaatgacagagggtgagccacctagatacaaagctacattagtagctaaggggttcacacatgttgaggtggtagattatacaaacattttctcacctattatgaagtaaactataagaatgatgctagctattgctgcacacaatgacttggaggttgagcagttagatgtcaaaactgctttcttaaatggttttctggatgaagagattttcatggagcaaccacctggtttttaggtggaaaatggtaaaatagatttggttttcttgcttaaaagattactgtataggttgaagcaatcacctagacagtggcatctaaggttcaatctatttgttcaaggtattggattttcaagatctaaatttgactcttgtctctactacaaggaactagggacacctaaggttgtgtacctattactctatgttgatgacacgatgatcattagcaaagacaagactaaaattcaagtcattaaaaacaaactaaattttgaatttgaaatgaaagacttgggagctaccaagaaaattctggagatagaagtcattagaagtaggcaagaaggaaagatgatgctgacttggagaagttacattgagaaagtagtcaagaaattcaacttggattcatccaagaccactgttgtgccacttgctgagcattttaaactatcaaatgaatattgtcctaagactgaaactgagagagaatacatgaaggggtaccttatgatatggttgttggatgccttatgtatatcatggttagcattaggtctgatatagcacattctctaagtgtattaagcatgtttatggcaaaccctgggttagaacactggaatgtagtgaagtggctgattagatacttgaaagggacaatcaagtatggtctgatatatcaaagagacacatctaatgtgaggttagaaggttatgttgatgttgattatgcatcaaacatggataatagaagatccactactgcctatgtgttcatggtcaacaagagttgcatatgttgaaaatcacaacaacaaccaatggtggcactctcaactacagaatctgaattcatggccaccactgaagctttcaaggaagctatttggtcacaaggaacactacaagaattacaactgctcaaagataaagggacaatctatcctgatagtctgtcatcaattcacctatgtaagaaccttgtgtaccatgagaagagcaagcacattgacattagattgtacttgattcgagagaagattgaggatagggttttggagctgaaaaaggtgcacacaagtgataaccctgcagatatgagaactaaggttctcaccttcagcaaacggatgcattgtctcagttttctgaacattggtacttgctgaatacattgagatatcaatatcatcaaggcttatgtggaaagattgctagcaatttgattcagagaatcaaggtggaaatttgtggaaattgatcctctaaatcaaactaaaacgaactcacctacattcaactaacttaactaactttcagttatgttgttagttagttggtgatgttattgcacctatttttaagctgtgagttgtgtctatttatagctctttcttttcacttctaaggtagagaatatatatatatagagagannnnnngagagagagagagagagagtttctgagattgagtgctttggtttctaagctgtgagatcatgttcttggaggggtcaagaattgagggtgtacttgggtagtgattgagaaactgtgactgtttctctgctgtgtttatcaagtgcagaagagcattgttgctctagtattagtgtttgtttctactctcttattctccatattaatgaaagcaaagatggtgtttctcaactggagtatggccagggatcaaccttaatctctaggactggaaccaggataaatcttgttgtcttctccattattcaattctgtcatattgcattgttgttcatgtgttttgtctatgattgttgttcaagttaacagtttagtgcaggtatttggtatgagtgttcattggatcacatctaatggatttggacctaacccaaccgatccaatccaattattcattggatattgaattttatcatctgatccaatccaatcgaattgagtcatccgatccgattcgatccaatagatgtattggattggatcgattctaaccattggatgcattgactaattttttactggattggattggatccatccaatctattttagctaccatttaagttaatttcattaaaaagaaaaatatatatataaaaacataatttaaaactttataatccaacatacataataaacattagtttaatccaacctaattctcatgatgtcacaataaaaccgctaaaaaatataattaattcaatacacattaacaattttattagcgtttggaaagataaaaattcatattttggatctaaagtttttttttctttaatctcaagtgttaaatgtatattaaatcaattaatatatatttaaaaataaaatatattaaatatatnnnnttataaatgtattttaaaaatatataaatataattggatgataatttgatcggtttggttggttatctattggatcggatttcccatccaacaaccgatctgattcgattggattttcaaaatttatatccgatccgacccgattatgattaatatctgattctattgggtcggttataaatatcgtgccatttttatttttttactattattttaatctattaagttcaatttttgataaaacatatctcgattttattcaaataattttacattaattaaattgtttgttaattttcattcttaaataaaaataacatattttcaatttatataaatacattcattatttcgtatttgcttggggttcgattttaacaataaataagctaggctttccctttttattattattatttgttcttttttttttctccagatatgtatatttatattgtgtgatcagaaagcactgctaatttaataatttttttaagaaaaaaagatcagttcgttctcttttaagtaatgttaacaaatacctaattcatttaatgttttccataggcatatgataggaccaccattattactattattattttcaacaaaaacttagtgatcaagaaaataccttattcaccactacatcattaaaaataaacaaataacaaaaagctatcatattcccatttaaagaaaatgatcacatctttatgctttcctaccccaaaattcaattccttaccaataataatcgtaaagtttgacattaattttttctccatcctttatttgccaataacatataatcactaacatttcacagaaatcaattacaatatacagttcattactcaaatatataaatatatataggatagaaaatttctgtagtaataaatcacagatcctccggctccttgtacatctcttatttattttggcattcaaaaagttttttaaattcaattctttttcacaatcaagtaagttgtaattatttaagactttttgtaaatttttaaaaaattctaaataatttacaatacaaaaataaaatataaataattactttctatagatctaaaaaaaatcgcacttataataaaatatataaatattatttttagtatagaaaactattttgaattttttaaaaatttacagattgtcttaaataattataatatacacaatcttaaaaaaaaaaaaaaaa

SEQ ID NO: 14550 - DNA, 8693 bp, Cannabis sativa
atttttttcctaaatttcggtagggatatacgtatatatggtatttttgtttttttcggtaactgtaacattaatatgttaatttggtatattagtaaaaattgcccatatttttaggttatattaatatttgggcctacttttttctcgaaagatattttaaatagtctaacttaaaagggttttataaaaatattaagttttggtcaaatgtttacaattttactatcacatagcaaaaaattacctttatattgttctgggcttttatttttcttttatacttaaacactgaatatcaagaacaatgcctccatattcttctacacccacgcacagaaccaccacagcaacacgaacatacccggaaaataactattaattccagcaagattgaacaaaaacagtgaaatcgacgtcaaataaataatcatggcaaaacaactgcaaaacaaatcataaaagaaaaggaaaaaagaattgaaaaaaactaaccatctttgtacaacctcaacactctatgtaatagcggctatattacaagcccagtcttaaaaaatcagaataaaaaaactactaaaacaaacctaaaccaacataaaaataaatgtaagacaatgaagcagaaataaccacttagaaaaatataaaagaaccacacacctcaaaacccttttgccagtgaactcgtcaaatgtatttataggaaaatcaaagtaaaaaaaccacaaaaacaaccatagagaaggaggaagaaatatatttatagcctctatcttccacattcatggacaaaaccaccacaacaacacgagaacacctggaaaataaccattaatttcggcgagatggagcaggaacaatgaaatcaatgtcaaataaataaatcatgacaaaacaatcgtaaaacaacactaaaataaataaaaaaaaaataaaagaaaaaaggattaaaaaaactaaccatcttctacacaacctcaacaccagatgcaatagagactatatttgcaagcctagttctgaaaaatcagaataaaaaaattacacttttttttctaaaaaacgtggctgaaaatttcaaaaactaaataaaaaaaaatgaaaagaaaataaataagaagaactgaacaagaaataaaataaaacacatatatgttaatggagagaaagcgagacaacttgaggaataagagagtgaaaaataataataaccaatgaattttgaaacaaaaaagaaaaaaaaatctcacaaagaagaagatgaacatggagagagagaataatgaaaagtaacgaagtagtgtacataatgagtctaatatatttcatcatcaaataaattaaaagaaaaaaaaaatatggtcatgtgacaaccaaatatcacatcaaacttttattaattttttattcaagaaataaatattaaataggatcctattaaatatgaaacaagtgtcaaaatagggtattacaaattttatgttgcttacaaaaaagacactgtacaaattaacactaaaatgttaaaaacgcgtgtcacaatataaaaataataaatataaaaaacagcacaccatgtaaaaatctctaatttaaaatggattatttcaaaattatacaaagataataaaaaaaattaccaaaatacgatagaattttaaatatttttacagtttttaagattttatttacaaaaaatatagtttttttatatatatattttcatgttatattatgttgtactcttattattttgttatttgtatattattttaatgttgtttggatgttgattttattttcttgttacttttatatagttcttattatttttgtgttgttttatatgactctataaaaatataaaaaaaaatatttgaacggtgtaaaaattttaacaaaatataatttgtgtaatttttcctaattaaatacaatatgcaatttcttccaaaaaaaagtttttttatataaatatggggaaaattgatgtaatttatttttatatggcatgattaaatcatgcaaaaagaaataagattaaaaaataatcaaagtttaagatatcgtaaacaaaaaaaaaagaccataaataaatttgataaaacctctaatagcaaatatcgccaaaaagtcaccgaaaaagacatcggcaccaaaaaatcactagaaagtatcgacactggaaatatcactggaaaaattatcgccaccagaagaatcgtcagaataatcatcaaaaaagtcaatagagttgtgtcgtcgttgaaaaggtcaccagagttagatgtctcaaatataaattaaaatagaaccgattgtataacataatgaataaaaataaataacatacaataactcaaatcggttataagtaaaacataaccggttctataacatgaataaaaacaaataacataaaataacttaaaccagttataattaaaatagactcggttctaattctatatcataatgaatataaacaaataacatagaataactcaaatcgattataattaaaaaaaaaattaaaatactgaaatataaattagaaaaacaaaactagttccacaacaaattaagtaaaatcgaataacacataatacctcataaactggttataattaaaaaaaaaaaagacgaagatcaattctaaaaatactgaggcataatctaaattgaaccggttccataacaaaataaatagaaagataaataacacacaataactcaaaatatatgagaaagaaactggttatatttatcaactaattaaaaattttgacaaaaaaaattagttctataaagcaacaaagataaaaatttacacacaaaaaccaattaaataaaaataaataaattaaaaaccagttccttgaattaactaaatcaaaaatctgttcctgaaataactaaattaaaaactagttctttcaattaattaaatcaaaaattagtttttgaaataaataattcaagaataaatgactaaataaaaaattagttaagacatacattaaaatagattcattccacaataaaatgactaaaaaaataacaaacaataactcaaaaaccaattctaattaaaaagaaaaaagaatcaattccaacaacactagaacataaattaaataaaactggttctacaatatatgaaagttttaatatttttattgacatgttaatttgattgaaaaacattcatatatgattctagggtcgatcttgaaatttagtaggacataaaaaatatttttgcgtccttatttaaaaaagaatgtgatatattttaaagtaagtacaaaaaaaaatgtatattttaaaaaaaataaaacaaaaataagtccgaaagacaaacttagccggtctatatccaaggccgagcctctacgatccctatgaaaccccatagagctaagacatagaaaatatgaaaatcacattcctacttgactgcatttcccattcaaacacgagcagttcactagttctgtgcagataattatgtgttgaaatacacatcacttaagataatttctcgacattgcaggaaagatgtcagtgtcatttttttttgtctcttacaatttggcttacgtaataataggtgcacaaaatagctcttccaaaattacaaagcccatgagctgcccgccccagtagaagcaccagtagaggtttccgcgacaaaggaagcaccattagccgagttgtccacaacagcagaaaccatagcagcccagctttcaatgttacgtttggggaatgtttttcgtactttttaagtttctcactccagcctagtttatttagttggtgtatccaaaagcctacaatataaactaacatattaacttttcaattataccaagtgattaattatcataacttgttaagttgtaacaatgtttcctttttccttcaagctatttgagttaataagctctgattacttttactcaacattcaccatcacacttgaactctctttctattttcttcggagagaaccctctacttcttgatcttagtttgttccttctcactttttcatggcgcttcttcgagctcagatttataagcttcaatggtattcaaagcgagcccagacgtatcgaataacctctctgattggaactctacctccatcgacccatgtagcttctccggcgtctcttgcatcaaccagagtttacagacacgtcctagagaacctcgatctccgcgactcgttcgagtcactcactgcattggctcagctccgagtctcgagcggttgagcctaaagcgtaaccgtctctcctacaacgtattctccagcgagtttccggcgtctgtaacttctcttgcccgactctagacgaagagaagagataagaaaaaactttaaaatatggtattttataaaaaaaaaaatatgaaataacccatagtaaaaactactaaaagttgtgtaatttcaaggaaaaaaaatcagggtaagtagaaaaatactacttttattaattaattattttatatttaattgaaacatacctctttttatatgtattgtacttaaaataccctgacataagagagtcacgtggagattatcttaaagtgacgggcaaaattggtacaatattaaaaaaaagaggtaaaaatgataaactttaaaaaaaaaagtaaaataaaagagaacgatatgaaaaaaagtataaagtataatttccacacaaaaaccgatatgcagtggcccaggcccaacccattcaagcccaaatgaagaccgatcacatagctgtcgcccacttaggaaaaaggttaaatgtggaccaacttcaactacaagaatagtaaatggtggaagcttagaaaaataatgataacaaaagctgatgattatcatcatttaaatcatgaactttgctttcactaaccatcataccatcaagtactactagtatactttgatattatatgcctcgaatcacttttgacccaaactctgccgcctcgctttgtaaagtgtctccaataagctaacactaaaattaatgaccatttgctttttcattattgctctagtaggcttttttttttattggtcaagagaatagtaatatattaaacaaatcaaaagccaaaaggcaaaaggtggaagcatttagtgctactactgttattcctaatcaaataaatataaaacccacctgcactaaaacaagaactttaaaaaaaagtgatcaaaatccccataaattaaagatgatataatctaacataaaatctaagcctcatgtaaatatagagccaagccaagaaaccaaccttacccacatctttttagactcattgaaagatcctctacatcccataaattagcctttgttttctaccaacgtccttggcgtgaatcaatgttaatgcttcaacactctcttcatctcattcactcctcttcctcagtctccataaattcaaagccaatcctaaagcaagtgtagcaggagacattctaaaccctcccaagttctgaactgaactctctctctatggttcaaatgggttttccttttcgtattgttcttcttctgttctgcttttgttttcaagccattcacagctctcggacattctcgcagagctcaaaaacgacgtcgttacttagtgtagcggcttccacccagaagactgttaatgttttttcattggattctagatccaccaagacgcatggctacttgaatcagcaagagcaaagcgtttcgtcttcctcttcaatttctctccaccttcattcacgagtttttcttcatagaccttcacataacgattaccggtcgttgagtttagctcgactaaagcgcgactcagcccgagttagatctcttactacccgattggatctggtcttgggaggagtttccaactcggatcttaaaccagctgagacgcagaataatgagctggaaaaattcaaagctgaggatgttcaggcacctgtcgtttccgggacgagtcaaggaagcggtgagtacttctcccgagttggaatcggtaaaccagcgagtccagtctacatggtgctcgacactgggagtgacgtaaactgggtacaatgcgcaccttgcgccgaatgctaccaacaaacggaccccatcttcgaaccggcggcgtctacttcgtacgcgccgcttacttgcgagacccaacaatgcaagtccctcgacgtgtccgagtgccgcaacgacacgtgcctctacgaggtgtcgtacggagacggatcttacaccgttggtgacttcgtcacggagacagttactctgggcacggttgctgtcgacaatgttgccatcggttgcggtcacaacaacgagggtttgtttatcggcgcggctgggcttctcgggcttggcggcggctcactctcgttcccctcacaactcaatgccacgtcgttttcgtactgcctcgttgaccgggattccgactccgcctcgactctcgagttcgactcgcctttcccacctaacgctgtaacggcgccgttactccgtaaccctcaactcgacacgttctactatctcggcatggagggactcagcgtcggtggcgagttgctctcaatcccgaaatctttcttcgaaattgacggagacggtaacggaggagtaatcatcgactcgggaaccgccgtgactcgactacagactgacatgtacaacgcgcttcgtgacgcgttcgtgaacggtactcgccacctacagtccacggagggagtggcattattcgacacgtgttacgatttgtcttcgaagacgagcgtggaggtcccaacagtgtcgtttcacttccccaacgggagcgttttaccgttaccggctgagaattttcttataccgttagactctaacggaactttttgctttgcgtttgctccgacgtcgtcaccgttatccataattggaaatgtgcagcagcaaggtacacgtgtcggtttcgatcggtctaactcacttgtgggttttacacgcaataactgttagtaaattaagaattaggagaatgttgttagaggtttgataggtttgtggatgacagttttaccccttatcagttatcaaagaaagtatttaattttttctctttgggtgttaaaatttggtggcgtcaacggtaaattcaattcaagtgtgaggttaattaattctgcttattattatgatgtatagcgctaaacactcgtaccgtgacaatggcattgcccgttacacatcccaaaacaagggatagaaaaataaatagattaaaaagagaaagccgttaagtatatatttgaaaaaaaaaacaaataatttgagaagtatctactctctttttttatgaagtactttacagttgttagagatgtgtctaataatattttattcaactgaccaataagagtgaagtaggaataagaatagtcaacggaagattcacgtgcaaatatatttcatacctgtctgaaataatttattcttagaaagaaaattaatagaatttgttaaagtttttattttattttaattttttaatcacataaataaaaataaaattttttattttaattatttaaaaaaaactaagaatatattttacaattatttttgttttttaattttaaaaataaaaaataaaagtgtgtcttataatttttattttttattttttaattttatttaagtaagtctggggctgaggtcgtggttctgatattggggtcgaggtctcaagatctaagttgggttaaaagtttaaaatttttattaagaaaaaaaaaattgtttaaaaaattttaatagtgattttttttcttaaatttttaaaatttttatttttagttaaaaaattagaaagtgaatatagttttattgaacataattttgaaaaatatatttacttttctagttaaaaaaataaaaaactgattaaaaatgtattatcaaacacattctaagttattgtttttttttttcttaccattgaaagatttttgaattttaatttggtacttttttatataaaaagtgttgaacaggtaagctaacaaatgaagttattacttttttttttagaaaaaaatcagtaactttcattaataagtaaaacttccataacaatggattgtacttcattggaacaattttctaactgaaacacacgacctgacttgaaacaagagccccttgcaagacaatgagcgactctgtttgcagatcgtttaacaaaacacaccttaatatgattattagataaaagtaaactacgaacatcttgaacaataagaccaaactgagacgacatagataaattactctaaatggcttggacagaaactaaactattcgtctcaataataacatgctgccagaggtgttgagcaacctaactcaaagcttccttaatgccaataatttcagcaatctccggttgaacacgacccggtttgccaatggtaaaagcttcaataaactacccacaaaaatcacgtgcaacacagctagcaccaaatcgagactcttgctcaaacaacacaccatcaacatttaccttgatctcatccatagcaggtggcacccaacgttctgaatcacagttcttatctaaaaatccagacaaggaaagacctttcatttcttgagcgtatttatattgat

SEQ ID NO: 14551 - DNA, 7610 bp, Cannabis sativa
agagagagaattgtgaggggagtatttttggggttttgaaaaaaaaaaatatagtttttttatggtttaagtttttggtataataataaaattttttaactttttaagcatataaaatcaaaattcccatttctaatcaacccaaaccaagatagcgagcactgagataatccccccaagccaactctttctctctctctctgtatctatcgtcaggcaattgaagaagctatctgtcgccggcgccgccagtcaccagctccaactgctccacctctccgactccgcatttcctgcctccctcaacctcaaacgaggtatttcttgctctttactgctcaataatttcaattaaatacaatgtatccatatacactatagttatggtttctaggcgggttcagttttgggatttcgttagtgtatgtaacatattcttttttgtttttagaaatctgagtttttatatgaacaacgtatagacattcaaatacatctttgtgtaaaactgcgttgggatttttttttatccaaggatactgatttgctatggataaggttttcatttcaagctcacaaaagatattaaaatagatatgttgtcttccaaattatgagttttattttgtttgggttgaaaaaatttgatattgaagaatggttaatgtgttaggattgttggacattaatgttgttgtatgagtgaagatgaacacggctcaaattaatgtcttacagaggcccacgttttatcttgtgggtttctctgcatctcatgcccgagtcttaacgcccaatcatttgcatttccatggtttgcaattgccctggacttcattgaagctaagctcctctgccgcccctcgcggtttaaattgcacgcctcttttgaagccctgtcgttctggacctgtctgcttatcaaacactggagctggaggtgacagtgaggtatgtatgctagtgggtctgttaagcttttgagtattatgggattagaagaaaattcttcattgcttgtttgaattctttctaattggtctacatcatatgcttaatgaaatagtttagaaaggcttgtgatgcccttgaagttggcatcttttttcctattagtaataatttttgcttgctattatgctttattgtcttgcactttgctgctctgaatcatgtaagggatgttttcaaagcaattgtagaatctgcagaccttctgattggagttggtaaattgatacagggttctcctccatggaaagcttttgaaaaagtggtgggaaatttaaccaaaggaaattctatagaggatgtgttacggaaacagattgagaaaaaggagttctatgaagatagagacggcggtggtatgcccccacctggcggtggtggtggtggaggcggtggtggtggagatggctctggtggttcagaggatgaaggtatttttggaatcttagatgaaacacttcaagtcgttttggcaactcttggcttcatttttctggtaagcatctctccttatcgttggtgctacataacttctacttttgggaaattcatcatccagattattacattaggcactttgacacatttgttaatcacattttccttttttatctttcgaaaatggcatttccaaacttaaaggatatataataagtatatgaaatataagatagaaaatggaaattcaaaagaagacaatttaaagatgtcacctaaggcaaaaaaaactgttctgcttagataacactgggtttgaactttcaatgtttgaccacattatttttagcttgaagtggtattgggtattttaaagggaatgaatgaaagactatcatctctttttgaaagatttttttttttgaaaagggagagggtccgcaagtcaaaggcaggaccctcctaaaaatgaattaataaccttcacttgtggcggaggaaaaccatattacgcagtgatacaaaggatagttagcacatctctttttgaaagatggcccatctcatcttgataatatgattaattatccttatagtaagactatgagctttgctgtgttgtgctttaacttcttcatactcaacaccacaactttttcagtattagacaacttccagggtcaagattgttctagatttattgcggtatctcatttgtatccattaatacttgtttgtatatggatttactgcagtacatttacatcatcaatggtgaggagttgatcaagctggcaaaggactacatcaaatacatctttaaaggaactgagagtattcgtttgaagcgagtccttaacaaatggagaaggttcttcaggaagataactgagaaaaaagtatacgataagtattggttagaaagggaaattatcaacaccccaacctggtgggatagtcccgataagtatcgccgcttacttggagatgactcagaaacaaaaccacgtaggccttatcaagattcaactgtgtacgactcttatggagaatcaactgattatgggtcgtatgaggagtcatatcgagatgatgactattgagttgtgtttttgattgcctatggaagttggttgttgatttggtaaaaatatttgtcatgttggccgttgtaactaaaaattgagaatagaggagatcaacatcttaatgtttcaaactttgatgaaaccagtagtaattacaacataaaatacgctgttttgtaggctgtcaagtaaggatttagtttaatatatagctaagcaatttcactggtttgttatatataatgctctatccatctttagtgtcatggtttttacttaagctacaaaatggttgatgctaagtgataattaattcgattgaataagggattggtcacaaatgatccttagagaaagaacgatctgttaggataagattggccattttaactttaaattctcaagagtctaactctaatgtgtgcaagaatgtcaaagtttcatctctaaaaaaaattgaaagaggatgggaccattttaactggggagatggagatagaagttgaggggctgaactggtaagaaatctctcaatttggttggaaagaccatctgaagaagagggaaatcaagaaagagctattttctagagtgattgagatagagctgtaggaaagattgtaaggaaaatttggaggtgattagtttgaaatgaagggagtggtcaataggattacaaatgagcgtttgtctcattcctaaagagagacaactgaacatgaagcttgagaagtggttggatccaagatcttctaagaaattcgccttggtggattccatacctaatatcttgccaagaaattctccaaattcctaaatacattattctttgtgatgcttttcaataaatgtcagttatgtataattatttttctccatatgtcaaactaaagaaacctttaccattctatgtgctacctatatttgtcaagaacaattatttggtagctttctatgatgttggtacatacaagtatgatggaacataatgcttctatctatttataaaagattttgtttgggagaggttagtcctaacacttgaatgcttcaactagctagctattaggtttattaagcatccaaatgtgtcattgaaaacatgcttgtaaccgctaattaatcataaaatgttacctcatggtcatgttggataccactagtgtctaattgcaagaacattactataagacactagtgatacttaatactactataaagtcacaccttacgaataattagtgatattctataataattattatattaaattacgcaaaatctaatatttaacatttctttaagcgcaatgcacttgcataatttcaaagcaaacttttttgtaacttcaatttgctattaatctcaaatttttatttttttgcaactcggtaactgttgcacaaaaatagtggttttgtaataatctctcgtaccaatttttttaaaaatatattttatagagcacagcctagtttttttttcttcaataaaaaagaaaacacagcctaacaaatatttaacaataatgtagacactgcaattttatcagatagaaaataatttatccttcaaaaaaaaaaaaattagttgtctcttgagattaagtcagttggcttggttgggtgtgagttatttctataaaaatatatctcaagtcctttacaaatggatcctaaattgttgggtctgtagccaaataaactctttcttaaattgtatttacaatttttatcaacatcaaaaaagaatatcccctcaaaagaaaatatatatcataataaacaagaataataaggttctattataatcaaatgttctttgatctctatacaaacaaagagtctattagcactatacagtgttgttattgttgttgctctgaggctttcctaacttaacttggtccttggttcctctctctagaggttttgatcttgattcgtcactttcgaatggcagtaccactaccggagccacgggcaacatgtcccaccgctgctttaagaaactcctgaacttcttcaccatttcctttcgaaacccaagctctcgtgtgaagagatcagcgataagaaaagctagaacatacttgaaagggaccgtgaggagaatgattgcgccagccaacaaggcaaaagcaacttcagaagtaacctgaagagaattaagtgaatatttaagaaccagattgttttgttttctttactattaacaacaaattatgttgtttcctacttgtatgaatgggaaaaagaaaaattaaacaataaatacagttactctggtagcagagacatatatatttataaacttaatacattaaaatagtctaaatttagtgttttctcactattttttcaattttttattttcttctgactgatgtaggaaattaattattctgtaaaacttaaaagaaattcaagacccagatttgttgcaacagacacttgaaatccaaatatccaaatagcacaaattgtagggctaatagttgcaaattttatgaaagggggcataaaacacataatcatagagacaaaatgagaaaacactaaaacaaccatgtaagaagatattttaatattgcacaagttaccacaacaacatacctgaggttgaccggaaaggataattgttcgtatttttagtagtgtgacgttgatactctgtagataattttcaacatcgcgcattgcgtcctttacagctataatcttctgaatagtatttgatggtggctgatcacggatagtaacttttccaaaggatcgtccaagacggccttgctcttttagccccttcagtgacaacatgctcgccgctgaaattatcaacaatgtagggaatacatatgacagcaaattcctgaaaaggaaaatcaagactttgctcaaataacagtcatgtcatggaaattttgaagaattgaatatgtataaacatacggttaaaatagagcttcttagggatggggttaaaagatttgctttctgtttggtttggcaaatccaaggattcatggaaagccttttgtcatattttcagataaggaatttatcttgcttctgtagaagagttgtttgcagcaatttttgacctcactattgcgtgtaatacaaattatcaatatggttttctagcctatcagcaagatgctttaaacttttaattaacaaaataagactgtttaatcaagaatacctcactagggactaatacaaaacagcaagaattaattatcggaacatcgtgaagaagaaaaaatgattggaagagaaaggagtagaaaaattaggaacattcttcattttcaaccttttgctgtcagggtaagaaatggggcgaacttttaactggaaaaatacatcacgagcgtataaactagtttctaggttttcttttcgtcgtttataaaacttaatgtgattagggtaagtttcaattcttcatacattaccaattaaagaaaaacatttcaatggtagtatataaagttggtaataacagaatagtacttcaaataatgggtggaaacaaccaggtttcttgtcatggataaattgattagaaagcatgttatcattgaaacaacgaaattgctaacaacataatatctaagaacgaaagatcaacctgaatattacggcataggtgaacgcaagaaaagaaacagtcaagtgtggctcctcccagcacctgagcttttcaaacttcttggcagtaatagtgagaggaagcacaagttcctggacgaaacaaatcccaacattctttaattatgtttttccaaaataatacagctaaaaattcatttcaattgtagcatctacaatacagcgccacaatgcagaaactacaattactttaaacttagctgtcccataatgtaagtttcaacctttaagtaataaactaatacagtcagttttgtttgaacttttctagatttccttgaaaggattgtttcaatctttctcgccatactttacaattgcagaacattcataaagtgttataaataaagcttactcaaatagtaaagctatatttatgatcttaatgaaagcactctagttgaacaaataaaaaataatgcttcatatgtgtattgtataaaaaattattatataaagtaatcacacaatacacaagccatcaatcaagtaatctgttagttatattgtggtgaataaataatcaaaataaagagagaaataatgatctgaacagctttaccttgaagagatcaatattactaggtatccctttaagcattgcggcatcaattgtggcctgagttgtttcaaccatctcgcatttttgtctgcaagtttctgctgccttggctgtaagagttacatcggcaacaacaagatttttacttaaaactactccttctcttgatgaattgcttttccagaaattaatggaatcagtggaataccaagaaggagacctcatccactttcgcaagtaaacacttccatctatatcgaaaacatgataactactttcacctacttcactagacgatcttgctcgtactggttggctatctacaagcttttttacaaggggtccaccccaataatttactgctagagtttgatagactacatcgccatatggcgcaaacttcagatatgagaactgaacaagtttgatgggatcatccactaacttccgcatgaattgaagggcctggagtctagctgtaccattaatagcactggtaattgctcttttcttccctttgtgagagccatagacataagacattgatccatcatcatcatcctctggtccataatcacggatgaattggtgtaaagcaataacttcactaataagtgcatgccagacatctcgtctcatttcccctcccaagtcaacaaattctaccactaatggtttcgacctatataaagcttatgttaggcttgtatacacatggaagaagaagaaacatgttagtaatcaatcaacgggtatgccattttctttatggtagggattatcttataaattcccgattaaagaaagtgaattttttctccttcatctcta

SEQ ID NO: 14552 - DNA, 4611 bp, Cannabis sativa
  modified_base (925)..(925): a, c, t, g, unknown or other
tttttttttttttataaaaaaatcataaaataatactaaaattactaattttaattaataaaataaataaaataagtgaaaaaggtgtaagatttcacttcactaactttatcctttattttatattaatatatggatatagattggctttactattaatataatcattattagattaacaatcatactaaaaaaaactaattttcttttggggtgacatggagaataatttagttataagtgtaacgttgtatgaattaattccttctcttttgacaataaaagcaaaaaattgagaaacaaacgcctaaggccatgcaatgccttctatttcatcactttctgttttgcttcttgtttttttttttttttggtttttctctctttttcaaatttttctctttgtaaaaacaaagaagaagaaaagagagagagagaaagaaaaggaaaaggagaaggaaaaaaaccaaaaacaagagttacttttactgggatttctctttcacttgcatggtgcttcaatgcaaaacaaaataggtgatcatacatttttctcaaggcaagttttagacattgtcatttatttttattttaaaaggaaggttgatgtattttttattctgaatatgtgagtatatgagcattactttatatacattcataattatatatgagcatgggagaatttagaattttgttaaacgaaatatattttgattttgaattgatacacacattaaaatgaatttgcacccccatttcattcttcttttaatttcaattgattgtgattattgttattgaattctaattcctaatgtcatagatttgtgaactcaaattctaagatatccagtgaagagccaacgttattcacttttatcacagctttgactcatttttttatataaatatatttatatanatatatatttatgtatatatacatgatatgattttgcagcatgaaaactagagtctaaatcaagcaagtcatatctttagctatgaaatctggacatgatactaaaactaacgggaatttgagaacaaatccttccacctcaatacttggagaaggagatgagggttctgctacaacatcccaaaagctaaatcactccacttcatcatctgaatcgtcctctgagtattgctttcaactcactgaaagtgaaacatttcccttagtctcttttgtctcccaaacagaagatgaggacaatgacgtaacaccaattcagacaattgtaaacacaggacatggaaatgaacatgtgagcagaagcagttgtgattctttcaggactaataacactagatcttctattgaatgttctcctaaagctgcattcaagatctctgcaagccaacttgaagattatgcaatggcgctgaaaaatcgtagtgaagaagagatgcgagccaactctaggcctggaagtaagcaattgagttatgattcaataggatcccctttgaagccagagagtagaaatagctcaacaacacagtttcctccaactcaagtgatggagagacctgttggtggtgataacaactcacctggttataggattccagactatgtctttgccaggacaaaatccacagctccaatggagtggagtactgcatccaatgaatccctcttcagcattcacatggggaacatgagttttaataaagaccaaatgtcatgggtaagtaaatcagaagagcttgggaaaactggtgagttaaccaataacagacctgttcaaagtgctcaaaataattctcaagccactgaagcaaaagctgctgaaataatgagagaagtcataagggaaagtgcagagaattgggataaggatggtggtgcatcttctcctaacaagaaatcagccaagatctctcaccaacaaaatgaaggcacccaatcttttgcatttccaaggtaagcttttcatttctttctcattgttgcataatattgtaagagacttaatgacgtaggaagtttcatattaccctttgctaaaatgagccaacaaattttgaaatgcatataataatatgagcataatattgttaacaagtttgattgacaacatatgaatgtgcatatttttacatgatctaaataactgaacctatttcttgataaatgaagattgacaggagaaactgcatcactaaagaaaggagaaggagaagaaaaacaaacgccaaaatcgggggtagagacacctaaatcaacatcatttatggcaggtggggctaaaggagtttttgatcagcatagcaaatggttatcatgcttctgttgtttccgaccattttgttgttgagatcccaagaaagaagtgtagaatagctagcatagttttcagacatcccatgttcttgtatcataactttgttaaactaaatagccattttttatgggaaaagataaattctctccatctgattctagtattgaaacttgttttcacttctcctttcttattattttattacatactaaacacaaattactatgaaaacttaaataaaaataaatataaatagaacatgctatcttatgatgaaaaaaatagtaaaacatttgccccaagtctgcgcgggacatttgctatcttatgataaaagctctttgaagaaaattttgagtgggatcaagaacatattacaaatttagaaagtgaagccatgtttattaatttcaaaattccttattgttctcaattttgacaagatggactcatacgttccaaaaattaattaaaatcacgttcattgttttctatggactttttgcggttattattcttcattaaagtgctctaaatcattgatctgcatttccatgagatgttatagagttgttttaacttatgttctaattactcttctatcgagtcaaaaagaattaaaataagaagtctagttaatgatatttaatgcagttatctgaatttgaatattggcagtagaattcactattcaggtaacaatactcttgatttgaaacaaagagctccagccactttttaaagaagagggttgtgataaagtgaaagtgacatttttttaggcgcgcggaaatgctatcaaaattcaatttgatattaaacaaaactcaagagtagacgtagatcacttatgtatgggccgaaccactataatcctcgtgtcttgcctctaacaattttgatcaaattataattgacgaaaataatgtcaatattttggtgttttttttaggagtgactgttgatccttcattttccccaccaatgcggctacgtcgtgcctcccaacatatgcctaaaagctcagcaacactgacagttgtggaaagtttatgattagccatgtttgtaacaattctagcacctggtgtgctggagtcatcttggagacttggaagggagcgtatggtacacgacaaatgagcgataacaaacttgttcaatgaatattttaacaaaatatagaagtattttagtgtgtgaagtggaaagagtccaacatgggatatgaacccttatttacaagggtatatagaatgcaactttggcatatgggtttgggccccaaggggtatccagttttgtgcttatgggtgaggactcacacacttgatatcattaatttttaggtgtattcgacggtgctacagtgtagtggggtttcgatgtgccgcgaacatcttagagaaagtgacctagtccgcgactcaacccagaactttcattcagtaacatcgttcctcttttattttttgctagcagattactcaacaattttaagacgttcattctactataactactaccgatgaattttctagttctactgctaacattaacaagccttttcgttttgagagtttgcactttaaacgttagagacagaagatgttgttttttctgaccatgaaaaaagttacgtttgtgcttaatgttttgaggactcacacacttgactcacttcgcgcgcgctctgctcgagctgggttgtgtggtgtgacactttattatttttatagaaaaattatttaataaaataattattttttattttttaatttaagagaaacatgtttaattgaaccaactcaaccaactaccccacgattcaaaaaacgttcttcttgctgttatgatttttcaatcaattcatctatataatacgattgagctgatggaaaggatacatctttttcacatcgaaaaaaaaccagttttcacaaaaaaagttcatcgacgatataattaatttttagatgtattcgacggtgctacagtgtagtggggttccgatacagtacgattgggttgttttatgctagatatgacaggcaaattctgactgcttgcacattcctcgacagtaccacaaacatcttaaagagagcgacctagtccgtgactcaacccagaactttcattcagtaacatcgttcctcttttattttttgctagcagtttactcaacaattttgagacgttcattttgctatgactactaccgatgaattttctggttctattactgacattaacaagccttttcgttttgagagtttgtacttttaacgttagagacagaagatgttgt

SEQ ID NO: 14553 - DNA, 2439 bp, Cannabis sativa
gcaatctttccaattatatcaattttaatcagaagggaaattcttccctctcaagcttatagccttataaatagtgattcatactcactgggcaaatggtcgaaaaacttctctaagaattcatatacagagatactattataagagctccaaaaaaaagggttatattcccttttcttaagtcaatacaaaccaagaggattaggctattaccgaactgctcagtgctgaacctctataaatattctcgtgtttttatttagttcattatattacatacacattatactacttgtcgcttacaatttagactcactgtcgttggcaaaaagtgaggtcaacaccttaattaattaatcccttagataaaataagtttaatcttaaaagaaagccacctaacctaatgttaaaaattaccaaaatgccctttaaacttacaacgtaagtaataacaagctaaggggtaaaatggtcaaaagccataaccagctaaaacttgtttttatgtttatcataaatatatatttcactaagaaaaaggttctaagcttatccatatgattctaacggccatctatcgcattttccgtcattgttgaaaaaaaatcataaacattacataatgcatttataacttaaataatacatctagagtttaataaaatctccagaattgagaaattacaactctaatgcccatttgtaaaatttggacccacatcataataaaactcatacataattataaaaacagcaataattaacgctaattgcctttactaatccatattctaaaatgtgatcattacagtgtatgcctgttgaagttctttctgttgttcgttaggcccaaagaattcgagggagttcttttggccaatgggccttgcaagcctaagcttcttcttcaacgtattcttgaggattttattgacgacctccactagtaaattggcttctggccgggctatagctgagaaactctttacgattccatgctgaacacaaaagttaataaagtgctcgctactgaactacttcctgttctctgacacaatcttatatgggagtccgtatctacacacaatgcttttgataataaaatccaatgccttcttggaagtaaccgtatatgtaggttcaactttgacccatttgatgaagtagtcaacaacaacaattgcatacttgattcctcctttacccgtggggaggaatcctaccaagtaaattccccagattgcaaaaggccatgggtttctcattaatgtaattttggtgggtggtgcatgtggaactttagcatatctttgacactactcacacttcctcacgtattccgtacaatccttattcatggtaggccaaaaatacccttgtccaaggattttcttagaatggctaggcccaaaagtatgatcttcgcagaaaccatcatggaactcatggatcacactctaatttctatcccgacgatacaccttagagacaacattgacaaccccctgtgatatagctttccatccatgatcacatagcagagagcttgatattaaatttttcttgaagccgctctgtctgcggggagttctcccgtgctgaagaacttacaaataggtgccatcaaagagtagagttatccactatataattcaccacctggactttgatgctggacttctttagatgaccagcagggactactctgtgttcaatgattttaggatctgtggccattttagcaaacatgtcagggaatgagttttgttctctcagaatttgtcgtacattataactgttgaatccctgcaataactcgcccgacattaggacataagcagccatttgttcaccttttgtctgatactcaccagagatctaattcaccacctgttgggaatcactgtaaatgtccacctgttgggctcctacttcctttaccaacttcaaacctattggaacttattttacaaggatctagatttactaacatgtatgtttgattaacaccttaaatatgaattctataaaataatgaaaataaacacataagagtttagaaaactatacattgatggcagtggaataatatgactccttccgctcaaatctctaacccttgttcctttttatcgcaaagtaataaaaagatctaaacctagatctccttctctcctttggtttggttaaccatcgtcttctgctctatgattgagtaattcttgctatatgtgggcatggtactctatcactaaaggctcaaagatgatgaagaataacaggagggggaaaatcactatagaaggagtctctcatctgctaattgtctaacagagttagaaaactaaattttaggttggttgaaagtgttgagttggataagaatgagagcatcatgttccttttatagtatttaaactagggtttaggatttaat

SEQ ID NO: 14554 - DNA, 4108 bp, Cannabis sativa
gtcgtgtttgtttacaccatactttgtacaattttctaaatttcattttagggcataattgcttttatgatgaattttgggctgtctatatgtgtttggtaggattttacttatccctcatttgcgactttgacgactcgtttatgcagtcgtcgattaatgtatggggtctcgtaaaatcaaggaatgatgggtttaaatccttaaacacgtttgtcagcgtaaggcgttggatgctcttttccatgtcgcatcaaatgcgtgtacattgttttaatcctagagtgatgtgttacacttcatcagtcctcccgtacccatatccaggttgacttcactcacgaaaaagaaaagacgagagatacctgctgtctagctagtctctcccggatatgactaatctatcattttttttttaaattagcgtgatgtcattaaattaaatagaaactagatctcatggtcattacataacaagttctccggtaacacagagactaatccaggtagcgtgtcttgtaacgcgggtctcattgccacctaagttgctcgcgaagcaccacatattttaggagaatttcaaagcaacacgtgttatatggtcttatatgatttaataggaatactctcatgtgtaactactaaccatacactacctttacctttggaataaaaaatccataagattttgctaggaaaaaaaatcttttgccgtacatttttctattttaattttcaccgacccagaaaatccaaactaaacccctttcatttctccctttcccgctgtgatcgcaaagccacacagatcaaacccagctactcactttctctcccatccgcttattacgattttctttgctatctatggggaagaggaagcggacctcggatcacaatcagatccaacaatcatcgggtatgttccattttattgttcaatcacgtgttgtttaattcataattatcccatctcttcggttcccagaaaatttactagaaagagaaatcttttttgttcggtgtaaaagtgtcgttctgtaaattatgtatatcggagaacccactcttgaatttagttgaattctgttcttgtaacttgatttgtatatgtttcttcccatgaccttgtcattctatcattttctttttcactctcaaagacatcaaaagggatttagggttcttgtgtaagttaaaactatatgttgttgttgttgttttctgggtcttttctcttgagctatatggtctttcttggattgcctttttcagattagtaagctgatgatcaatatgaaactgttttggttttgtcgttctgtgtcatctattgccgtttcttggttttcatccgtattcttgtttttattgcactttgattggtgcaacttaaaaagtggtttagctttttgctctgaatcggtcaacaaaacttgttgaaagtttgtaaaatatatttattagatatagatgttagtgttgttgtgtcatgttgtgatggttgtttttcaatattgtgcttgtgattaatttattactgtatttcttgatataaaacaagatgttgatgataattctttattgggttatttcagacaccgtgccatgctcctcaggaatggagctattatcagaagaggtaccttgacagtttcatagaaactctcttatttcagagtaagggggcaactattgttgtataattttttttttaatcctttttttttatacagaatggtttgcatgcaattgattctagtgaactaaagcctctttcatctgtcttggatattgcggatagttctatgaagctacaagatgcacaccatcatcaccatcaccacccttcttctactggacatcatcaccaaagcctaagccggtcattattcttgaaacgctcacgccatcactacgcccatcagtactctaggcgcggttcgctcaatcttgctaatgcatcgacttctcgtggcaaaggtacttctttgcgtgatgataagctacccttcaaggtggtgactcaaagcaactcggagttgaggaggcattcaggttcctcttttttatgctttgatttaattagtttgctttacaaattctccatgaagtttggaaggatagatattggaagtaactgttccattgtattatttggtaatgatcaaaggaatgaaatcaaacgatttgtatggatgatatcatgtgctgtcttcttcttggatgaaaattctaaattagagagagaagaagaatgagtttttttgcaagttagtgaatatgacttcccttatgtacaatctttaaaaaggttgaatttttaaatgtgaatgtgatatgcatgagtttttgaagtgtttagattagaactactatttttgctagttagtgaatatggcttcccctatttacaatctttaacggttgaatttttagatatgaaaagcatgagtttttgtggaaattttttgactagaactgctatttgggtgtcggttattccagtacaattattgaaacttcaatattaattatatttgtattgacattggtttcaatttttcattttcccacagattttagggagaaagcattttttgagccagaaagaattaggtcatgtgtgtcagatctcatattgtccgatcatacaaaaacaatctgcgtaatttgtcagaaatcgttgagtcggaagctttattttccagggatctctgtatcttctgttcaactttccttggtggcggttctagcttgtggtcatctctatcatgcagattgtctggaaccaaaaacgagttacgaggatagaagggaccctccttgcccagtatgtacagggtcactatctcgggttgacaatgggagagcgcaggatttgcatgtagaagaagactattgaagtctacaccatgatactaatatctagagaagagaccttagtatggaaagggaactctgcttgtctatgcaggctgacccttttttgggctaagatcttcttggctttggaattccattgtgagttttggaagaggtgttgagtagtgttgatatagtatgtattaagctgtttataactttttttttgtacttttgataagagtacaagtttagaagattagaagttaaaaaaatttctaactggtaagtaacttgtggattccatagaagatgatatgttatgcaatctttactattttatgtgatgttttttcacacaacagtatcataccaacgaaggcaacctcctcttgtgacatccaacttacacaaacaagtgcaattaaacatgaagatttaacaatgaaactggtcattaaatttgcatactataactaagaacggttatttaaaactgtaaccaaacaagtgcaattaaacatgaagatttaacaatgaaattcaagagccaatttcactatttcttttatattattttagctatttggtttggacagtaacatcttggccaaaaactctgtataaactagttgatgatggcatattgccagtagatatttatggttaataaaatgttcttgttagatacttctcaggaaaaatgctcctggtaaaactattttggctatctgcatacattttgcaagctggttttcatcttttttttttttattctcaaaaaaaaaaaaaaaacaaaattggtacattttttggttagcagtaattcttcaacattaattattgttgctttagtacagtatgttccttcggtggccacaaattgtgtttggttggagaatattctccctccactatctactgttatatcttaactttcattgttatatatagtagtatattttctttcggtataatttttttactattttatcataaatacaaataatttgtttatattaaatatagtgatattaatgtaaaaaaaataaaaaattaatagtatttgaaagaattacatgaaacattttaaatcattatattttaggaaatttacatagtacacttaaaattagattctttataggggtgtttatccgattcaatccgcacttttttggtcaaacaacatccaatccgcactaagtgcggatttcatattttggatccaatccgatccgca

SEQ ID NO: 14555 - DNA, 3105 bp, Cannabis sativa
  modified_base (3031)..(3057): a, c, t, g, unknown or other
gtattattttacaatagagttgtaatgtattttgatttatcttctattgtaataaaatctctaacaggtacttctattactattattcttctaagaggatttctaattgtagcattctttaaaaatgctatatatctccatattatttaaacatataatattttattttttttacattatttttagcacttttacttttaaaaacactctaatagtataacaccttctaagaatattataattataatcttacacagtattatatataatctttttctttataaaactattatatggatatattgtacctttaattttttatttttaaaacatatagcaacaatgtcattgtgtgacattaatgcaaatttcaataatagtattttttttttatctctaatgaaatagcatccctacattttaccacttaagttttccacttcatcaaacattttccaaaatactactattggagatgtgtaagaaagataaaataatattatattgtatctttggataatgtggagatatatgacacctttaaacaagaaaattttacattaaaaatataaaaagtaactttatttacaaaaatactttcacaaagctatttaaacttttatacctttaactattaataactttactttttaaatttttatatttacaaaaataccatctcctcttaccttactccttatacccaacagccacttccagtccctcctaccgttggaagtccgtctccaagcctcatcataacagatttcatctccaagcttcgacaccctcgtcatgaccccataaacagccttcaatatttttatattaaggtcggtaattttttttttctttcttatcatatttaaatttcatgaatagaagttttgaattgagtaattgttgctaatgtatttgtttgttatggattatgcaattttgccaacaaattttgtgatttttttttcttttatagttgagcttttgtgtatacataacaccagccatatgtttgataaaatgccttaaagaaagaaagcatctctaattttgatttttattcttctttaagttaaactttttcccttcatgatattattttggtattctttttgttgatgtgatttttatgattagtatgtttatttcaaatttttaatgattttgttgatttatcattgtatattagtagctttgtagttttgttatcattttcttaatcactttattttttttgttatgcagtgattgtgatgtttttattactgtatttgttgaagtcataaatcaaggagaagagtttcctacaatgatatttttttgaaagagtcctacaaggatatttgaatttcacattagtgaattttaaaatgagtttatgttatttaatagatgaagcatttcattgatcttagttagattaatgagtactgatactgtttttttagttccatatcttatgtttaattggtatcacttgtagattttattgttatatttttggtgattatatctttaggtatgcattgtcttgttgctgtatagtagcaatgtagtttacttatcggtgatctgatgtggattaagtgtattatgtgaatgttatatttattcgtttatgtataatttcaggacaattttattaccgtttctattttttatcatatttatttttgtttgtttatatgtccaggattgaggatactagtttcacatatgtgactatttcaagttcaagttctattctacttcacttacaatgttattgagaacattaaaaatactatttcaaaggatgtgatgataatatttcgtgccactcaattctgttattcaactcttggtccattgtcaatcattagtactgcaatcaggacttgtgtaactaatgactttgccattggaaaaaatgaggtgttgttagttgttgctgtgttgctgactatgttcacacataatggacaccttgtgacatcaggttctttgagtttcagttttatgtagaagaatatgctatcatcgttttttatcatcaatagttggtaactttctttcaattggtattttagttgtagttgcgtgttttattggttgtattccagtacatatttcaatttgtgtacaagttcttcatatttccaatcccttgagatgaattttccactagctttatcattttacataattcattgcttgatcaaattgttattgaactgtattagaaatggaattggttcgtttcttaaaattttgaaaattcaagtatggacagtcaactattagaaaactgtaaggcaactaaaatgcaacaggagttgataatatagggtacatcagtagatatttctatgatatatgtttttctaagcgactattaaacaacttgaaaacaacaagaaaacatccccttattaatataaacaaacttactgcaagagattttcttttatatgagttttacattatggatttcaatccctgaatcttttattatatgatgttgtaagaaaaatattaaataagcacaaacaaagtattgacaactatgtacgaatcatatatttagctattgttaagaaaaaatttaaccaactataattgaactgataaacaacaacttgtagcctgaggttattttgttaagaatcgactatataaacactgtaaatcaaccttaactcaatcaacgttaaaatataaataaacttaccatattaaattgttattataagagcacgtgttggattgtctatgtaaaatacctgtaaataacactaaaaatagtatgactgatcactctataaatattgatattgggaaactatatggcaatgatattgcaacaaaaatatcaaaattacgttgcaagtttcatgacgcgagatgatgtgaattcaatttattgtcatgattggaattgaataattttgagattaaaattttaaaaaactacgttgatgcaataattagaatttagcgatagtagtgataaatattatatggataatactgttgagttttgtgccctaannnnnnnnnnnnnnnnnnnnnnnnnnnttactaattaataaagatcaaaactgcattttatgttgtatggttcac

SEQ ID NO: 14556 - DNA, 9157 bp, Cannabis sativa
ttatttaaatttatattttttttaataatggggtgtacttatcattttgtggggtgtaaatagaactccccttactttattattttaaaaaaatgatattaattatctataaagttagaaataaagtcatttatttgcatttctcatctaatttccacccaagtaattcctagctgaccatagtaattgggctattaggcccatccatttgtgttggtagtcgaaatcgaacaggcccacgaagcattgtacgataaccccacagcaacaaaaccattttcttttattttatttgtaagaaataaaaaagaaaataataataattcatagttattacatttaataactaatgttttgatccaaagaaatgaaatgactgaagcttagatattatcgccattgctatttgtttttctcctcctaaaactctaccctctcctctctcattctctctcattctttctctctcacttcaatcttttttcgcaggccaagccatgactgctatttccaactccttgattctaacaaagaatcaagcccttcactttccctccggtattgatttgttttttggttgataactagtacttttctgcgttttttgcaatgtgatttttgttcttttgcttaagattattagatcaacgcggagaaatcaaagtatatttaggattcagctgatttgaataagaaaaatagtagcttggtgggaagttttaaattttgcaaatctttaagttgtggtaaggggtaaaggacaatttatggaattggtttgggatagaatgtgaatggctcaatggggatgttaggaagagtgtcattagctcaagccttcacttttcgactggtattgatttcttttttaattaattaatttattttgttgtttttggatgataattagcatgcttctgtgttattttgtaatgtgatttccgttctttatttttgcctagttaaactcaacttaatgtattgagttgaactcgacaaaagtagaattttataattatcggattcaactgatctagaaaataaaaatagtagctcgggagcatagttgtatgtattttcaagttgttggttgggtatggaattgggaacagctcaatggggttgtttggaagagtgccatcagctgattcgtaggtggggttcttgaaattttgaatagttctattggtgtaattgttatggcaggatcttctttgaagcgatccaacgaatgtttgggaagtggaaacttgtctttcaatatcaatcccaagcgtgctgagaagcctcaactttctatttccagaaagtccttgacagttcaagctgcctataggtatctatttccttggttttatttcattatggtatgctgatttaaaatgcttcacatgttacttgcttagctcgagtttcgcagctctggatttgtttgtgtaacaaatagcttgctcttgctcaccccatgtgtttaatttcaggaaatacatggttaatttcaaacttttgttaagattttactctctttgtgcgtgtgtgtatttagagataatttttcctgcatatgaagttaaggaataatggatcttctttcttagtgtactaatgattgtgagaagttgcttgatagcatgctttcatgtgaattattattactcctaatggtgaagagatctccaataaaagccttttctccatatcccacttgattttaagaagtgtttaggaaaatatttctgttttctggaatttgaaattcccctgctgctttgtttgcgcccctttcgcttcacaaatatgtttttacatggggttctaatgcaagactcctatttgtctgattacagtgatggtggcaggccaagtagtgcaagcatctttgttggtggctttgttctgggaggaattatagttggtacactgggttgtgtatatgcacctcaggttgtacccgttaaccattgccttgtttagttgaaatgtgatgaaatgttgttctggggtagtgtgaagagtaaccactttcatttataacatataaaatttatctattacgattgtaaccattgtcttgtttagttggatattggttgttgcctcacatatatggctgtctgcagtcaaggaacttaaataagtattttaatctttgtccatattatttgacagatcagtaaagccctgactgcaactgaccgaaaggatttaatgaggaaactgcccaaattcatctatgatgaagaaaaggctttggaggtgagaagttgtttctgatctctgttttcttgaatgcattgacattctttcccgttcgtaaatgtgctacatacctggtttattttttgtactgtttacaattacatcattagctgctttcactacactagaattactctttatggttcaaatgagacatttttgttgactgtttctgccacaaattatcatgaggggttgttcttgaaacacttcattgtatatcgtgaactgtaatatttttcaaaacacaaaacaaaatccatttcccccgtattatatatttgttttgtctttcaaatgatacatatacaatattgataccatttttgcatgagttttcttacatgaaataacatgttcgtattttacttgcagaaaactcgtaaagtactggctgagaagatcgcacaactcaactctgccatagatgatgtttcttctcagctccgatcagaagacggccctaatggagtagctgtgagctcggacgaaattgaagccaccatataagactgatctcggttgcaatatagaacccagttttatatgaaataatatttgaacttctcgcaaagtagtgtgccatgtgctcatgaatcattataaattatcatttcgaagtattagcccttagcttgggaatatagattttgtgttgttcgaacatgttgggtctcagaattgctaatatttgaacggtgtactcacttttcttgctattttcttttttttgtgcatattaccaaatgaatgaactggagatggactttcctcttcctgccatgaataagaaaactcaatctttctgataccccaaattggtggcaagattgtacttttaaatgctgtaaattgcaggctcaattatgctgataaggttaaaataaaataactaatcataattttttattaattgaagtaacaagtcctacatccttaacttaaaattcaggctctcaatgccttggttttaaaatcaaagataaaaaccaaagccttttccaccatccaccatgatttattttcagccataaatctttcaaaacaagaaaatctcattcggatggataaaggagcctttccttcttgctcaatggactttgcaagttgagcaaccagacacctacattttaacataattctagccacaatgagcttttgttattgaaaagagtattgctaaggagtacccaatagtatccaacaccacttgatgtgacatgctggccgctgttagtgtaattcaatatcggattcgatattaattttcaccaataatataaaggatgttagacaacataaggtgccaaataccaatcctttattgaaagacaagcataaaagattagagggtaatctagtaaaagacaaaaaaggagagggtgaatgatctgaggttcatattattttatgaccttatcttataaatcatcttgattcattttctccacacattcgtccaatacattgacaccataatttgtaatcagacatttaatatatgaagaaaaaataaaaataaaccataacacattagaaagctcctcataataactataaaaacgaattcaactacataaagagaagagttagtagtaagctagctcttctagtttttgaagccatggcatcccatgcagctcttgcttcttcaagaatcccagccaacactagtaggctaccctccaagtcttcccactctttccccactcaatgcttctctaaggtatatttgtatattctctctaagttctccatctcacgttaactaacttgatcccaggaccgactctgaataatagtgagcctaaaaaattctttttgtgttttatatctaaagcaaagtgagtattattaggttttttttcaaaaaaatttacgcaaaaaaatatattacgtaaaaaatttggaccgtgagtttgggtgagtcctacacacgggcttagcctgccttaatctataggactgggcctgatccatagaagtgtactgtagtagtaacaatataatcatgtagtatgatttccataatttgtttggctgtgcagaaacttgaagtagctgaattttctgggctaagatccagttcttgtatgactttttccaagaatggcagagagacttctttctttgatgtcgtggctgctcaactcactcccatggtctgtattctttcatatataattcctcatacatatatatttttggttgtataacaacagttgaaagatatccccttttcagacatgtggatcagcccctgtcaaaggacaaaccgtggccaaattgaaggtagcaatcaatggatttggacgcattgggagaaacttcctccggtgttggcacggccgcaaagactcaccccttgatgtcattgtcgtcaacgacagcggcggtgttaggaatgtaagtaaagtaaattaaaaccaaccaattatgtcatttgattaattgagtctgatctgatgattcaatgttacacatttttaggcatcccacttgcttaaatatgattctatgcttggtaccttcaaagctgatgtgaaaattgtggatgattcaaccatcagtgttgatggtaagaacattatggttgtctcaaacagagaccccctcaagctcccatgggctgagcttggcattgacattgttattgaggtacaatatcagttttgtaacatgtctttttccttttgtgtgtgtgtgtgttgtttgctttaacattgttgagattatttggaaccaaaccatagggaacaggtgtgtttgtggatggacctggagctgggaaacacattcaagctggtgctaagaaagttatcatcacagctccagccaaaggtgctgatattccaacttatgtgatgggagtaaatgaacaagactattctgacgaggttgccaacataatcaggttagtactattaatacatctttcaacaatagtaagggaaaaaagaagtactatgttaaatttgaaatgctgcttcctttttggtgcagcaacgcttcttgtacaacaaactgcttggctccttttgtgaaggtgttggatgaggaatttggtaagtggtcatctagttgtggcatgaattaaattgaattgaattcatcatgatttgatggcaaattttatgttggaatgtatgcaggtattgtgaagggtaccatgacaactactcactcttacacaggggatcaggtaagagaagaagcatataattatgttatgttatgttatgtaggggcatatattatattttagattatgttagattttaccatcccatttaattcaattaatttcactccaatcaatccaatatccattggttccatctattgaatgtatttcatatataattattggtttaatttgagttttcccaatattttaaactaagtatattttgaatcggggatcgaatccgtccagtgttttaagtcatattagattagattagatggatccaatctaagaaaaaagagtaaaagtttgatgttaatttcatatgtatataaatattttacgtataacaatataaaatttaattactcattcaaactaaatgaaaatattaattagttcgattggatattggatgtattgggtttttggatacctcctccaacatctgacccgatccaattgaatattaaaaaataacattcaattcgatccgattataattggacatttaatatttgacggtcaattataattaaatctgttggttgttatttgacggtcgattataatgttatgttatgttgtgttgtgttgtgttatgtttttaattaatttgttgtggcagaggcttttggatgcatcacacagagacttgaggagagcaagagcagcagcactaaacattgtgccaacaagcacaggagcagctaaggcggtgtccttggtgctgccccagctgaaagggaagctgaatgggatcgcgctacgtgttccaacaccgaacgtatcggtggtggaccttgtcatcaacgtcgaaaagaagggtatctccgccgaagatgtcaacgcagccttcaggaaggctgccgagggccctctgaagggcattttggatgtttgcgatgtccctctcgtctctgttgacttccgttgctcagatgtctcttccaccattgactcttccttgactatggtcatgggtgatgacatggtcaaggtggttgcctggtacgacaatgaatggggttacaggtcagtctcataccacccttactttaattactttttccatttaattaattaaactcattaaattacttataattatgtattaatttcagccaaagggtggttgatttggctcacttggtggctgccaagtgggcgagtacctcagaaggtggtagtggagacccattggaagatttctgcaagacaaaccctgctgatgaagagtgcaaagtatatgaagcttaagtctctatataaatatatattaatggatttctttttttttttttaaattggattggatttgagagaaaagcttcaaaattagtgtgataatttctcaatcaatgtaatggaatcttttgtccaaataaattatgtcaatcaactatataatggaaaattgcaactactttaaaaagtaattaagatgtcttgtattgacattgataattcttttacccggtgatttagtaatctatatagtcaaatttaaattcaaggtataattgatacgactaaactgtcatcaattatatgatttttaaatcaaatttaatgacttaattataaaaattgaggataatttagttataataaaaatttattggttaaatttaaattcaaggtatagtataacttcaaattatatggcattagataagtatgattaagaatataggatactgagtatgtaatttaataaaaaaaatagtaccaaatgtttatttacccaatccaattctcatatttttttatcgtaatacaataacaataaatgatactagtaatgacatttagcgttgttagaatccaatttaatttgtcaataaagacatttgacgatgctagaacctaatttatttagtcaataaacgcatttgacgttgctaaaactttaatattttattacaaaagttctagtgatgtcatttgatgtggctacaacttaatttttcatcaccaaaagttctagtgatgatatttgatgtcacttgaccaatttttcatcgccaaaagttcaagggacgacattactagaacccaatttttcgttgccaaaagttcaagggacaatgtctaacattggtagaacccttttttttgtcgccaaaagttcaagggaacatttaacattgctagaacccaatttttcgtcgttaaaagttccagtgacaacaatggtgattagaacatattttctaaataatacacatacacaatattaataacaacattataagtagttgctagaaatcctccaaaatttgaatatctataaacttttattgacgacttgaatcactttcagtaatgcgtaattattttttttttctttccattatatatttattattataaataggggctgctctcttataataaaaggaaaaatatacacaatacacttacaaattattattttttattttttttttgtatttttacgattttttttacaaacattttcttttgtttatatttttacgaattttctttttttacaagttttaacttgttttttgttaacgaaaaatgttattttgtgtagcaacaaacaatattgttttaaaacaatgaaaaaacaacactctgaattgttgtaaaaaaaattatgttactttctcgtagcaacaacgtcaaaataatattttttcaaaaacaacaaaaaaaacacaccttatttttgtaaaaaaaaaaacagtgaatcggtaataatgtaaaagttgtcatttttgtatatttatgaaataatccccaataaagattaatacaattaatttataaaaaaatttatagcaattaatttatagcttaaaatttcatttttattacatttcacatttttttcatttactaacccgaaataaaaatataagtcaatttgtaaaactattttttaatatgaattccatgtaacaaattaattaaatataatgagtaataataaatgtgcataaataaatacacaaaaatattatgcctagtaatataatagtaattttttaaatagtaggtgccagagtactcccaataatttttttactttattctttaaaatatatcactaaaatctaattttctctattttacattaaaattttacaacacaatatagaataattactctgttttttctctaaatcatttaatataatatcttttaatatatttattcatttcatatattttatttaactttcaattatagcgcaataccttttagcgccagtttggcatagtttttagagaagctaaaagctgcttctcaaaaaaaaaaaaaaaaaactgtgacaaaaaagtatttagtaagcagttaaaaatcaacttattgaagaatttatggaaaaggtacaactggtaaaacccaacttttagaaaaaactattttgattaaaaggctataataaattattttttactaaaaatttatttaattatttattatatattacaaaaaataaaaatattttttttgagaaaataatatttaaatttctaattttttatttttttttaaaatattttatatttttatttatatttttgaacaaacaatatcaacctaagtttcttataaactacaattttcttttataattgataaaaatataatttaataatattaaaaattatttttatcgaatacatagaaatttatactatagaaaaaataattgaaaatatatagaaaat

SEQ ID NO: 14557 - DNA, 3408 bp, Cannabis sativa
  modified_base (3356)..(3356): a, c, t, g, unknown or other
ttcaggaagaatttttaacggctaaaaaagttcaggggacatgatttggtatatgttaaagtttaggggtaaaaatactaattagcgtaactgttatgcatatgaaactgtttcgtttctttgttactcatttccattgctttctttttcaatggctttctagattctttcatcatgcgcatctaacaaatatttccttcagagttcacaaccatggctggcaggcgccttcgtgaggctgtcaaaactgtgcttatttctgaaggaaaaggtgaattcgacagaaatatccatgtagtcatagcagggctgactaatacatattcacagtatgttacaacctttgaggagtaccaggtccagagatatgaggtctgcattaactatttcacaagaattatagcttataacgaattatactattttcgagttactgaatttgttagcctgaatttaatgaattccacttctccattctgatcagtattctaaattttagggagcctccactctttttggaccacacacacttgaggcttacattgaagagttcaaaaagctagcctcagctctaattggtggacaaaccactgaaccagggccacaacctccaaacctcctcgaaaaacaaatcagcttactgcctccagttattgtggacatgactcctgctggtgtgaactttggagatgttaaaactgatgtccctccaaagtccactttcaagaagggtgacatggtttcagtcactttctggtctgcttgtcccaggaacgacgtcatgactgagggcacattcgcactggttgagtatctgcaggatcacatgacatggattccagcctatgacgacgatgactttagccttcgattcaagtggttaagacccaagaaacttagtcctcagagctatgcaaccatagaatggaggatcccagaatctgcagcttcgggtgtatacaggataacccattttggtgcttctaaagcacttcttgggtcaatccgccatttcacaggttcttccagcgctttcatagtggcatgaggaggaggctgcaaagcacacgacagtattcattcattcagtctatactttaattggcttattgtttggacaaacaatgatataatttttgtagtttatttaacaagagaacacaaaattatatggtattgcttctaccactaaatctattgcagttgctggagtgaaatccaaaactaggaaatcaacaatagaaaattataccctttaaatatttataggcagggaatgaatactagcctgcttcatcagaaatagacaagcatgaactgcatattgtactactaaatccagataatagttgattgtatttgcttgatcagttatactttaatttcacattattctcttcaatagcaagtctaaattttcttatatggaaatcttgtcaaatcaaacttcaatggcatgtttacttgtggtgtggataaatgtataatgggaaatggtaccttagaattatcactcacatgacaaagaagtataccaagtttttgaccttacataaaagtttattttcataatgtacactcatttattggggttttaaatctcatatagggtagctagaagttggaaccttgatcagcccactggccaaacaagtggtccattaggattctcactatattcccaatcttatggtaattgttttacttttctttcaaagttaccaatcacagcatcttcactttggtcagtatgattctttttatctcttatacaaagtccattaggcacctctcaccaaaaaaaaaaaaaaaaaattgtcacccatacacatctttgatatataacatcattcaagatggcataatgtaatagctttgttcagcaaatctttccttggctgatttatgtaaaatacaattctccaactaccctttatgacactaaatggcacttttacccaccaagaatgaattctcatagtgtatagtatatgatgtgagaatctcattcccattcttcaatactttgatattaagacttttattcccatattacttttgaaaagaaataatgatgatatatgcatacataatacatgtagtgttgtaattagaaagaaataaggagagaatacactattggtagaaggagagaatacagtttttattagacaaagactttggttgttgcaccgaaaaaaaatccaagcaaaaaagttgtataaggttgttgaggttaaataataaaaaagctgcttgttcggttaaattgtacatggccattaaggccgaacaacagaatctgctcgacactcctgccagcagcttcaccaatattctctctaacttctttttgcctcttttcaaatttctccttaacatagaagtctaccaggacccaaaaaaattgctttcaatctctttccgactctagaaggtgatggtcaaaactgtcactgtcgagctagtcgatcggtatagtgattgtattggaagaaaaactccaaagattcgggaagacaagagatttattttctataaacatgacatctatacaagatagatcatctgagtaaagccacgcgtcgcctgactaggcaaaggaagaagctagaaaattctcgtgcaaccggaagtctctacacaaacttaagggtaaagttattgcgaaaatcaccctgacgacatgacatgatgttatatgacacgcgacaagcatagtcagcattatgttgataaatgatgaatataaactgtatagttcttaatttaagatttaggaattgtcgaaactctcgatcgacataaactatttagttcttagcaaaaaaaaaaacataaactatttagaaatgttttaaatttattagaaattttaaataagtacaatatacacaattataaaaaataattaaactgaaaaactcttttaaataccgatcaaaacaactattttaggatatcctatacattttttcaaagatatattttattaattatttatataacgggagtagaaaatattgtgagtgttattgtattgaaaacaatattaattaaaagtaaaaacaataaaattatgatttcctctacttgacgtgttgccatagtaagcagcacaatccttttgactttctttcttccaaactccatttttaaatactgcaatttttgttgtgtgtatagttctcatactccaaattaatttttctttggaaaactaaatttttaatatgcatgatggttttgattggacacacgacttggtgagtaatagtagataagcattccatttaagtttaagaagaaaataataagagcaatttgcggcgaaacccccttatgttttaattttnatacacttaacccccttatctttttttttggtggcaaaactcccttatgttt

SEQ ID NO: 14558 - DNA, 9526 bp, Cannabis sativa
  modified_base (1521)..(1546): a, c, t, g, unknown or other
  modified_base (1713)..(1728): a, c, t, g, unknown or other
ttgctccattcaagttgaactactagatctagcctttctggtacaagatctagcttagcaaattgttattcatggccaagaaacaacaattcaataaaattaaactcacttgaatgaataaaggaaaaaatgctagagtaagcttaaacattaatcatacccaacatagaagttcatagccattcaagcctcaaaagtactctagctcatattcaaataaaaaattaacatccaaattcaaaatagtttaaccatggctgctgcctctttttagttcaataagtttcttctaattgctaagtacaaacacaaaaaaaaagagaagagaaagaacaatattaagagaacgtaaaagaaaattcaaaggcaaaaggttggtccccctctcttctttcttctgctgtgtactttctgcaattactcctattcaaaaaattgcaactgctgctcacataatggaggttgatggtggtgtacttctcctcttttttttttagttgttgggtttttagggaacgaaattcataccccaaagtagaagcccaatcttttcccacattggcccaccaggtttagtccctctccttccacaacagccagctggtgtattttgagtgactgggaagaattttgaggtggataagtgaaactcgtgttttcacgtcattgtgagaatgctgaatttgcttcagcaatctgcgtcaatttcagcttatgttcttcctttttcaacaacatttttcaacaacaaacaagcacaattaattggaaaatcacacctaataatatcaatatttacaagacttaaaagttagcttactaaatagaaaatgacactaaaactaactaaaattaagcaaataaatacattttcactactcttctcacaatacttttagtttaaaagcataaaaataactctataccatagagttatcaagtgaatattgtactcaattgtcccacctatggatgagtacatgttgtgaaaattgagggttcatgtcgaaaggttttttaatggagcttaaacttaagaaaactcacttaagcttaagcttaagaagtgtctaaagagtggtgagacactaaaactccacctatatagactagaggtggtgctgcctcttatgagaattaggagttattctctagagagttcatgaattggaattttgcacgtggccattaacggtgtaagagtgagacatgcggtctcaagtgagcataagcaagggtgtgtgtgttatcaccggtttgtactaaagtaatagtggttcaatgctatggcaataaaaatttcatcaaactttggggtaattacactgaagtaaaattcaaatcgaaagatattttacttaatacacctaagcaagatttttttaaaattgtgtatttagtcaatcaaagtggggaaatgttatattttgatataatattttttattgattaaataaatgttacaaaagttacaaatttgttattaaagagatactatttaatctagtgggggattgttannnnnnnnnnnnnnnnnnnnnnnnnngattaaatatgtgtaataaactataataatctgtaatatatattagttgtcatttttttgtaatatttggggaagttacttgttactataagtaacctccactattatcaccaacattaagagtgtaaaaggtgttacacatcttaatttgaaattcttaatgctannnnnnnnnnnnnnnntgcatgagttacatctctataggagttatggtgtacatgagtgtgtgcatgagttacatgtcttttctagaaaaccttaagacttgataattctcaaagttatttcctagagagttcctttagtgattagagataggagaaataaacttttggacaaaggtgtaatgccttgttcaagtcaggggcagacccacatagaggcgaggtggggcagaagccagaagcccaccgcccaccctgaaaaaaaaattgagaaaaaaatatatatgcattttagttagttacaacatataattataaaaaaaagtgatatctatgcacataaaataagctttggtataatggtaaagtcattccatacatgtataggaggtcatgatttctaatccaataaaagtatgtttactttaatatttttattttactttttgaacttctatcaataatatttatatttaatctcttaatactaacatataaatttacattaatttttaacatgttatgcaatgtagaaaaaaaaaaagatgcacccctcacttataaaagaatggtatcgccacacctcaacttaaatcctgaatccgcaagtcgtagtgatcttcactaatttacacacaaagttgttagtaagtgtatatctatatatgtattatattacatatattgtaatctgttttttttatcttttatatatatgtatgtaatatatattgtgtatatgtgttgttgtaacatatatttaatctctttattgatctttgtattgtattataatgtcttgatctctaagatatatacgataaacgagaatcattttgactacaatgtgtgtctttatataatacattgcatgtatataatcaaaatgataaatggttttgtatatttgttaaaaaagaagagttttgtatttagtttccagatcgatatgttaccgacaggaaaatactgtgtgtctcccaggttaataatacatgattttattgcaaaatacagatttgatgcattaattaattatatgaactccaacttaattgtatgttgtatacattaattataattaccaattacagtaccaactgttcatatataataatttgattatattttatttatatatacatatataaagtagtacatctgcgattcgcttcattataattccatgttttctggagttgttcccttctaaaaggtcattatcagactaattgaaattacataaatcttatcttaccaatgcttcgtaattagttcacataagttaaaatgatcttcattattatataagattctcaaattggggcctggtcgccagattttaacgcgtactcatatgaaaagcaattaattttagagtgaaagaaaaaagctttggctctatctataactcgatatatagcaagtttagctaggaaacaaatcaaagtagtgtattacccgtggcattatttgcacatgcaacatggtactttatatatcaaccatatattaatgacgtggtttaatgatgaaatgtcaaaaatttattttcactttcaaaaaagtgttaaagaaacatttggtgcttgtaattaattcttctcattttagaagtcttgatatgaattgttattttgaatggaatacataccaaacgttataattcacatatgtaaaataatatataagctaaaataaactaattttttagataaattagtttaattaattcttgttaccttagatttttcccaaaatacgtggcagcagctgagggtgacacgtggacttaaaagagcatccactcacgaaaatcaattaagtcttggccaggaaagtacatcttatggagtgagcctcccggaggagagcataagacacgccttttctccaggaggctagaactgtaacaaggcatctccgggaaggaaagagattgttcgaacagtcacttcgcattcaatgccgcatggggggaaacgtataaaaggatttgacagatggcgtaagcccctttttacggcgattacacaacaatcgacgagtctagtgacggctacattgaggactcacatcaatcaagggaggataaaagattatatccacctaatcgctaagatacctacggtataggtcatgtatttcttattttggatctgctaggaatttgtgccattaagaggctaacacaaaaagacaagtgctccctttgtagggatccccccgaaaaatactgtaaacaccataggcagaatggaaaagggtgatcgattaataatgaatcaaggggagtaaagaagagagagagaaattcaccaagaacattctctgtaaaaatactctcatcaataacaaagactcgtggagtaaggctcattaatatcctaaccacgtaaaaatcacctgcgttaaactttcgacggctcttctcattctactacttaattagttgctgaaaacctcggtcaatattttggtgctttcattgagaactgaaggaagcgtcgtcagatagacaatagtcaaaggaaaagtcagattaacaatggtggaaactcgtaacaataaacgtcagccctgtcctcctcaggatgctcaaaacccagaaggcgaagaagtaacctcaagagtgaatgtagggtctgaggagcgagatgaggcagacgatgaagaattcaaagaaaacttcgaaaggtacaacacttacgatgaaggtagctatacggaactactggtctcgaggcaaaaggcagctgatcatgaagctgagctggtagctcaaaaagaacaaaatagaagaatgcaagaggtgatggttgccatgcaaaaagccatggaaactgcagggatacacatacatcccaaggccatcctaacaggacctgaggaaacaccgaaagattcctcaccgagtacttagaaacccaagaccagggcaccaagccttatacagtacccttccgaggaaaaccctaggaaaaatcaaacttcaatccccaagaaagagaaaaaggtacaagatccgagaaaagtccgcttggatttcccaaaagggaaaggtctgtagaggggcaagctccctcgagtgagacttggccctcaggaccgagatgattaaaaaagcgtacccatgcaccaggaacccgggaagagagggaggaaaaattggaggtaccctccagttgacctaagacaaaaaatcaacgaaaaacatggtgacttacgagaccatccagacaaaaagaaacatgcactagcggcttccgcgggcatgctaaatgaaggaattctggttgagttagcaatactacgcaaagacattgccagggtctcccggaggcgaaaaggggacgactcgaattctaattgcgaggaccgggaaccgtgcacctggcacatactggatgcagagctccccaagaattttaagatgcccgagatggtggcatacaccggagactcggaccccagtgaccatttatcccgtttcaactgggtgatgactgtcatgagggtcagcaatgatgtaaagtgtttatgccttccactaacgctgagcggttccgctgaagaatagttcaaaaatttggaaccctgatcagtagactgctggaacaaactacaagtaagcttctggagacaatttgtggcggcgagaaagattaaccttgaagtcagcgccctgactaacataaaacaattgcctgcaaaaactctaaagaactttataaaaagattcaaagaagaggcttcaaagaccaagaaggtggatgacggacaacagcttgcccttctccaagctgggatccgtacggggactcctttctttaacgagctacaacaggagggagcaaccaatctccaagatttccaaaagagggtccaaaagtacatcaatttggaagaagcccaaatagtggcttacagaggatactactcgaccggagtgtcaggatatgccccagagttcaactctcgggagccatgcctccggccactcctcaaatgagcgacatacagttctccgctaccctaggatataatcagagcctagccttggctcccacaacatcacactttgggacacccatgggcaacccctcaggatgaatggtcaagctccatcttagtccgcgcctgccaccagcctaacaagatctcctcagagttcccagagcaagaggtcctcaaagggtagcaaccggaatgaggatagcaacaacgaaggggatacacccctcagtatactcaatacatggagcttacagacacgcaggaccagttatactttgccacctggcaaaatacacattaccggaagcctcctcccctgtataaggatagttctcgaagggacgccagcaagaggtgtgagtatcacaacgacattggccatagtaccaatgaatgcaagaacctgaaagatgaaattgagagcctaatctaactaggtcatttatatgaatggattaagaaccgactaccccaaattaacctggctctagtaggaagccctttacctcaaggagcaccagggggtatacccggagagccatcacccggtgtaccccccggaggagcactccctcaacaaatccctggattatcaccgagaccaaatgggagagtggccatgatctccggtggacgccatattgggggaaccaccagaaacgagctaaagtgttatgttggggccataaaacacgatgaagtgtgggaagtcacccaactcctagcgcaaaggccctaactcatggaccaggccattaccttcacagaagaagacgccaaactggtgcgtttccctcaccctgacccactggtcatagaaacttccatcgccaataaaattatggtaagaatattggtagataatgggagttccttgaacttactgttcaaagaagccttcacgaccataggcctcacggataggaatctatcgcccaacgactcccagctcataggatttaatgggacaaacacttatcccaatgcggaaagtaaggctccctgtcaccctatgcccggataccccacagagcactttcaaatactgcacctttgtggtggtggattgcccaacaacatacaacaccatccttggtcggtcggccttggtcaatttcggagcaatcacctccatcccgcacttatgctttaaattccctagtcaggaagctggagtggggacagtgagggataagaggcttgaaaaatctaatagataagaactcaccgctgtaagggccacgcttacatcctggacgggattggtagaggcacaggctacatatctcttcattgggagttaagttagggccgatgaagcggttaaaccacttatacaagtgatccaaattcaagtcccagacgttcccgacatattcactacgagtaaacatatctctgcattcccctaggtgtactcccccatggcatatttgtgcttggcaatccggagctaagttctttactcatcggtaggaatgggggttaagacagtaacatgaggcatagtatacttgtccacctcggacaaaatctctgagtcagaactgggagcaggagtatccacgcgcctcagttttttaacaatctctacctccaccatcttacctttacgcttgcggtccaggaggaaggatctcgccttcttcttcttcctcgtccattaagacgacttggtcgtgggggatgctagtagaagatctcccgggagtcaccaccgggtcgcgttattgaggcatgccagactcaggactgtaggtttggacgagaacatccaagaggtcacccatcggcttccttgcttaaagaaataaacaaataaatatgttagaacattatcacaaaatcatgcatgcaagagtaatgtaatgaaactaatcctaccctggtgatctaattctgccctagcaaaagtatgtactaaaaggctggtgtcgttgtcccctagaaagatgttcgagaggaggaaccaactggaggatatacaggtggagtgatccaaggggatgggtacgggaggaccgaaacccatctgggaccggcctatgaaatgactaaggttggaaaaataaaaactcttggcgtgatcaccccatcgaagagggggaattttaaacttaagaagatggtaatcaaattccacaggcctacaagtagagtaatcctgaacagaaggaacatgatgaataatcagtgggaacttactagctacagaggtgctggcatcgggagccccaacattaggaaatgggaacggaaacttgagccgggaggtcgcctgttcttttctagcttttatttgaagaaccctccctgaggcagcttgggccttgatgtaggatgactcttgttccctcttcaagaggtacttcttgtacctctcctccgtggaagcaatgatatcttcccggagcgccttgtcgaactcagggttgtgaatgttggggcagagaaccttggataaattgaagtcatctgttgattggccctctgaaattgacttctcactccggcaattgtgttttgaaaacttcaaaaactattttttgtttttatttctaaaagtacttttttgaaaataaaaaataaaaaataataccaaacatgctctaagtatcgatgtgctatgctgagcattgttatagcaaagccaagttttcttctatctctggtaatatataatattagtcccaaaagtaatttataataactaaatgtttattataattaaaattaaattagtaagaacttgaatttaaatattatttttcaatgataagtgtgtgtcaatgtttttagtggtttttgtttctataattcataattagagaattcgccaaaggtaagtttagtatgttcaaatgctaaaggaaattaaacttttaaatgatgtttagttggaaagaattaaattatagagttaggaatgagagtaggaataggtaggaatgaaaatatagaattaagaatgagaataggaatatctatagaaataaaatagaattaaatttaaaatgtataaaaaatttgataattttattaatttttttttctcatcttgcgttgaaatggtctttctgttcatttcaaattagaatagtcattccacaaaaattatggaaaagtcattctattaaattggcattctaatactttaagactcgtttggtacactatattattaggttatattgtattgtaatattatattaaatttagttattatatatacatatcatattttgatataatactattttaaattttaatttacacatactaaaatattacatatttatatattcataaaatttaatgtcatatatagttttacgtaaatgtgacatttagtaacccttttgttttagagtttttgattacaaaaataaaagtaaaatttttatttttgaaaaatgaaaatgtattctataactacttttattttttaattttaaaaataaaatacaaaatgcatgttctataaattttatatttatttttatttgttaattttatttaagtcgggtctaggtccgggtccaagttcgagtttgggtccagagccgggtctggggctgggattggggccaagtctaagttggggtctccagttcgggtccgggtctaggttaggttcacgttcggggttcgggttcggggtttagggtctgttctgggttcgagtctgggatcgtggtcccgatccaggttttgggtccaggtcaggggctgtgtaacaccctaactagcctaggcatgtcacatgatttttaaacgtactgtgcaactcgttgctaat

SEQ ID NO: 14559 - DNA, 5320 bp, Cannabis sativa
cccttctccaataagcgggtcagagaagttgagaattttggtagccacccacaaaactgcctccttgtggtaccacgcacattgagtcactacaaactttaacgtcacacttgatcttgactcaatctcttggggggagaccaaataggagactcaattgtcactggcgagggaaacaggcaagaagcataatttgcgtaacacatagaaatatagtcaatacagtgcttaatgttacatatagaattgtgaaccttatcattacgagtttttcaaatcatatccactacaattgaaacatgcgataacaactcttagacatccactcacttattctttaggctccataagaatttgacccaatctcatattcgagccccagaattcaaaactggcatgaccccaagagaagaacctccaaaaataaaagtaaagttgtagtagagaaaaagatgttctattattatttcttcttctttaccacaaatattacaaatttttattaataactgtttcataaaattatattaatttttattaaatgttaataattataattatcatggtaatcataatctgtgttctaatattaaccagcaaattaattagtcatgtgttatagacatgattaataactacataatttcttctgtattttcatgtatattatataatgttatggttatttatttgaacatgtatttaccacacaatatgcataatgcatctgaaaaattgaaatgctattataatataataatggagatcaatttcaatacgagtcatctcttaacatagaaaaacaaaattaaagaaaaaaaaagtgatcattaataaaaattaatcttttgctttaagaaaactcagctcctcaaattcctttctcagtctccaatggttgcttcgatttagttctgcatgcacattcattcaaattaattatcacacacaaatataattaatacgtaataattaaagtaccactaattcaaattattaagttatgaaatatttcataagatttgcatgggtaagagatcatttcttacttatttatctgttacattaatttgacattttaaatattattaccctataagttattttttatttatatatatattttttaattttaaaataaattttgaaataaaaatattaggtgtatcaatataaacgcgtacaaaaatatatacataaatagtttattttagcagttaactggatatgacacactaaatttgttaacagttcaataatttaaaaaataattttactgttaaaatttgaacttaaagaattaaatacaagtgaaacaatatttaggagaatttaactcgtgaaaattctataattaatagggttataatatttatgtacacaaaatatatatgcaccacaacattataaccaaatcaattaaatgagatgacaacattgttattgttcggctaatcattatatttgataaagattacttatacactaatcaaaaaaaatttttggtattcaatattaatatagatcaatcatcttaagtattgtggtatatatataaaagagttatgaaagaataagttggatttagtataaatagtgacataagaatttaaatttttaaatttgtaagcggcataaatttagtgtttatttttagcgaaataagtagctaatatttgtaaaattgagatttttattcaattttgtcagtacagactccgtttagaccccaggaccagccctaagctaaggtgagttaggcccgacgcttagggcccaccctattagaggcccacataaaaaaacttttaataaatatattaataaatatacatattttttttaataatttttaaaaatataatttattgttataaaaatagtctcaaaaattatttttttaaggcccaaattaactcagggtcggtccttctagactcgatgatctagaattagggtcttatatgtaccatgtttaagacaataataaaatttctactgacgaaattaaaggaatattactattttacaaatattagatacttataaaaaataaacattaaatttatgttacttataaacttgaaattttaaatacttatgtcgctatttatttttgaatttacctggctcttttattctgaaaccaaactgaaacctgttgtggagttagattcaattcatttgccagtgcatattttgtggtctgcatttaataataataaatgagattgtatcatttttcaaaaaataaaaccataattataacatgaaattataacaattgaattaatagtaataatatatcatacccgatcaagattagaattactcaagttgaaatgattttccaagatagaaaattggtctttggtgagcttcaactttttcctactaccactattattattaggcttgtaaacgtcgtcgtttcgtgggttgtggtcttcaaagaaatcatctttttcttctggaaaaaggtcaaagcaagttaaaggttttttctccatcttcttctgtgtggcactgtacactaatccaatgcccaattgaagctctgtgttacatacttcatcttcttcaacaatattattattattattattcatgcttctttcttcaaattgatatgagaaagttgagtatattgcttatatatatatatatatatgggagaatatataataatattaagagattaaattttaatcaattagtatcttttttatttatagaatataataaatgtaatttattataatatttattacactaacaatcaatattacaaataattacatatttgttatactcaaattctctcaaataacaaatattcaagtttccttattttaataaaaaaattctttatttattttggttttaacaaagaccattttattttctattatttttttaaaaaaaatccttgagtccattaggattatcattttaaggacacaaaatctttctaataagataaagaaatattctttctatgtatgattttgaaaattaaaaaagacaaaataatacaatttcgatttcagttttgaccaagtagaaaattatcattgattaattatgtattttagtgaaagagacattggtggttgtgttgtgtatatatgttggtttttttattaattaaatcattaacaacagtgtaagttaataatattactagtcttaataatattgaaagttaattttgtttggctagttatttagagttgtaactaaattttatcaatttttttttacttgaattaaattttacaaataactaaatgagaatcccctttttcttgtttatttaatagaagtttgcaagtgaagtacatttgttttgaagggttatttgttttgttatggatggtattctctaaaaaaataaagctgtttgggttagatatctctttagtttttttagtagagacagagtgttaaggatttcatttcattaatttctgttcaatgtaattacatattgtaatcaacaatcaaaaggaataattatgtggtttactctgtcaaggtcaaagattcaagtttttcacctatttccatagcaataactccccaagaatcacctcatgaaataatagtaaaatcttggtacttcctaataatgttaataaattatagtaaaacacaacaatacacaatttcatctcctcacacattataccttataagcaacctcaaaaacaacttctcaatatcttgtttttccttggcctggagttccttcttcaacctattataaacactgtcctggggaaccatatcctttgaaatcatttccttaaagaaagaataataagcatgttcaactctcccactcttgcaaagcccactaatcagttgttaaacatatggttgagcagaaagtgaagcaccttcatcctcctcttcttgcaacacatctttaacaaggcagcataagttttgaggtccattttcttaagcaatttcagagctttctcttcttgtgaatggtcacaatagcaatttcatttatctgttttgccttccctaaagcatgcattataatagtgtatgttacaacagttggggcacaatctttggccttcatttcatcaagaatggcatctacatttcgaaaatccttttcgcgacagtatgattcgacgaaacaagtataagtaaatgcattgggttgatacccatttttctccatatcctccataaccttcctagcagtatcaaacttcctaactttgcaccacccatgtactaaaatgttgaaacttgtggtcttcacagtccctaaactcaagaaaaacttcctgggcatgctcaacactattctccttaacaagtttgtctagaagtatgttcaaacctgaaacgtccttgcttataccaagtctctccattcctttaaaagcagctatggcttcctcatacaaatgagctcttgcaagtctcctaatgactttagccattgtgaccatccaaagagctcattacctcaatcaattcccacatatgctggaactcatcagcttttcccaggatatcaaccattagattatatgattctggggaatgcctataacctgtttgtgttcctacccaagtcgaaacttcctgataaatttaaatcaccacacccatcaagttcttgagctacttttttaggagaagcgtaccttttgttaagaacattgctcaacttatcgatatctgactcgatagtgttgttgaaaagttgttcacgggtttcaagttcaacaacaagctttcgacttggagattcgacccaatgagcgagagaaggaataacaaaatcatcatcttcttcattgtcatcttcatcagtggaagttttcgagggaacaacggctttgacccaactcggaagctcaagtgattcagtgagttgggttgaatcagagttggtgcatagcgagttaaggaagaggtaacggcacaaagcattggtattgggtttgagagcatcttctctgcactataactctgttcagcaagcaaaaaccaattgtcagattctgaacacagagcatagcaagttaaacaagtcattcaaaattcttacaagttgttaccttatttcaagataatacataagagcaagcaaacaaaattttaacagtttagtgatgaggaaagtttctatttacaagaaagcaagcttaggactattgttgttcaatctcctaatcattacaggttacttacagcatgataggaatcattacaaggattcattatacagagcttaaacgacatttgttatctcatattctctaatgtgtatcaacttgctcaa

SEQ ID NO: 14560 - DNA, 11728 bp, Cannabis sativa
  modified_base (10916)..(10920): a, c, t, g, unknown or other
aaagaattgccttttatttatgaataatgatcaaattacacctagctttcgagaggctagtctctcccaagtacacaacctttcgagacggttgttctctccaaaaagacttctcttaatacttaattccctgcctataatgagttctaatctcttatatatatacataataagcctaccacatcagcagctctaattaaacccaagtgaccaatacaaaaagacaattcagcccttaaaacagtttgaataaaactcaactaaagacttaagtgtggcctttaggcccttctttttctatggtaaacaaatctgaccaggggcttatcaatatcctatggcttaacagtttgatactaactttccaaaacttatatagtttagagatctgtggtatatatttacaaccaagaagttcagttatatctttgtttggtggtaaaaaaatgcaaaattttaaagttggtgacctaagtgcaaaagaatgcataggttgtggatttttgccacaaaaccctgctaaatgagctctagcagcataccatctctatcaggcttcctgcttgacattgctgttgtctgctgattcaagtaaaatcaaatgcttgtgcaaatgtgtttttttaccaattaaaatatttattataaactaggattatttgaatggaattatgttgatttgtgaactaggtctgttgaagtgaattgtgttattcttgtcttacaatgtcaggtttatgttagtgtgttgtcgctttctgcatacttctctccagcagtgtatgttactgctttgggattgattgcgcatcttcgtaccatgcaactgcactctgcaaacagaccaatggtttctgattttcgtttcggtgttgagtttaaattggagtcaatcagattattagttaaccttgcaaacaatggtgaaaacagcctagtcctcatatttgcccttcaagaattgtatatccagtatgtactcactacttttattgttgttctctatacatcttatggatctagccacatgaatagcatgcataaagtggatgtttggatacttgaaatactgttcctgttaggtgaatgtaatgtttgtgttttatagctgcttctgtacttagcatccaatgagctaattttagttcctttgtagtccttgttatccaaataatagtgctctgtttgacaaaatgcaggtatgcctttttatcttctgaagagtgttatgtctgcttaaaagcattaaatgtaatgacttcatcgttgagaggtgaaagtgatggacgtgttgtgttttcttctgggaatcagttacttacccattctgtacaggacattaacattggacatggaaataaccttgaaaaccatgctgatagaagtttatttaccgaaggatgctttatgttaatttatgaaaatgagaatacagagtttgcttgcgccaaatttaccatatgcttgactgatgctgattttcactgctaccctgatgtaactggattgctaattgtatttttcaagagtctatctgcacataatactttttgtgatggtgaaaactccatcaactcttccatagttgctgaagatacaaaaacatctcctggtttcagttttcaaaagttcggcctctcaaactattttgagagtggatctctggagcatgcaagcatccctctagattgttttccttttattaccatatccagtactggatcccttggtgatttagagagttctttgctttattccaatcatgaatggagaaaatatttcaatttaagggacaagagaatcagatgtccaaagttcagtatgaagaagaaatctaggaatgatcatgttcatcctggagcatcacaatcaatgtctgatacagaagcaaatcttttttctacaagctctgaagcaaaatcaatgcccggtgcatcttattttgattttaacttaagtggaatcagtctgcattttcatgatttgtcgtgcattgttgggacagttaccctgcctagctctatttgttctctaatagtttatgaagactgcatggaggctttgtgctctttggaaggatcgattcttacctcattgtggtggacaaaaaactttcatgagtttctatggggtcctgcaacaccaaatttatcttccattataaatataagggtaaggaagaacaaactaggatcatcatcatcaaattctcatgtagaagtaggactcagctttcaacatgtttactgtattttacctcctgactatctggctttgctaattggctatttttcattatctgattggaatactggttctaatgagaatcacggaggtgaaaggcatgaaaatggtgatactgaaaaagaaggttccattgtatataagtgtgagatactagactccattttaatgttgcctgtggaaagcagtgaacgtcagtttctaaaggttgacattcagcaactgtactctagtttcattgataacggcagcttagattacatttttagtggcattccacctgaatacttggttccagcacctaagcttgaagaaaaaaacaattgtttaaatatatttggacgagacttgttcctttcgttcttgtctttcgaagatgatggatatgattgcttacagctggacaaaggggctaactgtgcagttgttactttgttggcacccttaagtgccgatatctggattaggttgccccgtcaaagtgaattatatagtaaaactactcccttaacaacatgcatcctggcaagggttgaaaagtgtcatattctggctgatggtaggattttcaacttatttactctctctcttttcactgttatcctacatctcattagcttgttatctttttaagtatttttcaaacatttatgcttattcatattcttttttcccctctacagacaatctttttttctctgggatcaaggcactgttggatgttataaatcagttttctcttatttccgatcaatccaaatgtttcaaaaatgatgttcgtgagtttcttcaattgaaaaagtgtttcaaagagaacaatgcaggttcacctgttggctcaagtatttcatgtacagaagttagatgttatgttaattcattgttgataaagttgcatcacttcagaggaggctcaagtgaacttcttgctaatgctgaaatgcagtttacattatctgcagtgttgaaaaatgacattctttcaagtttagatcttagattctcttccctggagttgctttctctacctaattttgttgtgttagcaaaatgtacatctccatcctcaatctcatctgttcttgacatttcatttttagaagtaaaccaagctgaaactgaactatgtttttcttttccatctcttgtcatttggattcatttgtttgagtgggttgacatcattgatgccgtcgtttcttatgctggactgttctccaaagttgcaccattgaatacatcgatgaataatataactctgggtgaagttgaaaatgtggataataaactaaacactgtttctccagattctcttcattcttcaagtgcttcaacctattctgcatctgggagcacaaagcaggattcaactgtcctgactgtgaagctggacaatgtctcaattacatgtaatcttcccgtcggcatcagtaataaagcatgtgaagagtttctggcaactgaagatcaaagggaggtctgtccaattgagtcatctaacatgagagatagaagtgactcgaaatacatctctgttactgtgcatagtaaaagcagtgaaatacttctaaagggaagacatatgaaactgaaggctaatatggaaaagtggattggcactatatcactttgtgaggatgggaataatttatcttggcctctttttcagatgtttcatgtttttatagaggctgaggttagccatgacatgatgcagtctgttcatgtcagagtggagtttcagtgtgataatctaaatgtgtggctttctcatcattttttctacttttggcatggtgtgacatttgttattcctgaaggagggccttctcagttccctcttggtggtattgattttgaaatcaaaatgaaaaaagcttcttttcttctgagtgatggaagggtatgataactttcttgagtattttgactctttatggtttgtgtaattttctcttacgcatgtaattggcatttttaacgatcccattccccttcctctgattctttaattcgtggctgttttttcaatgagtttttatgtcatgatcagttaattaatacaaataaacttgcagagtctaatttaattgatggttttcacatgctaacttcctatttttctttcttcaagtggagttgtagtggaccgctgtttgaaatttttgtgaggaacatggtcctgaatggtaaaataatggaaagctatatagaaagcttacttactggtgagattcaaatgaactataacaaccttcacaaggtatgtaatatatatttttttaattatccttatccaatcatataatataccgttcttatctgcttctaattttctgaaggtcttctgggagccttttattgagccttggcagtttgaaattaatgttgcaaggaaacaagaaatgagtctgaataacaccatggtgacagatatacatctcaattcatcgacacaacttaacttaaatgttacagaacccctcattgaggtatttcataacaaaagctctaatggattttttgacagtttttttttgtttggggaaattaagtgccaagcaaggtgtaaccgcgaagcagtaactcatagtttgtttaaatttaattgtagtgtgcttcatacctaaaactactcttgagaaatcttgcatgttctgtttacctctcagttgggtgcaaaacttcaatgcccttaaattatcaatatcttaatgcttatttatacttgctcttgcagtgtgttttcaggacaattgagatggttaaggactctttgggtatagttgaaccaaatgatgttcctgaaagcaagaaattgttaaattcacatcataaacatatgtatgctggaagatatgcaccctatgtacttgaaaatttgacttctctgcctctagtatatcatgtttataagggtcctgttgaggagtttgatgtgacagaaattaagggtagaaaatttgtagaaccaggtgcttcagttccattgtatattaatgatactcctgaggaacaactttttcatttttggcctgctaaatcttctgacaaacttgctgagcagaaattaagtggtgtttctcatcattttataactattcaacttgatggaacttcaatgccttctactcctatatctatggaccgtgtaggacttacgtactttgaggttgattttttcaaggcatataatgaaaatagtggagataatagtacggataccacttctggttttgtagtacctgttgtgtttgatgtttcagtgcaacgctatagcaagctgatacgattatactcaacggtacgtacattgtcaaatctatgctatgatgtttattaataaacttgaaattcacaaacacttgatatatgcaggttgtactttcaaatgcgacttcagttccgatagagctgcgtttcgatattccatttggtgtatcgccgaaggtatggaccaacaactagttgatttgtacaattaccttacataaaaggctacttatttttgtgatggtattattgccactgaaaattaaatgtgatgtttcagatattagatcctatctatcctggccaagagttacctatgcctttacatttggcggaagctggtcggatcagatggcgtccacttggagattcctacttatggagtgaagtctataacctttcaaaccttgttttgcaggagaccaaagttggattttttagatcttttgtttgctatcctgctcatttaagcaatgatccatttcggtgttgcatatcagttagaaatatcagcctgccacctaggaatagtcctcataccaagattactttaaatacacctgtcaaaagccgtggcgaaaatttgaaaaaggtggatgagtcaaaaaagaggtttattcacgagttgaccctgtgtactcctctaatggtgaacaactaccttcccaaggaagtatcactggcaattgaaagtggcggagttacccattctgcattcctttcaaaggtaatgtaatgctattgctatgtgactagatttgttttttttcctctcttgtatgatttgtaaaggaggtaatgccattatagaagatatttcttttgccatcccgtataggtggatgctttccttcactatgttgatccttcccatgacctagtcctggggattagtatgtatggattcaagccaacaactctgaagttcccgcgttcagagacattctgtacaatggccaaattcactggaacaaagtttgccttatctgaggttattgcttttgatccagacttctcaaatggtaagcgttttcttatgttgagttttctgttcaagtaacaatgtggttggagatctattaatggtgtcggttttgctttggctaggtccaatatatgttacagttgaaaagatgatggatgcattctccggtgccagggagctttctatttacgttccctttctgttatataattgctgtggtttccctcttctgatttcagaatctggaaatgaaataaagactgttaagtgcattattccatcatcatatgatatgagcgagcaagagttatgtgagacaaaagacggtttgcgtatgatatctttgcatgctgcagatcctcatggaatagaatatccttcttcaagtcaccttatctctattagggatgactttaatccacgcagacaaaggttctatgagcaattaaatgaaaatgactttgacactggagaaactttattaaagagttcaaagaacagattatcacggtcaggctctgatttgttttcaaggagctctaactgcatgggttatgagcatggaaaagttggagcatgcatgtactctcctgttccattttatgctgctgaggaactaacggtcacagtaagtagagctcatggcgacaataacatgccaaaattgtggtcaagcccatttcttcttgttccacccagtggttcaactactgttattgttccccaagcatcgcaaaatgctgcatttatgatttctgtgacatctagtccagttgctgggccactagctgggaggtcaagtgctattacttttcagccaaggtaacatttttcatttttggcatattccagctttaagttcctgtcttcatattctcagtttcctttctttttttttttcttgggagggaggttgtttggggttgtcaaatattaagtaaaaacaactctctggtgattatcacccttttgacaagaagggacattatcacccatcgagccgcttagcacatttgtctagaatcggcatccaaaattcagcctttctagaaggtcctcccagttacattataaagtaaactaaaataggaaactacaactaaaacaggagacattatatcacacctaatattagtagtaatgcatgcagtgatgacagattctacaaaatttacagtagtgatacgtggttaatatgccattattggcagatcttagattttctccttacaaaagtcttacttttgcagatatgttattagtaatgcatgcagtaacgacatatgcttcaagcaaaagggtactgaccatgttttccgtatgcgcgtaggagaacattctcatcttcattggacagacacaaccaggtatattgccttgaatatcttgcaagttgcattgtatcttgatcttgcaataagttgaaagtagtcacttagcttcaatgcactcaatttcatttactaattaagactaatcccttttgttcattttttgttccatttaaaatagcctttattttaatgctcattcctcttagtatgtatttcaatgctgtgcagggaattacttgtttctgttagatacaatgaacctggatggcaatggtcaggaagcttcttaccagatcatcttggtgatactcaagtgaaaatgcagaattatgtttctggttcatctagtataattcgagttgaagtgcaaaatgctgatgtttctgttagagatgaaaaggttgttggaagcctccatggtgattcgggaacaaccctgattctcttatcagatgatgatacagggtacatgccctacagaattgataatttttcaagggaggtaagtgtataaaaaagttttgataagatttgaattttttcaggtagtttttccttgatgatttaggattgtttatgacattaaacattttttttctgctgcatcactaatctgtgtgtttgtaaattgtatgtggtgcccattacttcagtagtttatactcattgtaagagacgttgacttcacatatatgctaaaattacatttgttaaaatgtaaaccaacaggattgtaatttatgaatttttcttttctttatcaaaatgcatgctattattgaaatcatattttactttacatcattcatcactgaactaattttcatggtattctacttgtccagaggttaaggatcttccaacagaagtgtgaaccttttgagactattgttcattcttacacatcatgcccttatgcttgggatgaaccatgctatccgcatcgcctcactgtggaggtacccattttatttatatcaactctgcaggggagagggtggaactattcgtaggtttattgtaattattgagacttttttgtttttggaacacttaaggtacctggtgagcgtgttctaggttcatattcccttgacgatgttaaagaatacatgcctattttcttaccatcatcttctgaggtatgactgacactcataggtttagttccatcaacatatgccatatgtgaaatgaaaaacaaaaaggttaaaacaacggttatttacatcaaattgaaattaaaattaatagaaatttaaaaattatttacttatatacttgctaaatcagtttaatgtttttatttatgctaattataagtttgatttccatcttatttgatcattcttgttggaagggtttttcttttttctataggaaactacttattttatacaggaaaattggcggcaaaactacccgaactttatattttttaacagttaatcacataaaccgatttttttacgacaaaacctaccaaactcacattttgttttgatctttacacttccatccagaagccccagcacgtttttagtggtctacataattttaaattattttaaaatataaaaataatttaaaatttataaaaataaataaaaattatttattttctttatttcttcttttgtttttttgtttttccttttcttttcttcttcttaaataccttaaattgtccatcttcttcttcttctggatctatgttttttgtttgtttgtttgattttagagaaatgttggtggtggtggtaatggtagtagcttggtggtggtgtggtggaaggttaataatggtggtggttcgttggaatattcatattctggtttttgggttttgttgggtatgaagaagtcaatcactttgttttttgtctcatgtacttttgttacttaaaaaaaaaagaaaaaaaaagaattttttttattgttttatttttaaaatttataaatttttttaataatatttaagtaattaatattatgtggacaagtcaaattctgctacgtatatatatacttcaacagtctaccgtaacacttaactgagtcttttggacggaaaggtaaatagcataacataattgagatttacgtagttttgccttataaaattggtttttttggttaatttttaagaagtataaagttcgggtggttttaccgctaatatcccttttattaattaaatcgtgacaaccaaaggagaccatctaggctaaacacctaggaaaggacccacagacctataggacctaaaaaaccaaacctgctaccagattcataaagacagtaccgttataaacagagaatactacatcaaagattcctgtcggggaaaaatagtatgacatatgctttcactataattattgcaaggccttgtttttctattcatatagttgttggatgttcccaaaaggaaaaattcaaggactgattacagattgaactcctatctctaattcatcagtcaccattgtaaatagaaaaggtgtgacagtgggtcaccttgtcttaatccccttaaggttctgaacttcccaataggctttcaataaggacttatttatctctgaagaagggaaaaaaattctgccaatagtcagattcagtttaaggttctttttttaattcatgatttcagaccaacccacggaacgttacttctatcttctttttatttgttgattgaaaataacttttgtttttccagaaagctgagagaaaattattcttatcagtacatgctgaaggagccacaaaggtacattgccaaaattttgttatgaaatgactgcagagtatctacatcatggcagcttattggtttttctgtggcaggtcctccgtgtgattgactcaaattaccacattttgaatgataaggagaatttgaacatacctcatttaagagagaaaaggaaacatgagcagaaacaggacaaggttcttggttacaaagaacaaatttcagtagtaatcccacatcttggtatctccttaattaatattgatcctcgggtatgcatagatatagcttcatttatctcttcttcttcttcttcttnnnnntcttcttcttctttctttctttgtaagtaaactgagttgatgagaaactgtcaccattcgttctttgcaggaattggtttttgcttgtgcaaaagatatatcttttgatctgctgcagagtttggacctacagaagttctcatttcaaatttcatcattgcaaatagataatcagctacgctcgtcaccatatcctgtgatgttgtcttttgatcgtgaatacaaaagcattccagccgaaagaaaattgcaaagaacttctgattgctcttatgaacctgtattttacatagcagtgtcaaaatggaagaagaaagatatctccttggtttcatttgaatatataatcttaaggttttccttgctgttgtttttttaagcaaaccaaaatattattacaaactcacttgacttacaaaggggatggcttaatgtgctttctgtaatgcttgcagagttgcagacttccgtcttgagcttgagcaagaggtgatactgggcatgtttggcttcatcaaaaatgtaacatcaaggtttcagagtagtttcttaaagttaccagatcccttattgtgtccacttattcctgatactggcttgctagagccatctctttcacatgctcagacttctgagtatcagaaagcaaagggcgttcctgtctttaaaagtcaatcgctaccctcagtggttcccattggagctccttggcagcaaatttaccttctggccagaagacagaggaaaatctatgtagaggtgtttgaaataagccctatcaatgtaactttcaggtggcccactaatc

SEQ ID NO: 14561 - DNA, 6989 bp, Cannabis sativa
tttttctttatcttatttcaggtttctattatgcaaattgcttctgataagaaagtgtttatcttggacctgataaagttgtttgaagacgtgcctgacattatggacgactgtctaacccgcattatgcagtcaccgagggttttaaaacttggtatgtgttattagtatctgcgttgacctgaaatctctacgccttggtattatgctttgtatattgagctagttctccttattctttcaagtcatggagtaatccagttgtgtctgtcatttataaaaatattacggctggtgggttcaagttttcatcagtcagtttcagctgtttcacatcaaaatattgattctttatggcttgtgtgtccattttaggctataattttcaatgtgatataaagcaactggctcattcatacgaagacttacagtgtttcaagcagtatgaaatgctacttgacatccaaaatgtatttaaagaacctcgtgggggtctatctgggcttgctatggtaaaggagtacacaatatcttcttatcatttcttttaccctgtataaccttgtctgtcacatacaatttaaatgatgctggacttggattcagctatgcatgatacattaaactactttctcagaaaatattaggagctgggctgaacaaaactagacgaaacagtaattgggagcaacgtcctttaactccaaatcaggtaatttgtttgtcttattttttatatacagtgtcttatcttattactatgacttaactatcagttgttggagccgccattttcagctctttatgggcaattaacacagtttttcattccaaggtactcttcacctgagagaaatttataaaaaactgatgagagtgcatccttctagcttgcgtttaggtcttgtacttgccagtctagaaaatattgtctgttttctttttattattattataaaatgagtgctttaagcgtgtatcaaagtagaattcttggattttatcaatatgaaattattcattccttttaacaatgaaaagttaaagaatatttatctaatcttcaagtaagctgacactgtagaggatcttgcagctggaatatgctgctctagacgctgttgtactagttcacatttttggccatgttcggaatcattctcagaccgccagtgatgcagagggactcgaaaaatttgagtggaaatcctatattgtaagctggaacataacaaatggtgttatttattcatatgtttgtgcctcatctttgtcactaatttctccatttatgcaggtttctcacatggacaaactcaagaaaccgaagaaacaaaacaaacgagaattagaagctaatagaaagacaggctgataatctaccttgcggccaagtaatttgtaaatactatgacctactcagctgtaaatataccctctttttttttttttgttaatttaggagtgatgaagagtttatattcttcatatctcaattgaaacaaaaccatttgcattggtactttggtggatatcattcatggcttaaaaatttacggttaaagaaataaataaataaacggttctttagcctataagctttgtctgttccaaccattaatgaaataattagaagaagaaataatcagtctaactagtttagtatgctatcttgttattttgggctatagttatttgtagtgagtagtgatgacaatttacatctattttaagtctttaatagcaaaacaattctctcccaactatcatattattattagttatgtatttgtaggaaagcattgcctaaatttaggctcattatgaccccgaaagtaatggaaaacatctcatttttattacattcaacaaaggccaaaatttataactgaaaaagaagaagattcattgatctaatttttgacagaagcttatcacttctccaccattcattctccaaaataaaaagcctgaacattaccaaaacttatcactctctccaaatcaagaaaaaaaattattggttaagagagagagagagagaaggagaagagcagatgggagagacaatccgacatcgttccaatggtgttggaagtagaaatatagagaagaacatagcatacacaggttggtctaataatcataatcataattataatccatcgtcgaaaactctttcttcttcaaaacacggggttttgaaggtatcatcaaagaggtcgtcttcatcatcatcttcttctcaatctctcaagtggtggtggaatgagcctgagatgaagagacaacgtcggattacttcttataagttgtacagtgctgaagccaatgttaaaatttctttcaagaaaggtattcgttggcttgggaagaaatgcaccatgattatacgtcggatttgatgatcaacacaatactcaacaccaataacattcaaatattatttactaacattataaaagaagttatttttttattaatcttttttgttagtgatttattcattattaattttgtttgtttgttttgttatgtgaatggggttgttatgttgttatatttttaaagaaactctttcccataagaagccaattcttctttctctttctctctctctaatatatctattaatactttattattatattacttagaattggtatatctatttcctatgcatgtttattcttgtctaattaaataaatcactattggtttggaattatgaagagtgttattgggtctctttcatttggaggagtttcacattgtttttggacaatcccttatatacatttatataacaataaatttagtatataaaaggatatactaatatttcatttcatattacatttgggcaaaattcatattacttagacatatacaattattctaaaattgatctgattaagagatcaacaacctagacatgaaaacattaattaacaacaaacatttcagagtatttattatagtagaatatcaatcaatactaaaactttctcccataaattcttgtgacccaatttggtttctttgatatgatgaaatatccaccaatagctccaacaacaaaaccacttccatatccaaccatcacagatctccaagtgaaaccattctcactagattcatgttcttggtcactactactaggcttctcatcattgctttgttcacatttcattgacaatggaaagccacacaagcctacatttccttgaaaagaagaattttgaaatgtagccatttgtccaccttgtgggattggccctgtgagttggttttgtgaaaggttaagatatgaaaggaatgtgagactagccaactctctaggaattgtaccgaaaagcttgtttttggacagatccaacgattcgagttgcttaagattccccaaggaagacatgatttggccttcaaaattgttgcttgaaagattgagcacaatcaatgatggaagatctcctatacttgttggaatctcaccatgaaaatggttgtttgagagatcaatagatgtgaagattgtcaagatcttcataagtttcatttctgaccctttgttcattagtgtcactgagttttggtagtaatcttcctttctctccatgtacaaaggcttcgagttgttcgatctaggaatttcgttattaatggccctccaattcttaaagtagtcaaatggtaatcttccattgaaattgttgaaagagaggtctacaattctcaacttggcaaagcctacaatcatttttctttgccatattggacccgaaaagttgttggaacgcaacacaagaacttgcaactcgggaagattttggagccaaaatgggaatctgtcacttaactgattgtgtccaagattaagaacttctaatgccttacatttgatcaacgatttcggaactttgccttgaaattggttgtgactgaggtccaatgtcatcaacttgtttccatccaaaaatgtttgaggaatttttccatgaaaattgtttcctttcaagctcaacatggatagctcagtgctgaagctagtcaaacatgatggaatagttccatttaagtgattattggacacatcaagaacaacaagatcaacaaagtcacaaaacatatcagaaattcctccactcattctgttttctgacataaagaagtattgtatggacactggtggcacaacaagcgaagtttgcagcttgttgaaacttgaatcaagaattttcaagttagtccatggaagaataaactgaggtgtttcccaatgagtaatatggttgtgagaaaaattcaaatggttaagattctcaacactcatgttgataaaccagttgggaatttcaccttcaattcggttgttggatatgtctaagaacattaactcattttggtttttcaagaagtaaggaaatttaccactcatgttacatgaagccaagcctaaagaaaatagtttgggaagaagggttgaatttgagtacatgtatgttacagacaaactattttgtgaaaggtaaaggctctgaagatttcttagctttgagaacatgtttagcttaattgtaccattgaagttgtttgaatcaagggaaagtgaaactaagctcttcaacttaaacaaagaatttggaattgggccatttaacttgtttgaacttaaagagagagaggtcaattgtgatgaggtgacattgttgtggatggttaagggacctgtgaactgattttcatttagaagaacctcactcaaagaaggcattgtaaacaaagatgaaggaatggctccactcaatgcattatatgagatacctaaggactcaagtttggttaagtttgtcaatcctagtggcaaatcaccattcaaaccattgtaatgaaggtacaaagttgttaaccgagtgaggttcacaaccgacaatggaattcgaccgttgattccatttcccacaacatctaaaaactcaagttgtctgaggttaccaagggttgaaggtagttcacctgtaaatccagcatgatcaagataaatgctcttgagcttcaccagattccccattgtacttggaagcttgccactaaaactattgtaggacaaggacaagtcttcaagtttggaaagatttccaaaagtggatggaagttgaccagtgaggttggtgaattgaaaatccaaatttaccaaatgggaaagattcccaattgaggatggaatagtgcctacaaaattgcaaaaagcaaagtttaaagttatcaaagatttgagattgccaatggattgaggtattggtccagaaaattttgtggagtagagattcaatgactttagattgctagtggaatgaaatgttgggagaaaaccattgagcatgtagttgtttctcaaatgaatgagttgtatattaggcaatagaaaaatattgcttggaaagtcaccatacaaatcacattctataagagagagagatgtcaaagaggtcaaatttgacaaagattgaggaagaagtgaagtgagattgacttgatcaagataaagctcttgtaactttgagaagttatgatgaaatgtgtctatttgaagaaacaaaggattaattccatcaacataatcaaagttagtggaaagatcaagtgaaaccaaattgtttagccaagttatttcattagggactttccctacaaaatgagagtaagaaaggttgagatgggttaaccttgaaagctgtgaaaatcttgaaggaatcattgaagaattgaagttgttgtatgcaagattgagtctttgaagttgatccaaatcaaagaggctgctatttgaacctaaagggccttgaagccaactgttgctcaagtcaaggcttacaacttgtcctgttttcatattgcatttaactccatcccacttacaacactcctttcctttccaaaacttcatctttggatatgaataaaaagatgtgtcatcaatcaaatctggctctgtcaatggttcaaactcttgctttagtttcagcaatgtagagctttgatcaggaagacatgtttttgaagaagctaaagatgagttgagtaagatggtgaggcatagcatgaagaaatagctctcaaaaatcagtgcctttctcatctttctttttcttttgatgaattctacaaatgagagcatgtttatatgtgtagtgacttttttgaaaaagaaaaattatggctgtcagagaaatgtagttttgaatttgatagagagtgataagaaagtaggaactagtggctaaagactaaagtctttttctttgttttttctttgttttttctaatgccacgtggaagaattttctgtccaccaaagttgaataaattcaaaactagacaatcaaaactagagaacggtttttgaggtcaaataatcacccaaattacactgcaaatcaaaacccaatgataacaaatcttttggaatctagttagacttgggctcgagtgttgtgaattaagtccaacttgtgattatttaacttcttttcttcctttcccaccaaaagaaaacttcttttcttccttcttgtaattggttttcaagaattaaaataattgaaaaaagaaatatctatatataattgttattgggtactactagtgtttagtactctctaaatgtgtcgctttgcgattggctagtgatactttataaaagttattacattagacatatggcaccgatatttaattagactaatagcgatattgacaagtaagaggatgttaagcactactgatattgtttagcatttcccatatctatatttataacatcaatatataaatagatgttataataaaacaaatacaatagtttttttttaagttaattaggatttttgtccccctaactttgaatattgttaaaattctccttattgagaatgttggatttaaggacttttgtctaattttagtaagaaaaatctaacatggatgaa

SEQ ID NO: 14562 - DNA, 6486 bp, Cannabis sativa
tatattgcgtcataattagtaagagtatttttcatatttactgctttctcttcttcgccattatttgtttgtttttattgcagagctcaaacagttatttaatgctttgtcaccccacactatctcattcacgccaaaaatccttctcattgcagagtttatttgttcacagaaatctccctgattcactacttcttcttcctcttcttcttctcgtttattggttcagttgtcagaaactcatctgagtttggtgtttccttatacacgcaccttattttccctttgctttcaggctctggatatgtaactgatcttagccttgctcttcatcttcatcttcatcttctgtgtcttgttctttcaaagagtgatttttgctaaataatgtaatattctcttaagcattgtagatttcttttccgtttgctgaatgcccttttactcaaaacagttttaaacagtcccttttatgatttcaatcatgggttctcgttaattttactgcataaaccttccttgttcaatttcttcggtttcaaacttcttggtgtgttttgtgaatgcccatttgcttaattttgttctaaataattccaaatgcagttttggataatgggtttccgttaattttctcctctttgtttttgaaacctgtaaagtttgaagcttgaaaggcaaaggtgtcaactttagctagtatattctatcatgtaattgaattttttagcatgtttctatgtttggttggtcactagtgctgagttttttggtgggaagtagttaatgatgagaagaaggatttttttgatttgagtcaagagaggtgatggatctaaccttgttcataattgaacgctagccttgtgatctgaacttatggaggtttgtttgtttcgttagcacagagcttcctaatccaatccactatcatgagttcccttcgctagtttccttgctttgtctaagataaggcatccaagcaatacaattcatttttaatctattcttttgttcttcataccatatacacccaatttgttacaagtttttttgcaatgtaaagttcttccactgatattaaccattcatttaaggacctcaaagggtctgttatacttaaagaatcaatggattcacattcttctttcccgccaaccttcaaatctcaatatgataaagaagtcattgtttctctgccatagttttgtttacatatattgactatgaaaatctaaaacacctatattggcctctcgagctccttggaatttggatctttatcttagaatcccccaatcatttgttcacctgtctacttgtttttttccacacaaagcaaggaagagcttccatcttcttgctaatggaagaaacatttgttccctttcgagggataaaaaatgaccttagaggaagacttttatgctacaaacaagactggactggtggcctccgagcgggtatcaggtttgttaatctcttatttcttattctaacaccactaacatgttgctactatgttgtcttctcctttataacaatgatctaaaattgatcaactttgtggttaaaacaaactgtaatatatgactcactgaagttttgactatttttgtgaagaatcttggctccaacaacctacatattctttgcttctgcaattccagttatatcatttggggaacagttggaaagagatacaagtaaagctttttcttttgttatgattttatagtgattgtccaattatagttgctgttacagtgatagttttgctaagaaaagctttctttgatcatgtgttacagatggagctctaactgcagtacaaactcttgcctcaacagcactttgtggtattatccactcagttgttggaggacaacccttgctcatactaggggtggctgagcccacagtattgatgtatacatttatgttcaactttgccaaggacaggaaggatttggggcaggaactttttctggcatggacaggatggtatgtcttgaagacactaaagttgtcaatttgtgatataactgaagtactactagtctgtcaagtaaactcaattttttccctctgctttgtttggtattcagggtgtgtgtgtggacatccctcttgctcttcttgctggcgattttgggggcatgctcaataatcaataggtttacacgtcttgctggagagttatttggtatgttaattgcaatgctttttatgcaacaggcgataagggtgagtattgctttattatattcaattccaaatgacaggattagtttttgaataaaagggtttggaaccttttaatataaagtaatttttcttctaatggtagcctcaacttttggtttgacttgtacagggagttgttgaagagtttggtgtacctgggagggaaaaatctaatcaaaccgtactggaaccttcgtggagatttggaaatgggatgtttgcattggttttatcttttgggcttctcctaacagcactaagaagccgtaaagctagatcgtggcgctatggttctggtaagtcgaggaggtttgggtttcagaagaacaaagaacaagtctagcttaaaacacattacaaaataaaaatctaagttgaattttcttaggatatattttcacttcttgttttgtggtcaaaatgaggatcaagaagcttattctttgacttgatatactaaattattcagttggtagcttgaaagagaggtaaagtgttatgtgcgtctcttgacgtctttttgtcattttaggtaggctacggggatttattgctgattatggagtgccacttatggtgctcgtgtggactgcggtatcttacatacctgttaatgatgtccctaaaggactcccaagacggcttttcagtcccaatccatggtctcctggtgcatactcgaattggactgtcataaaggtgaatcttatggtctaaattagccaaatattttagttaactcttttttgtcatctaatgaatcatttgggatagagccttaattgcttgctgctaggaactcatgtttattagctgtgcaggagatggtgcaagttcctccattatatatagttggagcattcataccagcaactatgattgcagtgctttactactttgatcacagtgtggcctctcagcttgctcaacaggaagagttcaatttgaagaaaccaccttcatatcattatgaccttcttcttttgggttttctggtaagttacttttctggagtaccactttagtgatgctcttcttggatttcccactccaattaaactacattacctgttttttaaattgtaaaactttccctttggtactcttgccctctccaggtcattctgtgtggacttattggcattcctcccgccaatggagttataccacaatctcctatgcatacaaaaagtttagctactcttaaacagcaggtagcgtttgattcactgcgtaatgaatgtcatatttttcctatttaagcaatgtagttatcttttctctcaaacttgtgtcacaaaataaaaataataagaaatcaaaaatccaagggtcataatccatcaatgatttgcagacattaattatttatctttcattcttctccgaacaattgtatatacaacggtgttgagctgaccctcactttttggacctaattgacataatctcattcagtatgcatccaatttgccattgtaaactctactttaaccaaaaagaattggatttagttaagcatcttgggtcaatgtctatatatatatatatttcatggttttaatttgtttatttctttatggaatagctattgcggaataaacttgtatcaacagcgcgaacaagcattcgtaaaaatttaaatctgagtcaattctaccaaagtatgcaagaggcttataatgacatgcagactccactagcctaccaaactccaccagccctggtaaatttaatagtaatctaatatttaattttgattcaactagctctttcattcccttccatgttatcttaattccgactttcaacaggggcttaaagaacttaaggagtcaacaatccaattggcgtcaagtgctggctacattgatgctcctgttgatgaaacagtctttgatgtagacaaggatgttgacgatcttttgcctgtcgaagtaaaagaacagcgtctcagcaatttgctccagtcagtcatggttggttgttgtgttgctgctatgcctattctgaagaagattccaacttcagttctttggggttattttgctttcatggcaattgaaagtttacctggaaaccaattttgggagagaatattgttgatgttcaccgctccaagtcgaagatacaagtaagttatgcacacatgctttaatcagatttatttgaacttcttcattccatgttgcaagtttgtagatttgaatattctcattatgttctggctggagaatgacaggattgtctttagtaaaagtttctcattatgcattttattttttcattttcattttgacctggagaatgaatggattattcttgtataatttgttagggtgctggagaactatcatgcaacttttgttgaaactgtacccttcaaaacaatcgtcacattcaccttattccagacagtttatttgctcgtctgttttggcataacatggatcccaattgccgggctacttttcccaatgttcattatgcttcttgtcccggtgaggcaatattttctccctaagtttttcaaatcagctcaccttcaggacctggatgctgcagaatatgaggaggcccctgctattgctttcaatatgtcgtacgaagtaagttgtctaaatcctcacttcattttcaggcctgttgaataaatcatttgtggacctatgtgcagcctttttaatggagaaccatagtgggttggtcaaccagattatcctcaaggttatctactgataccattgtaacccttattgttagcaggatcaggatcaacaggaaagaagtactaacattgatggtgcagaaatacttgatgaaattatcacaagaagccgtggtgagattcgtcgaacccagagtccaaaagttacaagctcaacgccttcttcgctagagcatacaaaacaagtttatagtccaaggctgtcacatagagtatacagcccacatcacagtaaaatcagagggatacaaagccctcgatcgcccgaaaaggaaattgaagtaaaacagactcctagtcctggaccatcaatactaggaaagagctgtcctggttcttcttcaagccaaatactgtaaatttatgattctggtaagttcagttgtcgatggttctcgagaggttctacatatgcaattatgcgtttcttctagatcaatatggttcttcgcaatataataggccatttgttagtgttactttatgcgtaatctcccttgtacactgggcagaggacaagttataatatactggaaaagctgtatatgtactttatttttataagctttagttggtttatattgcaactttctttcatggctacttaaagctgtgtaaaacactagtacactaatctatgatactgaatgtaaacataaggacaacaataatgaaagacagaatgaagaaaagtgacttttttttttccttttctatttaccacatggggaatatatggtacttaaaacaaaatattgagtagaattacatctgcttcaagcattcaaatctgcagctctctgtgtaacaagctaataatcatacataggtcacaggttgttttggattctcattcgtatttatcattagtggtttgagtgggtagtgatcaaggtcagcaccatgagctttgtaggcaatcaagagtcagaccccatatatgtcattcagtatggaaactccaaaatggtacgtgttatctacctctgtcttatcacaattgtcccaataattaaaggaagaaaaaaaagggttgtattaaagcaactcattttcagatactaataatggtcttaggacaagttagtgggagtactcttctgatattattatatctttgtatacagttagttacatagtactcgttgtcttattatttcaagtgggtattatatctttctatccatacttttttgttaaagagctttttcttatagttttagtacttaagtctagatttgaacctcttagagtggtactaatacctgatgatttagcaatagaatactcatcaaaactctagtctcaacaaaaccccatctctcttgttcttgtttgttactatttagtatttacagaaactcatattttcactacaaagctatgatgataggtaagttttagagcttctcaatacattagagatgatgttttggtattacttaaggacttttgaccaataaatcttaaggggacatgatctggtggaatgcatactactttctttcttt

SEQ ID NO: 14563 - DNA, 3927 bp, Cannabis sativa
agttgaaaccagaaattctccatatagcttttgcatatttacatccaaagagagcatgccccacagtttcccatgcttgtcggcagattgagcaagtggaatccgtgattattttccttttcaccaggcctgtggcaacgagaattcttaatttgtagttaagagagtgcggttataataatatatacaaataattaaatatatattttttatatatagatgtaattatatataaatataatttttatttttaaatatatataataaaattaatttttttatttaaatatctccataatttttatttttaaataataataatataaaattaataaaaaatattcggttataattgagatattatgttaatgttaacgtatacaaaatattcggttatatagccacattttatacaaaaaaaaaaaaaaataaatattttttaaaaaattaatatataataaatatatttttattagttaatttattgtattcagtctttttattaattttttttaaaataatatttactaagttaatttcaaaatttaagattattttaaccgtattttctatttatttgaaagaaacacttttacattattttttataaaaaaaaagatggagcgtaatgcacacgcagcaagagggcgtgaagaatttaacaagaaaaagtccccaccaaaacatttcttaccaaaccaaagaaagtaacagagtctcatctcatctaatctcatcaaaagtctctccttcctccatttctatctctcttcttcttcttcctcagctttctctctcctgtactagacagaagaagcacaaggcagaagacttgagcaacaaattaataaaaataaaataaaaaataccatacaatccatcaatggaaatctcaccaagacatcagttaaacccaagcccatcttatcctgctcttccttcaccaaatagccatagcaccaccagtaccactagttcatgcaacagcaacggtgtccaagcttctccctcagccgcaaacactgcagcgccaccgctcgctcccaaacccatcaccagatccgaatccactaacccgtacccgaccactttcgtccaagctgacacctcctccttcaagcaagtagtccaaatgctaaccggctctaccgaaactgccaagcaagcttcttcttcttcggccaaaccggcatctgacccgtcctccagaacccatatacctcctgtgaagtccatccccaagaagcagcaacaatccgggtttaagctctatgagcggagaaactctctcaaaaatctcaaaatcaatcctctgatcccaatttacggttccaacaactctggattctcccctcgaaagcccgagattctctctccgagcattctggattttccttctcttgttctcagtccagtcactccccttatacccgacccgtttgaccgttctgggtcggctagtttcgcctgttccagcaatgggaaggcgaatttcgatgcccaagctgaggaaagagctattaaagagaaagggttttacttgcatccctcgccggcgactaccccgagagacccggagccgaggctcttgcctttgttcccaacaacatcgcctagagctccaggttcttctttgtcttcttgaaatgaaaaaaaaattagtatgtttttaatttttatttttggtgtaattctatatgtgctattgttggcattgatcatgacgatcatcatgaagagaaggaagatgatatatttggaaaaaaaaaaaaaagagaaagtattgcgatatttgcagagaatgagatatcaatcacttgctttaattgtaaaaatttgatgtatgctcttctttcttatcattattgttattatttgtaacttcttttggttggttgctaagaaaaattgatcagaaatgaaaagaaaagggaggggaaaaggcaacttttgaatttgacattcactatcttgaatacttatgttaatgatcatattatcccttggaggaaacgtctctcaatgctttgaatagtggcggtgtcactaattatctaactcttcaattttggcgattatccttatgttttcttagatcattcaacaaattgaaatcattaaaatatttaaaagcaaaagtcgtaaaacggtgagcgaaaagttgcatgtgaggatttttagtcttggctacttttatttaagaaaaaaaacgcagaagaattgtgtagtattagtgactccattttgagatcaattgaattagtttttaggcattaattaattaaacatgtagaaagaagtgtagatgaattgcgtcagaaaaaggagaaaggtattgtttgcatcaatggcaaaagtagctttgctacgctgtcatggaaagagtagaaggatgggcaaggaatcttgacccttttattgtctttccaagtgaggagaaaattggcaatggttggcagtcaggtactctgcgtgtgcttacgttgtaaggactgttttcttatctgttctatgtatttatttttgatagaggctctgcaaatttaactctttttttcatggtagatctacaataaagtttgtcaccagaagaaagtaatcacttgatatgttgatttatgggccccctaagaaattgccctttgatatagttaagctaggctaagcacatgcttgttcttctttctaagttgatgttgttgttgttgttatgttatagttgtcgaattctttggtgggttttgtttgtgggaggtcaaagtgggctttaaaggtggcaataaattcaatggtattgattaccaaagattagtacaatttcagccacaggggtagtcatttttatttaataattttgttgggacccaataaaatatagggaacccacttgtggagtttgatggggccatgatcgtttgaatacaaaactttgaattgctgtaaaagcaatcatgcaaaggtagcccttctttctttgaatctaacattgttttaagtctgctttttgacccccaaaagaccaaaactgtagtgaatggagacacatgagaaagtgaaagttgtgtggggaaagtgggacttgtgatgatgaaaggaaggaagggaaaaaaatatgagggccagtgattgatgaaaatttggaaagctttatagaaggtgtaggcggtttatggcttcttgtgttttgtttgtttctgcctgtgtatggcacaatgtccaatgaggtttcttcttgtggactttgcacctcttatgttggtgggtcatttaatgagaatttgggcattttgaagtttcatgtgcactaacttatttattggttttctagcaaatttgttacccaaaaaaatataaaaaataaaataaaaaaaaaaaagaaaaggaaaactttaattaggttgggaaatataaagggaaataaatcaaaataaaggtattatccaaaaactaaaatattgtcttatttcctttgcttatttatttatttttttagttggggtatactcaaaaattagaataggtcccagcaggaaaaggataggccaatggtttaattcaacttattccaagtcagtgctcatttttgttttttaattgaaaattttcaatgccatttgtatttgatttttaattttgccttgccaaaataagtgctctattctattcctctcatgctttgaaattccgttaatttgtgcaattcttcaaagttagtgtcacctcatgatctcaatctagatgtttttctctctcaatattatctcaagtctcaccctcttcacttttagggccccaatggggtctactacgttgtggcctactttcattatttcattcgtaaagtcttgtgtgcactgccccaaaggcaatctcattttccgcagaaatgtttgtttcactttcacctcactctctctctctctctct

SEQ ID NO: 14564 - DNA, 7510 bp, Cannabis sativa
  modified_base (6957)..(6958): a, c, t, g, unknown or other
agatcctctattggtatgaaaactagatgaattaaatgaaggatagttatgatgattaaagggaaactcacctcgagaagctctttcttgaaattattgtgattgcaaaggagctaagtttgctacatgcggtcactgagattcaagatttgaatcattgttagcaacaacaagattcacactgagattaatctccttattagtcttttcaattcttgattctgaggctatagaagaagcgcttcaattttagcaactggatattcttctattcaattcttggaagatatgatgaaagtcatattcactttgtaatcttttgaagattgtaacaatgtgatctcaagtagaaagaacctttccaacaaaagccaacagatcgacatgttgctttactttaagaagatatacgttgagggacaaggtgtctttccctgagattctgaagcttatcccattcgagtgagcaagctctcagacatggaggatagaaagccaagatactaacaactgatcctgaacctcccactcctgaaaagctagattaaccacccgagcaacttgatatgcatcattttgatatttcggcagtggagtgacatcttgaatgtacttctacagtcaattgcctcgaattactgccaagatctcttgtttcaagaggaggaaattatgatcattgagcttgatcgatagagtgtgattgaatagactggatgatcctttgcctctcgagctctagttcttgctgtcgcaaaaggaaggtttggtggagttgaaggaaacgtagatggtgttaccaacaccagtgcttgccatattcaccattaattacgaaaatagttttgatacaatgttggaactattcccatgtctcaccatagctaatgaacaatgaataacagaaagggaagaaagatagagaaagagaaagactttgaaagatcaagatagaaagaaaaatcttgttattgaatcaatgaattgagtacaatatttatacaagctctagagagctaacaaactagaaatagaaataatataactgtacaagtgtaacaaactctaaacctatattaactcctaactatcataactaactgttcttacacaactcaacgacttagcacaaaaagagtgttaaggcatggcttatagatctagctcgggtatttttaatgtcactttagaaaaatgttaattacttcctccttttgtataacgtgatttgtaatttaaaatggaaagggataaatattaatttaaacagacatattctatagagataaaattgtttaatcaagattgtttaacatcatttgtacttgattagtttttttttttctttttattcatcttatacatatgggtgcactcttaatgtgtattacccatgaatgagaattatttgaaagatttgagtttctatacttaatttttctatctaataaaagaaatccttcatttttgtattttatatatggttgaggttgttctatctccctcattgaaaacacgactagtgattcagaaaaatgatcaaccaattagttgcctgattcccaaatcgtttgatgacaaaaaaaaactaaaataaaatcagatgaaagagattgcaacaacacagttaaccttaagaatacttatattcatttttctccagcgctcagaatatacatcagtacaaactgttgtagtaagttcattcaaccacttaactttagcactcaactattgtgcaaggtacgtaattgcattattgtaacccccaatttagaaatcacttggatttaaactttaatcatataaactaaatataaacatatatataattttacaaagccggaatcccgatttcaaaagatgattttcacaaacataacgtattctattatatgtcatatggtgactacaaaaatttgacccaaaatgttttaagaccagaaccctccaggctgtattgccgcgataggtacaatcactgccgagctccaaactcactgctcctctgccttagctcttcctttacctacacatggtaacacactggtgagtcaacagactcagtaagatatgcataaaatatactatgtgctaataatgactcataattaggctctcatatgcctaaatacaagttttatcaaatgatcaagaatattcttaactaaggtacgaccactgtaccacatgcactacgtgccgtcactgtactagtgttggtagggtatgaactgtatcccgagtactactaagtattacactgcatgcactacacacctaactgtactagtgtcggtaatactagttggtactcttatgtaacacaagctataccacatgcactcagtaccgcctctgtactagtattgatagtgtatggattaaataattgcatgcatataatacacatacacacatacatatacttactttatgcaaattttacctcgttaccagattcaagcgtgccgggtcgacttgaatagaaaattctcaacctgaacggaggccctgtgtcacattcacataaatgggtaaacaacttgaataaacccttctgggaacctaaagttaaaatcagaggtagccctaatgataaacagcatgaaacgctctaaattttgagataacatgaaaatttgggttttgggcctgccccaactgatagaccgaattccccaaccggtgaaccggttatccagaccctgcctggggggaaacggttaactggttctacaaaaccagttaaccggttctcttacaaaaaatgtaaaaaccctgaaaatcactcaaaacttccccaaactaaaccaaattctccaaaacacttgcaataacatcccataacagtttccaagcaataacagtaagaaacacctcctaaaactgaacatgccattgttgagtcaagtttgagttcttagaactcaaacatgctcaacctcataattattcaataacaacaacccagttaagcataaaacaccaatcctaatatacagaaatcaattctaaccgaaaccctaacaaaacagtaactaaatcaacatttcaagcataacttcaaaacttgggaaaaaaaaatagttctagggctcaccttagtttttctcttccaaagcttcttcttaacccttgaatttcttctagaatcaacaaaggaaaattgaagaaattccttcgttctaggactgcttcataaacgagagaaagctaaagaaatgggattttacacttatcttctaatattttttttctttaatttaattctctttttagataaacttagtttatctctaaatttctaaatgcccgctgtccatactctttaaagccacctatcatcaagcgtaaaattccaattctaccattgtcttaatacctaactcaaagaatggcttaggggtaaaatggtccgataccattaccccgcctaaacccgaaacttgaactcaacctgctattactctcaagaataaaaagattctatgtttgacgaccctccgttgcatttttcatcgccaccgggctagaatcacaaaaattacatattttgcatttgatataaataacatttgtagagttaaataatttctccaaaattaaaaaattataattctaatgcccattctaaaaaatgggacccacatcacgtataatattcacatataatcattaaataacaacaattaatatctatggccctaatccatatctaaatcatacgatcattacaacttttgtaacgtccccgcttcaagcctctattgggcccttacacccactgaatgatgaatcttagacacgagtactctactttggctgcttcatggaatgacaactaaccctacaaaccaacacgagtatttccagcgtgctttgttctcactcgcacacttcttgggaaaacttcctaggaggtcacccatcctgaaattactccaagtcaagcatgcttaacaatagagttctttcgtgatgggctaccgaaaaataataagatggattttgttgatatatgtagtaccaatcaatccatttaagtcctcttcaactatgtagtcccatacctacacagtctcagaatcatcacacatgaccttccccaagcgatgggggattgtacaactcccggtctttccccttcggatcacaggactctgactatgacaaccactaacaaccctttcagccacaaataacttgttattcccaaccactaacaatgatttgatgacgagtcatcaaagaccaaagaagacaaatcaacaacaaaataaaataaaataaaaccatgtcacagtaaaaatgactaatcccagtaacctaaacaaaagatattcaaaactatgttacaagacaggactaaagtagcaaaactgcaagtacaaacccgaccaagccacacctaaatccaaagaaggctggcgggcctggacgaagaaaaaaacaacctccagcaactagttaattacgtcacttcagttagagttgaagctcataataaaaataaataaacaatagaagaaaaaaacatattattaattaaaaagttaaattgattcatctcaatttactttaatcgtactttcaccaccacaaagttcaacatatacatataatagataattttattttatttatgtaattattattaatgtcaataccataatacatctataatcataatttataggggaaaggattaataataattttaaaaatacgatcttttgatagagtattttgagaagcatgtccatctccatattggtaaataaattgtgacgctctaccaagatttttgcaaacatgaacaaattctttcgagaaagaagaattatgatctccattttcattattcatctccttccatgattcgcttatcaaatgcttgatgtgctcacgagcttcgtcttcagaaataccagtatcatgcatgtaacattgaattgatgtaggaacatcgcctcttttcatttcatcctattaaataaatgattactattattataaacattatcattatcaaattttccaaaaataataagagtactatttaatttgtttatcgaatttgacattcatacatccaatctgtattttaataaaacacaagatacgaaatatgagcttacgtaccgaacatgttcctagatcatccgcaagtcgtaatattagggatccatgtcgaacaatattgggataaccctctttaagacattccacttcttcatttgttatgagattggtaaaacagaaataagcatgcataagaaaagctggtcctcctactgaaatccaagcattttcagtatattcttgcaatgttggttggtatccactatagaaccattttgcctcttgcaattgatgtttacatatgtctatccactgcatataattattcacatgaaaaatattagagaaatttgaaaaaatttcagtggtgcctaacaccttctaatatgatatatcgctactaatgcaattaagtatcagatctcatataatttaacatgataacttttcgtgtaatattattaaacaattgtaagacaccacctttaaatagtactggatactattaatacctaatagcaatgctcaaaatatatattttaaaataacatatgaattttatatgtaccaacataccaatttcttgaagtattcaaggttaacaaaaccatgttctcctaatacattaaacaccatttcatttgtgaaattgtataaaatgaggaaagccatcttcatgtaatccggtaactcatctattactttcaaatcccacctgcaaaccaatttaataaattctatttaagttttaaaacaaaaaaattaagtagtaaatgattgtataattaaattaagtaaaatatcattttggatcccatattttgtaaaagttatagattagactctctatttttattaaatgatacaatttagaccccgtgtttttcaaaatagtacaaaattgatcgtgaactcaattttttcgtttttttttagtataaccaacctgaaatcattttctaacatgaatatatagatgtaaaaaatgtaattattcttgtcataacattttcagttcagtttatgtattgttaagtttttatttgacaaaaaattaagctctggatctattttatactattttgaaaaatataaggctcgaatatattatcatttaacaaagcagaaggacccaatcaataatttttataaaatacacagtctaaaataatatttacccttaaattaatagtgtagttaagtataattaattaattaattaggttacctttgaagagcattagcgaaaagttgtagttcctccaaagttgcatatatgtcatgcatatcatcaattattgtgattagaacatagatttgtgtagcaattattctaaagtaactgaattctggctcaaatcttattccaacttgccacatgaaacactccatcaatctatctctaacgaaaggcaatttctctccaagtttagaatgcttccaccacctttatatataattaattacatttatatatatacacacaaatatatgatcaaaaccacttgaaattcaacaatatgcaatctctatattgccatacatatattgtacatattcaataatacaagcaaaatccttagaggctattagtagttgtgcttataataataccgcgctatgaggtgtcatactgttaattattcgtaaagagaaatgttaaaaacttgtgacttataaaaagtaaaaaaattatgactagttatataaattatcatttttatgttgtgactaaatggtttgtaactaaaagtattagtcacaaaaatcataatttgttgtgactaaaactaaataaataacaacttgaattaatatactatgttttagtcacaagtaacttgttgtgaataaaagtcacatttagtcacnnaaaaattatattgtgactaaaagattgttactaaagataatttttattttgtagtgagtagggtgtctagcactctctaaagtattatatcgctattagtgcaattaagtactattagatcctatataatttaatacaataatttttataaaatatcactaactaatcgtaagacaccaaataatgccagtcatggtaccaaatagtaaaactcattcgtaaaacattatttttaggtggtattagacacaatttgctaaatagaaaaaaatccaattaatatagttatatatatataattattacctagagagatatttgagctcttcttgatatgttgattgcacaatgttgaaatccaatttggcaaactcaagcaaagtagaattcatcatcatgtcttgttttttctcatatatttcttcaatgaaccatctagcttctgattttgtgattctccaatgaagtggcatttccaaagcatgatccactaataataatatatccataacattattattattattattattattattataattataatta

SEQ ID NO: 14565 - DNA, 6094 bp, Cannabis sativa
tgcagaatatttaaatatgtttgatgcaaattcagctcctaatgaatcgaggattcaacctcaaaagctgttttcagagcctattaggattattgagaaatatcctgctggtgaagagggtgatttgaagaagaaacatatggtatgtcttaattggctactctctgaaaagccattagacttggaaactgagctcacccttggatttttggatcatcttatgttgggaactcctgcttctcccttgaggaaaatcttgctcgaaagtgggcttggagaggctattgttggaggtggggtagaagatgagctccttcagcctcaatttagtattgggttgaaaggtgtttcagaagataacattcagaaggtagaagaattagtaatcagtacattaaaaaaattagcagaggaaggttttgatacaaatgccgtggaggcatcaatgaatacgattgagttttctcttcgggagaacaacactggatcgtttccccgtggtttgtccctaatgcttcggtccattgtaagctattttatgttttcttacttttctttttttctttgaaatgtctgtgagttgagtttttgtcctttcccgtcaatacctgattcctttgatatgctttggtctttttttatagggtaagtggatatatgacatggatccctttgagcctttgaagtatgagaaacccttaatggcccttaaagccaggatagaaagtgaaggtgccaaagctgttttctctcctcttatagagaaattcattttgaacaatccacaccgagttacaatagaaatgcaggtgagtgacttttcatttgagcacatgagtttgtatataggtgatgtattgaattgggacattggtttctaacaagagaatttatctatcagcctgatccaaagaaagcttctcttgaggaagcagctgagaaagaagcattggataaagttaaagccagcatgactgaagaagatcttgctgaactagcacgcgctacacaagaattgcggcttaagcaggaaactcctgatccaccggaagctttgagagctgttcctagcctttctcttcaggacattcccaaagaacctatacatgttcccacagaggtcatcatcctaacattgtgtttttctccttttgatttctccttttgggtttgatagtcctaagtacttttttcttacatgtagatgggagatattaatggagtaaaggttttgaagcatgaccttttcaccaatgatgtcctctatgcagaagttgttttcaacatgagctcactgaagcaagagcttcttcctcttgtacctcttttttggtaaggtgtcttcaatataattattccttgatgtatgtttattttagttcctaagagggcatagcaacgatctcaaacaaaattgaatattatatcaatgttcataggagggaatgatacatttggctagaatttaagctcagtgattttatttaaacttggattgatatatctatgtggccagctgaatgctattttttaagtatttgggaggattatagatcttaattgtgagaattttaaattgcctatatgatcactttggcagtgttttaacagtttataattagtcaagaaatgcttagtgtcataaattaaacataattgcaactgtccttttattttctttgccccctgtgaacaaactgcttcctgtacaatgtttcacaaggaaatgctttctgtttctgttagctaaaaattactgtgtaggatgctcccagtgtaagtaataataagtaaatgacagagcagctattgttgattactctttgaaaaaagctgaggaatgagccctttgaaggagcagataacatcagtcttctaaaagtaggtctggagtttctattgcacgttttcttgtagatcatgatctcatattcaagaaatcagacatagggtcctagtctaataaaaatagttgtatacgtaaagcagtgatagtaacaattactattaattatctctgtgaaatattttaaatttgtttcaagcagcttcagggtcttaattatacatgagcttaataggttccttctctgactatgttcttgacagtcaatcattgctggagatgggtacaaaagatttatcttttgtgcagcttaatcagttgattgggaggaaaactggaggcatatcagtttatccactaacatcatctgttcgtggcaaggaggatcctagtaggaatataattgttcgaggcaaagccatggcaggacgtgctgaagatctattcaacctggtatttaacaattttcttgccaatacgcatgtatatttagggaatcatctggaaaaagaaagttggaaatcatcccattgacatttcaaatgtcttctttttaagatgttctcttaactcatccaaggctttgactgagctgaagaatgtgtggaacacatagcttggttgaaggttgttatttgcactatataatgccatatgttataattttgtaggttaactgtgttcttcaagaagttcagttcactgaccagcagcggtttaaacaatttgtttcccaaagcaaagcaagaatggaggtatatatgactttaagtagtgaaaaatggaactggagtagatcccaacctctcactacttgatctcactatgtcttcttttttattttctgccagaaccgtttaagaggcagtggacacgggatcgcagctgctaggatggacgcaaagttaaatgttgcagggtgggtttctgaacaaatgggtggcgtcaggttagtctcgaactcaatcaagtatcaatttattcttctttggccaactcacggcctagcatgtccattgatcagtattctgaagtatttagttcaccaagttgggagttgcccttacttgtagtatttagcaatgatattgctgatgtgaggcttggactgtcacttttttcatcagctgatacccaacctagcttcttcttcatctaattactcaagaaagttggaaattagtcttcagattgttcttttaacattgcttataacctgttcccccttcaaagatgtaacattagctgtagttcttttagttccatatttagttcaatgccattctttacattgttatttgacaagtggttgttcttttggtttatcatacttatgctttggtatgagaggttggtgtactttcttaacttgaatacttaaagaacatttttgtcttcttatagttacttggagttcttgcaaactctcgaagaaaaagttgatcaagattgggagggaatttcttcatctcttgaggagatacgcaaaagcttactatctcgtaatggctgcttaataaatatgaccggagaggggaaaaacctcaccaactcagaaaaatatgttagcaaatttcttgatttgcttcccaccagctctccttatggaacaacgacttggaatgcacgattgtcatctggaaacgaggccattgtgatacctacgcaggtgcagatgctattattttcttcttgtacctgtttcttctttttccttttaatctagattaattgaattttaaacttgtttttttataggttaattatgttgggaaagcagccaacatatacgagacaggttatcagctcagtgggagtgcatacgttatttcaaaatatatcggtaatacatggttgtgggatcgcgttagagttagtgggggtgcttatggtggtttttgtgactttgatactcactcaggtattacttcatgctgttactatgttgatatggaactcttaaatgttaattcagaatcttactctgaactttcttcatgtaggagtattttctttcttatcttaccgtgacccaaatctattaaagactcttgatgtttatgatggaactgcggagtttctacgccaactagaaatggatgatgatactctcacaaaggccattattggaaccataggagatgtggattcataccagctcccagatgccaaaggttatagtaggtaagtcgacaacaattttcttctctctgcagaaatttctatatatttatcatgtttggtagagtttgtcagatcagtgtaattagaaacttaatattctttatgcaatttctgttcttcttacctcatttatgagttattcacttcacttgtttccttttcccttagtttattgcgccatttgttgggagtcacagatgaagagaggcaattgagacgtgaacagatattgtcaaccaggtaacaaagtttattatgattgatgcttttgcctgataaatgctctctaaacctgattccgatttcaagcctacgtatgttgatatttcgaacatagaactaggaagccaatgttgattgatgacaatagtttaattttttaccattattttgatataacttgttaaaagtagttatgtatactatttatgatctgttctttataatgtctgagcaacctttgtcaagtatgtaccgttcaatttatcgctgagttttcgatgaatctctgcagtgtgaaggactttaaagaatttgccgatgcaatcgaatcggtcaaggataaaggaactgtggttgcagttgcctcttcagatgatgtcgatgcggctaacaaggagcgcaataatttcttccaaataaagaaagccctttgagatgagattcttcaaaattctgcataaaggggagcacttgcttttacactattttccattccttttctactcatttttctctgaccttatttataaaattaaaaaaagcacatagataaacatataaagcacaagtgtttaccaaatcagggtgctctttgtatcttgtcttttattatattttttcttaaaaaaaaaactcaaaacatatcatggttgcaaaactggtgctgtcactacttaggttcgacatcttttggtccagcgacggagctgggggccggagggtgtcatggccccccaaatattttaaatattttgtaaaattatatgttaaacctaatttaaaaaataaaataaaataattttatataactttacatgtattggctccttgctgaatttcgattgttttggtccttcgctcgaaagcttaaaagtagtctaagacataagaaatgaaataggcccttgcatggactttttttctgttaacataccaatatagcatcatccttgttcaccaattaagacacaggtgaagtccttgaataaatatactaaaaaaaaattgttatttctttccagtgttaattcaatctgtaccattttgttgatattgtatttaattggctcttaatgtgagttttataaattatattggatctagtttgatttgtacaacagtaaaattcaatctgcaagactgtaaagtgaatgagttatttttttttaatgaatataaaaaataaataaaatttaaataggggaatacttttttttaaaatttttgttcaaatttacactttgtgtttctaaagtgtttgtagcgctagttgcaataggtgtttctatataattttttgatacaatttaagttgcagcgctagttgtaataagagtttttatgtagaattttgtaaaaatacaaaaaaaaattgttttaaattgtaaaaatgaaaaaattccatttaaatattcaataaaaaaattaagttaaaaattctttctaaatcattgaaattttaagactaaaggaatcttgaaaagttccgaaacacaatttagtatttgttaaaatttgggagaaaaaaaatttaattagccataattaatttcatattattttgtttaggaaaatggactcttaattttttattttcttacaaaatattcttttatctcactcgtatattttactacttcagcgcattgctctatttgtatttaataaaagaaataaatttgttgaccaagtcaacagccttatgagtgttgggtttaaacaaatgaaaacagtgagtttctcccatggtttcctttccaccatctccacactgccaccccacccactcttacccaactcttccacgtaacgtttcccagcttcgtacaaatgatccttctc

SEQ ID NO: 14566 - DNA, 16079 bp, Cannabis sativa
  modified_base (15741)..(15741): a, c, t, g, unknown or other
gaaaaataaaacaatattagagcgaatcatacctatcctggaaatgaatgaggatgatatttagaacctgttctgcaacagggagcaataaggtaatcaactgatctctgttgccaacgacctgacacatttccaccattgcaacatacctcctgccaaaatggggagagaagagaaagaaaaaaaaagcatcacaaacattttctagcaacgaagacacatgtaagaaggaaaaactactgaggacttgtttgtttacaaagaaccaatgtctagaagaaactggttgacattaaacaatggaacaaaccgcaatcgagatagcaattaattctacagccaacaaagtgaatcattctatgattgcaacacctcctagcatagcagtcaaaacgtcacaagttgcacaaagcaataagcatacacacactttttaaaattgaaattttttgctcaatggcatataagtaaatcaatgaatcttgaggtatggcttcagctaggagttagttccctagattgcgtcagttttgactgggcacaggtcattttaatatgtacacacatgtctgggaaaaatatcaagtgttttgtgttgctttttcatcagattatgtaaaatagttcggtgggaaatatatcttccactgaatcatatacttgtttaattaaacctaagaaaaatagaaggataagggaagatggtaggatgagatacaagcaggagtgagctaaaactattctacaaggagaacgtaaagcttgaacctcttttggttatgaaccagaacagtttaataaggccataacaaatacagccaaaagaaagcaaatacaagaagtgatgaaaaaaaaataccttttctgtatattgtcagatgaggaaacacaatcttgccgagcacacatagtgagaatttcatccacctcttgtcttgatagctcattaatgtctcgaatctgaaaatcatgagcattttactagtaaatgaccaggtagaaaaaagagatttaaacaaacaaacctaaaatcaaaatttaccctgttcagtaatagtgatttttcctctccagctctttcaagagcaactgtcacagaattgagaagagaaccaagtaaaattaatgtaggctgttgaatttgaactgaagtatggtaatcagatacatcattcgaaatctgcagtaaggcaaagatttgattggagaagttaattatgagtggaataacaggtatactaacaagtgcaaacaaggttaaatatgccttacctcaaagaaagaaaacagaaaagaataaatatacctgtaatctcaaggattttttcctgatgagaaaatatagatatgagctcaggctgaagcacaaccgaaatctgtttaattctgttttcctctgattctggtttttgacatcaatgaaagaaaataattagaacaatattctttttcttaaagaaataaaaaataaatatatcttgaagaatcaccatacctccagagatcgaactgattgaccataagtaggagcctcacaagagaataaggcatgcatcataccgaaaagcccttgaacaaaaccacaatcgtcactctcttcgtagggccaaacctaaatcaaaaataagaagattttgtgtttatatttatgtaaaaagagaatgaaaaacaagaatacgccatcttaaatattgaaaagcacaagtaaatataaaaactaaaataagtaccaacaccagttatttatccaatcaatacaaaagggggtagagctaaattggaccctatatatttcaataaaattatgcaaaaatcacaagttctataactattctgcccgtcaatgttgcagttgtacgcatcaagaccttccaaatgtcattggataagccaaacaatgcagctgagcttaacctaaccatataacagcataaagtattgtagctaaataaagggaagaaggcctaaacacacagcttttatctcggtgcttctttcttttttgactttcgaagattagagaaaagagtcataccttgctaagtataccaacaacaagattgatctgctccattgttaattcctctgcttcagaaatgtcttcccgaagaactttatcaaaaaatgatagatgccctttgatgaagtctatgacttcacgaacaattttgttctttatctattaggaaattgaactgtagttaggtaaaatccatcaactaataatggcaaaatgaaaggtaataaccatagttgtgggtcaacaataatgaatttaacagggaatatctactataactttgatgtaatgctaatccagagattaatatcagttattaaagagagctaactggtgaaattcaaatttttttgtcaatcaagggcatgtgatctctaattgagaatcattcacaagagaaccacaaattcataaatattcaaggacaaattgagccaggttctaaaggtaaagcattaacttgtctaatggaaaaccaatccaacgtctgatgcaaactaagattgtacttagacaggactaagatacacatgaaggctgacctcaagaaattcagatgtatcaatcaacgatgttagagaaaatgctaatctcagcacaggagttatgatcattcgttgcttatcaaaatccgaagccacatcccttctcagcttcgtgtcgacccgcctcatacttccctggtggttagtttaaagtcagaaaaagatacaatgcaagcaatatgtatgaaataaatgagctgatctttttttaccagaaaactgacagccttgcatgaagcaatatgttccagagcacccatggagaaaagaacctgagctccagacttcccatatttgtggctgattctcaagattaaagcaagttcaccctctatggtacaggctcgctgcaatgaattcaggaaattcccaccatcctaaaaatgaatgcaagagattatgcaagctgctatgtatcaaataaaaagtacagtgaaaaaaataaacaagtagaacatctcaaagccatcacttgtttccttcctaaagaggagtccacctaagcttgccgggttattttagttggattatcaattgtagagtagcttagattatttgcaagttctaatagcagaaattaatatttaatttatcataaaaaatttgtttctccacaatttattcaggatgatacagaaaccaatcttatagtaggcaggaaccatgcttctcttttaactagaaaaagaaaactgaggatgagaaaacaaatcatagctagtgaagcttggcaaataattttgtatcaaatgtcaggaaacaaataataataataataattaacaaaggccgcataatcttatgaaacaaagtaagaatctaagagttagcaaaattcacttgagaccttgacatcataagagtataaattatgcagctacgtaaaatagttttccagaagtagcagctatttaaagtcaacaggaggagcacctgaaatgaagcactgctgatgcttaataagcaagaccttagaaaacccctgctctgaagttggcttaagaaaaatctatcatgatccacacaaatgaacgcatccaaaacataaagtgcaatggtctttccaggttcaccaccctgtgttgcatcctttattacctgaagattcattatgaagttatgagtaagctactaatgcaatttctaagaaacaaataaaaagatagactcagagaactttcaatatccaaaaccagctgcttaaatttcattaagatgaaggattgaatgtacaacagaagcagagctagcacaaagttatagtggcaacaaaatatagagcatgtacttttgtgaggacaaaataaaaatataatcaggatattattgaaaaataagaagaaaattgtggaggccaaaataaagatcacttctattttgcatattaactataaataagaaaaaattagggggggccaggcccacttggctccgtctctggtcataaaagcacttagagtcccccaaacgtagaacccatctttcaataactctatacagataggctagacaaactacacgtattatctctggaagtcaaactgcctgagaaaataacccttcatgttgattatagaatcaagtggagaggctatcaactcacgtttgtaaagaaagcatgacaagtgtgagattgaaaattgtagtaaaaaatgagaacaggaacatttcacccaccaaatccaagagtggttgagcctctttccttaaaatagaaaagtttgcatgggaaagttctgcttgttccttgttgatctagtaaaagaaaaatgataatttttaattagcaattgtacttcaccattactgccaacaatagtatttaagtttgcattaaaattatagagctagaaccttgtggagatctagatcatcaccatcttgctcatcaagtagtaagtactgaagaactgccttggggacatctggatcaagaatatgctgacaatactgaaaataactaagtagcagtgcatattggctgaaacaaaaagaatattgaaggtcagaatatgacaagaaaagttcacagaataaacaatctctttattgccaatataagcttaagcattaaacccaaaaactagcaaaaccaacccacgccaataacattaaacaaacagtaccgtctgcgtaaggcttctgatgattcatgcctaagaattgccaatataagcttaaacaatattgagtgacaagcaccattggataactgtttcaccatgagaacatcaagatacgctgcactatctgagttaaaaccagtagggcataaaaacctgtcatctcgaagtttggccatgcatgtcaaagcaacctaaaatgttaaagctagaatgtcaacagggtaaagtaaaaacctgctgaattgcagaaacattaatagtaagcatataattatgttcatataaatatatatagatacatataaatacctggcacaatataaatgccattttcaatgaacagtcgggagaagcagacgcggtaagagaggcatcaagaaccctggtatttagaatattaaacatacatatttttagtattatttaaaaaattcaatgaaagaaagaaaataaaggacctacagataaagaacttcagattgattttcaagtaacgatgtcctcctggaagcagagacctacatgagaagataatatgtcaaagtgaattacttcaagcctgatcttggaagcttctaaactaatgtaacctaatttttttttaaaaaaaaatggacctcaacaatctgtgaccagccagttagcatatgaagttgtgcagcttgttcctcaaggttcttattatacgtccagccccatctcagcaactgttgtattgtatctttaacattgttgacctcaagttcactcccaaagttactcaattggggattagtagaactaaatttctgtgaaagagagagaaaaaaaaaagatgtgaaccacagtttacagtgcagtaccaaagggggaaaataaatatatatggcacttgaaaaccaacctgccaaagtttgtcacgaaatgaagatagatcaatcagacgatcgccacgctccgaataatagtagacaccaccctttcctgaaattgtaggattgccaagtatgtcctcaacctataccaaaatggatcagaaacttaagtaattgagaaacatggaccaattttcaacaggctgaaaatcccaacaccaacccacttccctctcagggccaacaaataaataaagtagcaacttttagaataggttcataagaattaaactgttaccagcaaatcatatttcaaagtcgaaataatctgagaaagcttcactgtcgtgtctggagacctaaattgaactacttcaagcaactccaagacctaaattagatccagaaacaaagtcaactatcttaattgatagcaagaagagcattaactttatctagcagttaaataaagaagaatagagttaagaaaataatattaatagcaagtaagacgataacagcaaggtttacaacttctgaagaatggagagtaaataaattgctttgagatgtgcaaatctactattgtttctcaagcaattaggtataccttactcttactaatagttctagttccagcatgctctgcagtaatttggagtgagagggaatgttgtatgacttgatcagtttccgttccaataatttcccgtccaaaaaggtgaccaacaatactttgacaagtgtcccgatgtgaggaactactcatatcaccagcatgtaattcaattgctaagagtttcaacagccaagctctctgaaattgtaagcaaaagaataatcgactgagttaaatccgatcaatacatgcttaaaactattaatcatctgaagtgaaatctagacaataacatttatcacctctaattaatgttcaatatgtcctgtttgtatctctctctaattaatgaaaataaataacaaataaacaagaataagaatttttgcattgtttaaggtgaccattgatgatatcatataaatagttgcatcagaagtcaatggaatggtttacaaaaataagatttgatgtaacaaaaatgtggcaaaacaatgactcaaccctccttgtgctagtcatgttatataacgcccatgtaactgtgtaaatctcagtcataaatacaagtggtctggaagaaaactattttaattaaacatatcagaaacctgatgaagagaactgatacgaagagcttgattgctactccgtttagggagtggaataaccccaatagtgtctaggtgctgccataatagaaaacaattgcagagaaactaattagaaaaggtctgaaactttcttgtcttaaaagagtagaaatttatcagaaaaagactagagacaagtacacaacttttcacctttacgaaaaattgatacttttttgtactcaacaagtccatgatgggaccacatgttagtggatccaagcataactcatatagtagctgcagaagaaatgataaaatatttattaagcacaagtggtaaaatcctccagagagagaaaagcagaaggaaaaatcaaaaagaaaaacattactttcagctagaattttctttttctttttttcttattgcaaataagtttttatagctaaaatttgctttacaaaaaaatacagtacacaagatagtgtttctttctaacctgaaagccaaattcatagagcaatgcattcacatcaggcttcaagagcttctctaatatttcaagaataatctttaagcaactggaaatggacagatgattcacaaatgaatacagaaaatgaagaaattacgaattaacacactaaaacagcttgtagaaaacttaacctgtaatgaaactttggctgcaaaatagtacgttcaatattgctatcaagatcaaacttgaggagcatatgagtaacatttggagctggacgactaatattgtctatcataagctgtgggattgttaataaagatgtacattagaaaaacattaacatcagatggaagaaaagaaatgtaattccaaataataacctgcaatataagcacccctggatcatcaccactgttctcaatgaactgagactcttctgatcgtaactcaaggcaagctgcataatcctcgatcaagcaacttgcagcactggatttaagcagtatcgatacaagcccagccatgcgtgagctgtcaacattttatagcatttgagttttatgcgcaaacaagaaaaaaaatagatataatgacaatatttggagaggaaattcttgtactgggatttgattagtttcataatgcctcatccagcttactgttctttgtttaataacaatgggctttcattcttgaaaaagcgatgggcttttgtccttaaaataaacaatgggctttcatggatatttaatttctttaaatctaaataatgtaaatagcggaacaaggtcagaactgctgttaaacttcatcgacaggttccattctgatcctttcattcctaaggatatttggctagaaaagtataggatgctcactgggaataagtgaattcaaaaaagaaaagcactgccttgttaaagaagaaaatgtaaggatgtggaaaaacaaagacaaagaacaaaaaaatattataaaataataaaataacaagaacaaaaagaaaaacatcaacatcaacatcaacaaaaacaaagaaatattataacataatattccactctcttaattaattcaaaatggatgagtgttagaataaaaaatttctgaaaaaagaaatgttttttttttgtaattacccctttgaaatagtttttctttctgccttttcttttttaatatcttctgcatcttatagaaaaaaaaaatatgtgcattagcacaaataaaatgtcgaacattttaagtcacaagatattgatggcataaagcttcccatgagaaaccaattaacaaacaacaggctggggaaaaaggaagtaccttagtatactcatgattttgatagagcattgctgaatttgtggccgaaaatcatatctgacatactccaaaagagctacaatttggttatgatcttgggaaagtataacatccaaaggctgcataaataaatgaaacaaataaataatgtataaaatgagaccgaaccatgagcacaactatattaagaagctctttataacttataaggaaacaagaaatatacacattaaaaaaactgacttctcagtctcattggcactctaactaaatactataattggaagttatattaaaagatacaaaagattaccaactattatggtccataccgctaacagcttaacaaattaatattccaataaaaaattggcaagaagatccaaattatgatgaactagctccttattctttcccttttccttttttttttttgttacgtttgaactagtaataaaatagctctttgttgaaaataataatccatgctggaatataagtgcctctaagaaaacattcaggttcaaaatctatgctagctcttcagaagttcagtaattaattttttatagataagagttatacgtgtaatgctgtagatagagttcagtaattaactttttaaagagtttcactaatcagataatgttaataaattgaagctatggtttgcttccattgaattatactgttcactcctttttctgttaagttggggtttcctccatcaatgactataaagaatcaacatttccattactccttgccatttcacttcccaaagttgatacccttactcatttttcacaagctttagtccctaagaaacgatgcatttctaactttccaagttgatctaggctctttaggtaactaaatcttaagagcataaaacaaaatatatgaattaaacaaccataacaattctcaatggaaaacaaaaatcccagaaatcagtcaacaccacaacaaaatgccatggacaaaacgattatcgacataacagtaagattattcaaagcatagtataacaattggcaattactacctggtataaaggtcgccaaaaatcagaaagaagtgaatccttctccaaaacaaggattataatttccaaagaaaattgtacagccttctctaaaagttgtccatatatttgacttgttcgttcggtaataatggtattgacaccttgcagaagaattcccatgatattccgaaaaactgcttttccactcatgaaatcctgcaacatatgaacgtaaattatatgaagtttttgtctataaactgtacgtgaacgtaaattatatgaagtttttatctataaactgtatatatatagaaaaattatcgggtagtgattgcttaatcaatatttgtaggtacttttaatattttcagtacatagctaagttgcaaaatatcttcttttacaagacggtatataatgtagttgaagactttaagaaaagaaacggttacatcaaaacattgccaatctctacatagatcagacaaaggcacattcttgaaatctttctcattgaagagccaaatcgctacccaacatctcactctattccaagtctcttttgcaatattttcaaacgcctcagttagccctagatattacttaatactcatcactattttcacaaactactatttcaaacttcaaaagaaacatgtaatgtgtatttatgctggtcttaagttatcggatgtccccaaagggactatgccgatcttatattatgatactatgaaaacatgagaaactactcatggtttaagtgacttcaaaatgctcctctgccataaagttgcaagaaagttgcttagttcatctaggaaaacgaatcttggggttaaaatcaggtctaaaataacacaacatttactaatttacagtaattaaactgtattatgaaatacaagtttactattgaaaaaaaatatatatatagcaataaaaaactatggccaaatagtttctcaaaaaaggaatatagaacctccacctactgattatgtattatctacgtttagatttttgtcatcaccatttactgctccatattgctttaataaatataaaacatactgatcaatcactaaactagaccttggaaaattatgtaatttagaatgttttaaaaactgataatctagtgttcacagtgctaaatatatatatgttatccaaacaagaatagacacctacttttagcaactctagcacaggaagttgcatctggagagaagattgttgtgtttctgttgaaagctgtgtgcgatcaatgacactatcaatatcctcttcagtgatgtcatacttgctcagtatcctgcataaaactgtatgaatatgcgagtttctctactttttgtttagttaataaaataacaatttttagcatttacagataaagtacccacataatatgtaggtccagatattaactcacatatgaaaatgctgaaggcaagaaacaaccagctgccatttctcacaaggatctgcataagctctttgaggaaatggcccgaagacatgatcgtatataaacctgaaaatgccaataaatctgcaaaagcaatgaagcatagcaacaacagggtgatcatactgaggaagaagttccaaggaaagattaaatacgtggatggtcagtacctacgccctctgtcgctgacatctctttcttcagcaataagttcatttaataggttaaggaaagatatagttgagggatattgttctctccttgcttctatttcattcagctcaaattgcatatcatacacctgatgaagatcacaacgatagttaacatatttatctttttttacatgtataattagagtttaagttttattaaggttcttgaaattggagctcttgtgatttagactttgttacttaaattcctttgggttctgtttggttttatatcgatatgatagtcgtgttcaaattttttgctaaaaacttgctgctgccatacaagttagaacagattgatagaatagactatagagaactagaaattaggctaaacagggatgagaatggagctagaaaataaatgatagatctgatatttgctattagatgatgaaatgatgaaagtgatagatactgggtattcgagaggcccagaaactctcccaagagctactgctcaattaaccaaataattctctgctcctccccttcactactcacttgtatatagtaccagtacctctacaattactcatttaccctctttatttattatccttaggcctgacattttccatttaaaataaaaacactcagttttctcccctccccaaatttctcagttatctactcatcccctcttcttttctactttgctttacgtcagcacctgtaaatggcatgattttacagcactacaacataaatattatacacatttaacacattcaaagtttatcccatgcaatacagaagtactaagtcccagatccctttaacttgcataaaaagccggccaaacattcaaatcagtcactatatagtacatcacagttttgcagaggaatgcaaaaatgcttcgctatctgcttaatgcaactctacatatccaatccatgacagttatacctctttacttcaactattggtaatggacataacaggctcttcctaaattggtaatgacaataataataaaaaaaaattaaaaaaaaagactctaaaaaccatataattatagcaactatgttgtaaatagtcatcaattttttcggcatacaaaggtcaattttagtctcttaaggcctttctgcatatccaaagaaataataatccaacaaaaccttgagagggaatcactatttcacaaagattacttgccaactcaaattgtaaaatttcaatgtattaaattatgaattatcttccatttatgacaacttaaggtccaaatcaatgttaaagaaccgtggaagaatgtgttcgagaaatacaaaaagtacttgcactagaaacattgctaaacaacagaaaggacagtacaataactatgaaatatggagaaaaaggcaattaaattaatacagccgtctttcatttcatatccatattttaaccattaataaaaagaaggttctctaaccaagcaaataataagcaagaaatgattcctgacatcaagattaatataacctaccaatagtatagcttataactacacagactcagaaacaacacaaaaaaactaacctgtgtagccatgggctgtgcaccgttcccaacatgagaaccaacaaccacaggtagatcatattgctcaagatagctccatattgtatccttcaaaactggagagacatgaataaaagttgctattgcattccgcagagcaccctgtgcaagaaccatacttgatcaacaccaatacaaaaatacaatcgattaacctccaacaagatgttacactaaagagggaagcaacatcagaacacgtcaatgaaccttcagataaggcggcacattctcatagcccagaagcttgaacaatggctcaatgtcgaggaaccagttctttctctcaattggatttccattttgtacaacctgtagataattggtagaacaatactcatcaaattatttttcttttttcttgatggtgaacaaaagaaataataactttttccaatgaaaatactcaattaacaggtatggattttcaagaaagcaaaagacaaaaagacgcaatcatcaaatgttccggcgaaaagaaaggttgggttggggagaggacatggatctactttagatcatggatccagaatttctaaactaacacacatacttgaatgtttgagaatacacagcaattctactaattctgaaaactcacacattggtttgccccagatcatggatccagaattttttaactcacatacatgaatgcttcggggaagaaaaaaaaaatccacaaattttagaagagaatgaaaaactaggttgatatacaaaggaacaagaaaattgcaaaaaaaataccaacacaatactagtaaccaagccatttagcataatacaaacatagaagcaacatgttctcccaccactgaaagaataatgatatcatgtgtctgtgttcaaagatatccttggcagaaaaatatccatgcacatattatttccaaaagctgaaagggtaaaataattaaaatgaaataactcaaaaccttttgaagaacattcaaataagcaacaagtgcttttgcgtccccctccggtaactctggtaacatggctccagcagtttggagggactgtttaaacttgtcatcatagattgataagcaatcaaacaatgtactccacccaacagagcggaatgctttacccttaagtaactcataaacctttgaggcaccttcttgactggaagcctgaaaaagaaccagaaagtatgaaagtgcttcgaaaaatactttttgtgaagtcagagcttcattttataaaatttaaacagtgaagaaatgcacttcataccaaggtactcagcatgttcaagaaagccacaagtgtttggaaatttgtatgatcttccccagaaaaattcacaaatgtccacaatacatcattaccagtcaacagctctggttccctctgataaaaaaaatcagtaaatataataataaaaataaggccatcataaataagcagtgtgacaagttaaacagcattaagcgcaaataagcattaagcatataaaatgatgtgtgacaaacaaaacagcatcaagcacaaatgcatctattgatacgaataatttcatcgagaaagaaaatgaacaagaaaacagatgctccatgataatgaacagccattagcataggtatttaagcacataattaacattggaccatttagtaaagacacgcaaaactagaaaagataacatcaacgacttcataagtttctgaacaaaccgaaaacttatgacataaccaacttcacctgacatggagatggtccgtattcaaatatgccaaaaaaacaagtggagtttcatgatgttctggttcaaactaacctgataaacctcactcacaaattccaatagcgaaacaaatggaagagaactttcagtgacttgtgaagaagttgagttgctgtcatgcataaaatcatgtgctacagacgaacggtatggactcagaatgctcatagccttttcctttgattctttcacctgcaaagtttaaaaaagaatgcacacaaaacataatgttgatctgtggtaaaagaaggcacctacttgcttctatcaatttctttctccaaagcccaacaacacccaacttaatatataaactaacctttatccagcatagcccacttaaattccaaatttccttttattttccactttcaaaataaaaattgtagcatactagtgtaacatagaatactatttcaaaattttagattttcttcttttcattctactattaaaaaaaaatgccactggtgttacaacaaaaaattccatgcttcctcactactagtgatgataagagaagccacaaaacaatttaaattaatgaacattctgttcttcataacccaatttaaacgattgcaatttgaattgacttcaacacagacaaaacttcactgaacaacatcaagggtcaagtatcaaatttccctaaatgccgtataataacagaaaccaactgaccttgtccctagctagagagtgagacaggaagcaggtcagcaacttgtgcagataagcgttgtacatataaatcatatcctcatcgtcattctgtacaatttataaaaccaaaaaggctgccttaaaatttaccctataggggacaattagaaatcataaattaaaaaaaggactacaacaaactatttgtgtaaacagaacaaaaaagatatgtaataaaagatatataaatatgtaatataataacatgaaaccgaaattgaacagaaaaactaagtgagcattgctataaggcactgtaggcgtagggtgctcaacacctaagacataacatatttccattggtgcaatttagtagcagacctcacttatcttaattaaaattactttaaattcaaatatcctaaacacaagaaaacaaatatanaaaaaaaaaaaaaaaaagaccatcaaatgctttcaagtttcaacacgattctaatcccaccttctcaaccttaatttttatgtgagacataaacctttataaagaaattcctacataagtttcaaagagcttaagggaatgttgttcactatcatagtaacattaaccacttagagttccgtactttttcttatgaccatacactaacaaaccagccccaaatggaatctctaaaatccaatacaatatttgctcatttcactatgaccaaacaacctgctaaacacaatataacatctttatcttaaaagcatagaattacataatgctacctccct

SEQ ID NO: 14567 - DNA, 3251 bp, Cannabis sativa
cattttaaaatagagagaaagactattttaaggcaagatgagaaaaaagtaaataattcttttatcatatcttttatacgttttaatttaattcaattgcattcccatttctattttcaacctcattcctattatattttcatttcttctaaccaaatgctatctcagtcaaacaaagcacaataacttcgttagtaagttttaacttgccaatagagagtttcaattcctacgttgcaataatagtattaaacaaaagacagtatcctaatttgacatggcaagaaagggaacagtcaaattttctgtaagaaatgcacaaagatcatcaattataaggagataacatggtagtatggtaccttaattaagttctgcaagtgcaatgaacgaccagggaggagtggcaattttccctccttgacatttagacgtcctgattctggcaaagatgaccctcttattaactccaacatacaaattcccaaagagaagatatcaaccttctcaagatgatcatatctctcgtttaagacttcttgaggcatataacgtgcatcaccctcctcaattgggaggctcttatcaataagtgttgcgcacccaaaatcaccaagcttatatactccattcttgacatatatattatcaggctttacatctagatgaactattcctctctcgtgaataaactgcaaagcctttgcaatctgtatagttttacatatatcagaaatgatacagaataacataattttttctcaaatcaactgcaacagtgggtgccaaattaatatataaacctgatgcacggcctccaaaacttctgtctccgataacagttggtgagatccattgatggataagctgcaatcacagagctccatttgtatgtaaagctgctcattttcaaaccaagaagagtagtatccaacaatgttttcatgagaccctgcagagtaaaagaagtttaaacaccaaacaaaatgtgatatccactgcatcaaacatgcaccatatgacaagcagagaagcaaatgtaagacgaacctaaagctcccaaacattgaacttccattaaagctttcctcctacaagagtgcaaaagtgattctattagcaattagcagattcttaacctaatgactgatagatacatccaagaacatacaaaacaacctttcactgtcctgatgcagttgctttatgctatgtttcacagcatacagacagccatcaattctctttaagactttgagtacacgactgaagttcccactaccaatgaactggaagaaaagagaaattttgctgattaaccaacataagataatcacagaaatttaacaaaagaactgagtcagctaaagtctataaattagtggagatagggtagatacctcaatctcatggaaatcagtgtgataacgtgaaagaccatttcccccaatagttgcagcaaataaatctgcttaaatcaaggataatgttattgaaacaacaatatattaactgaacattcaacagcaacaaaacttcacatcctttgaggaaataaaataaaggtctctaccagattgtttatagtgacaaagtagcctgaaagatattattaacagctttacctgcacactttgatctttggttgccaaaaggatccatgcccattcctgaagcagcttttatgtatggattttttatacaaggagggggcataacccggcaccgtaaagcaactgcagattgggatacgtagctttgaaccctctttgttccagatgctgtaatattttccatctttacttcgtctacatcacaatcatcattttcaaattccaccatctcttgaatgtcggacaaggtgggactgagtggatttaatgaaaaatcatctgtagaaatttttggtagtcttagtcttagtcacacaaataataaggaagagcatacacggttataacaatggtcttagccatttcacaaattatactaccaggaaaaaaaaaatcatcttttcttctaggactaaagaaaaagatacaatttttcatctcgtctgctttagtcagttgcaaaaagtttaaacaaacaaacaaacaaacagaaaatatgaattacgtcttgcgcatgttaactaaaaaaaatgttgaagcaaaattagataaatgaaagttcgaattgtgccggtatgtcatatgataacttgcttaggctaacaaggtcattccttcagaattcagatcatcttacactagatggtattaatcacaaaaattaaagtaaaacataagttccataatcaaaaaacttgtcacgaaacttaattgggcaactgtattaccttgccgacgcctcttactttttattgtattcagcttttccggtgatttggggcacggcatgctttcctgtagaaacatacatacagatatttaatatctataagaaagtagagcaaactcaatgcattaaatctcacattaagcttcagcatttctacattacctcgttgctactaaagctcttcaataagttttgattatctggagtgatataatcaggagtgctggaagatgtttcaaaagaaaaaaaaaaattgaaaaaaaacgaaaacccaggcaacaaaatggagaaattacacagatatcctaacgttcaatgccaccattaaaacaaaaattagcatctaaaaaaagtagttcaaactcccaaatatgaaccttgagtgagaatcagatttatattaccagaagaagtcttggcttagaataaaatctttgtcatccacagtgttatctaggtctgtatttcgaggcgatgagaagggaagctgctgccgctccggtatagcttcagattcgagaatagtctgaaaatgagacggtttggtcattgatgatgatgatgatgatgatgattggcagtttggccctagctgaacctgcaagtgcctcaccaaagtccctttcattttgctccttaactctttcttcttcttcttcctgctgctgctctttaggtttacagttttccctctcatcaactctctctctctctcgctctctacaaatctgaaatagtactacggagaaagaaaataaaattaaatatattgggaatttcgggaaagaggaacatttcaaaatgcgcgggatatttcaggaagagctacaatcaggtgtgactcgatctatggtagatataactatttggactattaatgcttaggtggctatggatgtttaaatcat

SEQ ID NO: 14568 - DNA, 5208 bp, Cannabis sativa
ttcttagttttcgaatcattattttcaaaaactctccaaatattctcagtattaagattaccaactaatcacaaattcaattttgagaaacaatgaataacattacaaccaatcaaatcctccaatttccccttctatcattttttcttctgtacttaccttaagtctcaaaataaataaattgaataaagctttattcactttcaaaatatgatgcaaaaatcttcattcattcaaagactgaagacaattacaaataacactaacataactaaaaaccccaaaaatatctacaatttcttcaccaaaaactaataaggaaatcttaatcataatccacaaaatccaaaacatcaataaataatttcaggcaaaatcaaaacaaaaaccaaaacttcaattgaattgaattgaattttctgagcaaccaaacaaaatctgaaatccaaaaagaaagaaaaaggtgatataccagcattgccacaaccaaccatgagaactcgagaagaggttggaaaatagtttcgaacaaatggtcgaagagcagagtaacgttggtaccaatcaaaagacccaccttcttggatataacgagcatcccaatacaaagcatcgccatagttgtaagtattacagctcgatgtgtctctgaacattataaagattggatttttgtaatcagtttgggaaaaagattgaattttttttggtgggtcaccgtagatggtgggtctgattttccggcgtcggaggaatttggggtttgaaagagagaaagtgaaagtgaagatgtggaagtttgaggtttgaggaggtgaacagaggaagtaaagtacttaagtttttttagtgtattttggctaacttaactgttctgtttgtttttttgttggttcggttacatcttgaaatagtaaaagtaaatttcacatcttcgcacgtgccaaagttatatttttgttatttatttatttttttattagaaaaaagaaagtgttaagtataaatagactaaagtgagtttagatgggaattatttattaatgtgtttttaatgtaaaatagtaatttatatgatatgaattcttaccacgtataattatggaatattataatttttctaaataattaattattgtagaatgttttatcaaaaaaaaaaaattatattgtagaatgttcttttttttttggaaaaaaaaaagctatatttttttggaaacttgccaaaaaaaatataaccacaaaaaactccttaaaaaataatagttgacaaaaaaaaaaaaaaagaaaatgaatgctaaaaaatatgttgggtgattgaaacattcaaatcatgttgataataactcaaaaatgttaactatttgagtctttatatagtcttatataacatagaatatttataatatatcaagataatctcaatttattcgattttatttatttaagctaaaagttagaaaaaaaaaacaaattaatttgcaaatcttttaatttctaagggataatctaaaaaagtagcaaatttgtataatatgcacatagagtaaatattattttagatcctgtgttttgtaaaaattactaatttgactctttattttgataaataaaaaattaaactatgtattttttaaaataatagtaaatagtaccttacactaattttctgtcaaaataaaacttaataataactaaatttagaggtgttataacaaaactgattacgtttatgacatatgttcgtgttatgaattgtcttcaaattagttatattgaataaaaataatcgaaaattgaggtcaagattttatttatactattttaaaaaataaaaggtcaatttagtcatttaacaaaatagaaaatcaaattagtaattttcgtaaaacacaaatctaaaatggtattaatacttctatttatattcttttaatatattgtataattactacttccaattactattttatttgaaatttgaaaataaaattagttagttaagtttatttttgaaaataaaaatatgacatagctcatctttaggagtttgtaaccataaaaagtttctcacttgcaagtaaaacgttaatgtatcacaattataaggaccttcctacacgtgttaagttaattagtgataatataatttaaaatgttgctatgaactcctaattaacattaaattgtaggaaggttcaaaataaatttctaacttaattagtgataatataacttaaaaggaagagtaatttccgagtaactcttttattttaaggagtttggtgagttgttagaactattacatattcataattcatttgtacactttggtagaaaagtaaacattagatcaagtaaattagtctctctagttaattctcatatgaaaatcagctcatgtttagcaaatttagttgagaaagaaaaattggccaatgatgaaaatcacaatccacattgaattgcctttgaatgtaagatattgggttggttgctttagtttgaaaaccaaaagagtaaaataaattttcatgattgccaattcaaaactagtaacctatatgagaataaataacatttacaaaattgtatctgatctaacattatcattggtaccttgtattttatcaaaatatagatttagtatcttgtatttttaatatatttatatagtattttatattttgaaattgtagatattaagtaagttgaactctaatttaatcagcaatttttttttatcaatatcattaaaatattttaattgttaattacatataattgagagtcatttgtcaaattaattaaaattgaatttagactactaaatttgtacaatttataaatttatattaagagatgaatattattgttcatcttgatagagttggtttatctaatgttgttcgaattgtgtttttttttatttcgatttctctttacttgtagtgatggtgtttaattcatttattcttttggctttaggctgttttgttagagcctatcctttaatgtttctcttgctattttgcaccttcttgtaaacggtgtgggttgtcgttatttggttatcttcttgtaagctttattgtgattttgtttttgtacaactttctaagcttggttctttgttttcatgaataattctttcaaagaaaagaaaaataataaacaaaatactagatttatttattttgataaaacacgtaatatcaaatgagtatattttattttggcaataatatcacaaaaaatacacacattaattaattttgagaaagagggtgttaattatagttatttgttagaattatttttataagtttgttataattataatgttatttctgtaattttttaaaatttttgaataatttactgtactacaaatagagttcttaatattttaatttactatatgtgttcaaaaaaattataaacttaattttaacattataaattattgaaattatttaaaaaataataataataaaactataatgattaccactatatataaaaagaatattttttaaaaatatttaaatgtcttttcaaatataaaatttaattaaaaggttataataaaatgttaccagataatatatggaaaatttgaaattatatacataataaaattaaaattggtcccataatttaaaactatataaaatttgtaaaaatgggataattttttattaaaacttaattttaccccctcattctaaactgactctctctctcttccttccttttctctctatctttcctttttcaaattcccaccacccacggaccattcccactcgaccaccgatgaacccatcccacggaccgaactctctttggatctttttttttttcgtcggatgtgatttgggaaaaatttgggtttgattttatcgggcccaatgcaggcccaacaccgatctgatggtattacagaaaaattaagaaagacaaagatttgatgggcccgatggtgggtctgatgcctgtgtaaaaaatagaatttgatatggcccgatggtgagcccaataggcccgatgcctgtataaaaaaaataaaatttaatatggcccgatgctgggctcgatagtgggctcgatagaatcccatggctataaaataaaagagaaaaaaaaaagaggaaggtaatataataggaaattattttaaggatattataaaatgtatcagcaatatcaaataatatgaatttgtggaaaaaatgttaagtatatataaacataaaaaaaatcaaattccccaatatatttatgtgagtgaggcatggcgtatgagtagtagctacctcatcaatacattccaagtgtctacttcacaatgtcacacgttataacctcaaactccatttcacacacaccctttgcgccacgtgtacactattattcaacactcatcccaatactcacaattatatattcaacccattatatttatataaacacaatttgactaaaccaaagatgcagcagaagaataagagtgatcatcattatggaagatgataaggccaaatccaaaaatgaagttatgagagttgatcagaatcatggtgatgagcagcagcagcctcctttaatggctttaaaccatgtgtcaagggtgtgtaaaaatgtggaggagtctatagatttctacaccaaagttttggggtttgttgagattgagagaccacctgcttttgattttgatggagcttggttgtttaattatggagttggtgttcacttggttcaatctaaggatcatgaaaagttgcctcaacctcataatttggatcccatggacaatcacatttcattccaggttaacacaattttatgctattaaaatgagtattttagtacattttcttatcagttttgacagtcttttagtctaatttttataggctaattttgatttttgtgtcaaatttttaaatatatcaaatcatgtttttctttaaggctgttgaaaattctttataaattaattaagatggttggatctatggattttgttttctttctaattttaataagaagagtttaacttgatgaaagtttagagggtatgatttagtatcgttaaagtttgatttggtaaagtttgatttggtagatattaaagtataattagttgaattagttaaattgaatgattttggagatcatgatttaatacataaataa

SEQ ID NO: 14569 - DNA, 4311 bp, Cannabis sativa
aaaaaaaaaaaaaaagacagattatttatatcttttcaaaattactcaaaaattataaaacacactgataagcctcttattcagcttgttaacccaagaattaatcttagagagttatacttattacaattaggctgctgatgtggcaagttctatactctaaagataaagaaattgggcagattctttatgttggatggaatagagagttgtctcaaggaggagagatctagccctcttgaaatgttagaaatatgagagaaagcctctcgaagaggttaattgtgtaaatcttgaagattcaataaataatttcttgtgggatttcagtattcttgtgtgttataattgttactctttctaatctaggaaaagtctatcacacacttttttattcactatctcttgaacgtttaagataaagtgaagttgacagtttagaagaaaagaaaatagtatattcttgttgacataggtcacatgtcgaggaaaagaaaatagaatattcatgaattaagacgtagcaattccgttcatcccagagtaatttacattcaagaaaacaatttttatcagtaccttcataggtgtaacattgtacgtagagacaccagttattggagttgaacttcgattttcagcagtgtaaaaagcaagggcactttctccaggcttgaccctcacctgtatcaaaaaagaacagaacattggaggaaagcacccacttgaacaatctgaccaagtgatgttcaaaatagttgtcgtacattaaataataaaaaatataaaaagcaaaagaaagaacctctctttgtgtaggaatgaatttccattgcattccatcagccacatcagcattaaactgcaccactatctccctgcaagacaataatttgaaggttcttataagatctcgatgaattagttcacagtacagagtacaataactttttctgaacccttaatcaagttaattcccaacaatcagtggtctgtacagcacggatgtatcaaccaagacgaagtgtaactagaacatgaacacagtatttatataggaaaagcgcactgttgagtcttaaaggtggatatgcagtgtggttagtgcaaaactcagatcaggttcttctaccaatgcatagctcagataagatataaatattaaatacatcatgctttagtaaaatcaactcatcatattacaaacatccaccacaagtgagggttcttaaatttgggagcaggtcactcatggacacgggacctttgtcactttttcaaaaaaataaataaataaataaaaacgttagtttcacttcctattttattgaaattataataatcttatgtaatttatatcaactcataaaggaataacatgaaaacacctcccaaaacacagatgagatgcatgcttgatcactgaaacgtttttgagaaaatgagaaaaacacaaagtatcaaggaagggtgctgtattggcttcatcttttagaaaaaagacacaaaaatataaatatatacaatatattacaggaattttgataatagactcaatgatgtatcaatttttctaaatcaagatgagcacaggattacactttggatcttgactcctaatggtatgataattatccctgttctttgtttattgtcttcattacattgttcaatgctccggattagtttgtctactttgcattctcttaaaagagtttgcagatcagtaaaatttttagggaacatttgttttataagattagagttgcctttgaatttgtggttgggcataggatagggggtaatctaaaactcaaacctttcaaagtggttaatactacccactaaaactgtgtggaacccacggagaaattacacattcccaacttaaaaattgcaccgaacatggggtgcactacacattctcacccatcccatccctacatcttataaaaaatgcctttttatatataatgaagaaaaagcgaccctagaaaactggagttcaacattctaacttcagataacgatgtatatgcttcataaaagattaatatacaaaatagattagcacagaggaagtcctgaaaagtagacagcgaaaagtgaacaaaaatataaaaaatattattatcataccttgtagtgactgttccatctttagcatgccgagaaattttttcttcaacactctacaaaaaggaaaattttaaaggtgataatgtgttgttaaattgacaagtccaggaagaaagtttaaatcagttcctatatgaggatgagattccttgattctacactttgaccttctcttctttgagtatttatacagaatttctttgtataataagaaaaataaatgagtgaaagaggtttctgaagctgtccatactcctaacgtcgttttcgattaacctttcctcagcattgttaggaactaaagaagtttgcttatatgttgttatgacttgaacggtaagagaaatgtcttcagatactcaattctaacattctatccaaaaaagcatgctaactaatacatctgtgatacttatatatttcctactttcatcattaaacattacttccctaggcccttttgaaaaaaataatgaaatgtcaggtggaaagaaatgagcacaagcgggaagagtaggggaaaggggaatttttattcaaagcagttactattgactattacactacacacagcgcaaaagcactggtaaagtagttatacttattgctgaattaaagattaaaacaattttccaaacactgcattcgtaatgaaaattcacagcctgccaatatctacgaccatactctttctatttgagattggcactattagaaagtaagacaataggtccatagaatgtgagtccactacaaatgcttatattataaatacatacacagataatcgttaacatagaaagactaagacagacctcacgacgctggacagtgcccccataacctgtagcttgacaaaatctcctgtacagaggaacagcagcatagctacatccaaccattgcaaagactaatgcagtaagataataaagcatcttctttgatctctgttctttagatacaatagaagcatagtgacgctgaattcggaacaaacagagaggtctcccagtgtatttagtagagaatggtgcaaactgacaatacttatcggatgaacttgtactaaattcactagttaactttgatctccatatatcataaccaaaatgcctctgatatccattattacctcggatgaaattagaactcgaacacactaagttatcattcaaatacctgaatcaagaaaagaaaaaaaattgttattgaatttacaaactagagcattaccaaaattttcctctattgtgaaaagatattttttggtaagggatcaattcaaaaatataagcatagctcaaaagtatgttgaaagaaagaatttaaacttaagtatacaatacaattacctgaatgcaggagtcttgtcttgtaagcttttaagataaggcaagagatgagctcttctagaaagccttgaaaacaacatttttacgaaaatatgtatcacagggtgtacagcaccatcctaatcacaacaaacattataagaataaatcgattaagcaaataatttttcacattctcgcaaaataagatactaaaacatcttaaatattcaaatatttggtggcaacgacaatttggtaagaaaatatagtgaaaacctaaataacacattttgacaagcacttggtgggcagtggtactacaaaaatcgttcaactcaaaatatagcatgaagaactaaacaaatagtattttctgctaaccaacctaagagggatagagtaagagagaccaagaaatggcaagtactcagcagcaaaataacctgaggccaacgggagagagacaaggcggaagcaaggaccgacagagccggcggcaaactaaaaaaaggagagtcgtgtacagattcagagaagtgtgaagcttggagaggaatttgcctagatttcaaacccaacgagtaaaatttgctaagtgcctttgttacgttaattttctttattaataaggagaggaaaaatggttcttctattgtgttgtatctaagtaaaatgctaacaatctccccatcaataatttttttttttttttcgtgtttttttggtaatgatatggacataaacaaattagggtgattctacactgcacctcttaaaaagggtatattgatgcacccctacttgtttcggcatgtagaaaaattttttagtctaattt

SEQ ID NO: 14570 - DNA, 10898 bp, Cannabis sativa
  modified_base (40)..(54): a, c, t, g, unknown or other
ttgtcatttaacaaaacacagggtccaattagtaactttnnnnnnnnnnnnnnnccaaaatggtatttacccgaaaatgatttagtacaagttaaaatttcaagagacaaaaatcttaattaactaagtaatgatatatgcacccaaccagcatttagcatgtttctttaaatttctgagtttgagtctatcaaaatattaaagtgaagtcaggaggtgttttgtttatattttgtttgcaaatatcattactcaaaccaagaggtagtctagtgcaaggaatcaagatctccagttaaaaagtactaatctaattctaacaagttaattaatttaatttatattcaatatgttaattttttttgttaacttagtcaaaagtttaaattaatttaacactttttaacaagagatcttaaggtacaacgatagttaaaaaaatgttggtggacggttcggacccctagatataaaataaattaaaaaaaaaccaaaatatatctaggaaagaaatcaaaactctgtttacaatcgagtggttgagaaaaatgaaaacgctgaaccagaaacatgtaaatgtaaagcaagatctcattttggtcttttggataccttgtcatttggatacatctacgttcgtcacagtcaaaattaagttcacttttctttcaattcaattggattggtcttttttttttttttgaaagagagaggacattgatgtgccatgtgctataacgacagaaaaatcatcggctctgcatgcaatcaaggcgaacaggcggccattcttcagagaacgacctgaccctaatccacttgagagcaaaaccttattcttaaacaaatgatgacgagaagcgatgagctctgagcttattttatacccatgactgaattatcacttttgcccttagtgctatttctgggattggggagaatagagagtgatatgatggtaaatatttaataaatataatttgggttatcacatgtcagctctgaagtatgagaaaggggatttttctttcaattggtcaagcaagtgttttattctgctattatcgggctttcaacaaccacaagtgacactggtcctactctgtgaaagcaaaagatttacaatgtttaaattttctataacactgtcgaatacatacattttcctgccaaaattgtcatgtaactatgaagtaagaacttgtacacttcttcccaataattaccattctttcctgcttctggcaaaataacttagatcttcaagtcgactgagtccacctttacctgaaagagcataaataaagtcgttttacgcacctcatgcaaaaaattcatatgtttaaactctgatatagtctatatagagttgcagatggtaaataaagggataaacactaatacactaaaagagatgcagatagaaaacaaagctttaccagccccagatgtctatgcaaagctccatgtaaaagctctttgagtttctcacattgatctaccatgtgacccaaactgatgagttcctccagtgaaaaccagaggcgctggattgctgtgtatggaaaccaaactgcaaatggtcttttgcgattgattatgtctaccggtctctgtaaaatgaggtataaaaaaaaaaaaaaaaaaaatagctgactagaacaatgaaaacataaggtagataaaacagtagtgaatactgtacaaacatcaaaaagataaaacagtagtcaggaagtcatgcctccggaaagaatttaagagattcatgacagaacaaacatagggctggcattcattgaaatgcactataaagtaaaagaggaataaatataagagatcattatttttactactaggaatctatcaacaatattgcattacccgttacagcttataaagcctatggactatatgattccatgtaatatgcaaaacactctaacatactaactaatttgtttagcaaagacattctaggagactcaaaaatatagttatcctatcccctaggaaaaacagacccaattgaaagcaaggaaattttagcattactgtaagttgtggctcaatcagtcattgcatttacattaattcctcgattttcagaaaaatataggtgaggagaaaaattaccattgatgcataagattctatgtactcaagcaaaagatttgtcgcttctgtataacgaccataatcaacatatagcctaaataacaatgcaggatttgcttcttgaccagtcatcctccaggatctttcacttcgacaatcctgtcataatcccagcaaatgatatttagtatgagcatcatttcaaaatcagttgtaaagaaagctatctagaataaaatgcatctaattgcaaactgttttgcctgaatactttggtaagagtaacttcatgataaatagcaatcataacgaattggataactgccttggaaaatgatacaaccagaattctcacaaggatcaaaggagagaaaatgtcaacaggagtgttaaaaagaactggaaatcgatagaatcatagaggggtgaggatactgcaagttttggtgtgtgtattgaatgtcaaccaatcattggctgacttgaagggaatattatgagttgttcctttgtattggatttgggttctttatgtttcatgtagaagcaaatgtgaaacaaggggtgtcaaaggtgaggtcagattaggcagctttttgacgttgagtgatttcgaattcctggtttcattaccagtcctacatattctcttctctggttgcactgttgatctttttgcatcaatattagaagcctagccattttttagaaaaagataggcatagatctagtgatatgttacacaaaggtataactaataaatttaattattgaaattgtgaattaagtaaataggatgaaagccctgcccaaagccctgcccctttccaaaaggaaaaaaaaaaaaaaaaaacctagtaataataagtaaaataaaaccatataattttgctcccccacaaaacttagcattcaataaaatattaaaattgatacctacatatcagttctcaattgagacgttgacatcaacttaatgttgaatgcatgttaattttaacttcttatatgggtacttaatatgcacacatatttgcacaaggcatgcatgcaaaaaaaacaaaaaaaattgggccttttggttttttgacaacagaagttccggattcaaagaatgacaaataatcaacttacacttgtatgtgtgtgccactgaaattctttcttttatggaaacaagtccattgcattttaaatagttcaaaaaaaaaaaatagttcaatggtttaagaaagagcacataaacattgaaactacattcaggctggaaaagcctaatcaacttctgacaaaggaatagatacattaacattgaaactgcatgggcctaatcggcttctgactagtgaatcagtaaacattgaaactatacaagatctagaaaaaacaatcaagttgaaactagaaattaccttgaacatgttcacaagccagagaggcaattcgatttgaggatcagtacgaagaagagtttcagcaacaattaatggtaatctggcatgaaatcccttgtacttttcctaacaattaccaacatatatatgagaaaaaaaaatgagaaagtgacttgcagaaattaagaaagcctaaaatggggaagaagagaggaagctaaattcacaggatcttttggtaaaaaaaaataaaaccttcttctcaatgcattgataacagaataaatttttaactcatgaaaatagaacaaattgcaattaatcttccagtttcatcataagatcaaaaactcattaatttagagtaggaaaaagatactaacaagataacgctcaagggaagcccattgattacttcccttgaatggttgagttgagctattatcaggcgagccacgtacagccacttcattctttgaagaagttaacagaagaagacgcttttggcgatcatccctggaaatgattaattgtaaaaattcattcttaacgtatgcaactgcactaaatttgaaatagaatagcaacaagatatggatgcaaagtgcttgaaaacagatgtaatgctagttaaataagaaggatggatcttaccctgtccacgatgaatcaactttatctgggcagcatttcattgacatcacagtaaaaaccctttcgagttccctgagtggaaatgaattcccggtcatactttataagaaagaaaagcctaataaaacccattgatggtgtaatatagtaaaccagaattatacctcttcaagtctgaacctttaaagaattttagaacaactgtgaatgccatgtcatatatatctgcctcgactaaaataccaatcaaatttggtaaattctcgcgaatttctgcaagatattttggaaaaataaataagaaacataaaagaaaagggtataagcaacgtttaaattatttcaaggatgtattatcagaagacaaattatatattcttaccattaaattttagtttcacttgtgctaatgaaagtaaatattctgctgatgttagcacaaactcattatcaattctttcgatatcaatacatcgccatttcttgggctgaatatctttaccttctgcaaaaaagttaaaacaatgtacccagtcaaacaaatagaatttgcaatgcaaaattctaatagcacaaatctcaaggtattgtcagctaaggatgcaagacaattctgtgccagaaaaataattgaagatgtcaacataatagtaaaattgcttgctgcactattacgttcttcctctactgttgttttagcctttttacttggataatgctcttcatggacaggtctgtcaaacataggatcaatccaagcatatgctggatgaacaagatgaagggcatttacagcagcagatagcccatttaatctttcttgcaaatccaatgaactctgttggtagtctctttgatctgcttccgtctttaaacgagcagaatattgatatatgtaacttgcggcttttcgccagttgtgtcgatgcatttcaaaagaataaagcagcttatacaagtttggttttgctaatatatctgagcgctctgcctgcatacaaatgacctaaccatcaaattgcattaaatacaaagggactacagtgaacaaatcactttacgaagatataccttccaggcaagctcctgctctaccttgtcaattaaaccaatgaaaggaagttgaccactgcaaagaatctaaaaataaaatgaatataagattcaaagcaacaacaagtaaagaaacataagctcagcagaaaggaacaaactttaacataatttagaattttttcaaaacaatcagcaacattttaactgcatttaaatagacgacaaagcaagcaatgctggaatactattttgaaatagagaataaattatcttaagtttgctgctaattaaatacatcatattgatgccaaatctcacattttggtttgtcattttaaaaatactctcgatatttggctactccaaatgatttgctgaatattcacttttgttgacatataattctctttctggttttcttagtattgtttcccgaaatcattaatatatttttttgcacaatctaccaaagatgaaattaaaagagaacactgtgagtgaagaaagaaaatagagggtgtggtaaagggagggtagcttggtagaaaccttaacagcactgcactcataaagtacaattatgaaacgcctcaaacaaatctgcttgctctcctcatctggatttgatattattgcacaatatgcgtcataatagtgatgaagatctaatgtaaatttgaagacatttgcccaaagtcgtcctttgatgatggctgctgattcatcaaatggatctctaccatggtgctcactattcacagttaaagcttcctcgacttgctcaagtgcagcaagagcaaactgacatgcaccttcactaatattatattgctcaaatatttgcattgcccactgataataatgtagcttccatgcaggacctgatgtgttaacacctggaatgacaataaacaaacaaaatgtttgatatcaataaaattcatactatactgaaagatctacttcatatgtaactgaaattctaataaggctaacttactgaagccaagatgtggaattcctacttctggaggcaaactctgcaaagtttgagcagcatcttttacggatgaggctctgcatattgaaaatgttaatatttcaagatcaatgcagaactttaagtaagttgacaagagaacaatgtcgtaaaagaatattcatttcattcaaaacctatgtgacctaggtttgctcaataaccaagaaacaccatacataactgaaaaagatcaagaatttgaattattgaaaggcaatatgacatataagtaaacatgccatatctgtctttgacatgattaaactacggctacagactctactaaagaaaacaaattactaaatattgctactggtgctgggtcattcaaaacatacagttgccctagcatcaaaacacaaacattttaattttcttttatggttgctaggtcattcataacatacagttgccctagcatcaaaacacaaacattttagttttcttttatggttttagaatatatatacatacatattacatatacatacacataaataaatatacatatatggaaggggtccttctaattccaatttaggacaaaagaaaattttctgctcctaaatggtggtgtcttcccacaccacgaccccaaagcagaaggcccctaagttttatccctctgaggacgtgagaaagccccttgttaactagcacaagcctaagccgaccaagctgagagcgagtatcactccagggacagtcttgatcatcttggctggaaggttcgaggggaagagagttgtctttctcaagcagctttcctctgggttgctcttggtcactggaccattcaagctcaatggagttcccatcaaacgtgtgaatcaatcttacgtgatcggaacctccaccaagtttgatgattctggtgtcaatttggagaagtttgatgagaaatactaagaagggggagggagagttctttgaggctgagaaagaggagaagaatcagtttccacaaggaaagaaagatgatcagaagacagtggacactccattgttaaagtgcattgaggctgtcccagactcgaagacataccttggagcaaggttctctcttaaggcagacatgaagcctcatgagcttgtcttttaagtgaatgtttcagctataactctaggataattttgtgagtggtttttgtttgattttaaaatcttcgactttctttttaatgtacttttcatatctcctgctgagctataattttgtagtaaccagtttacattatgtagaatttttcttcttgccaaagagaaaaaaaaaagaaatttctttgatcctcaagaacacttaaatgcttgatatgggggagagcaagaattagaagttcagatggtgaatttctcagaaaagggactagtaacctgggaggtatgaaggatcacacatgatatggcaaaaccaaccagtaacttggaaatcaaactgataaggccaaacggaagtttaagataattatctgcttttttttttgttttggatggtagaacactgatttcctcatcatagttttgtttactctttagaaaaatactattttttttttctattataaaattaaataataaaataagtaaagaaaaaggcagaatgaaaagcttacaggatgtagatacctgaagaaacatctgacagcctcactgactttcttttctttcagctttccatgcaatccacgttgtgcttgagcaagaagacagcatccaagaacatggtgaagtatgcaccatccaacatcagcatcttgaatagtttccaatgtcttctccttctgtgaatgtgcctcgaccatactgagtaggtgctttacataaattataaataaacaaacaagttaaaagacaatattataataatgatatttaaaaaaatcttgatggaaaccaagttccagctctaggaggaaaacctcaacagcatcatactgcccattctttagtaagatcaatgcaagctcagttgaatggctcaagaaagtagttaactccctagtcttgccccaaataatccagctactgaagttccgaacagacctaacaatgtcatgcaaatttggaagatattttgaataaagatgactgtctctggtggaacttctggtgttcaataagagcacaaaggccaaagggaaatcgcatttcccaaggttttcattccaagatcttttgcttgcataattatctggggcatgaaaattgacaggaaatcaacaacatggcttgcataaaaccaaattctgcaaccccaaatccttgcatcttccagctaatgcacatgggtggggtgggtgtgcatgaaaaatgttaaagcttaccaatttgtaacagagaaagttgagagctgaaatcttcaattgatgctgactcagaggatgtggtggtgaaaaagtgaatgataagccactcagaaatgatttcttgaatcattggaatcaactccaactgtatcttagatacattgtcaggcaacatatggatctgcatgccaaatttaatctttaagttccagaacatttctcaagaaagaaatagagaaattcattgaaattgtttaaataacattcggaaagggaaacaagtggtccaacctaaaatcaaacttgcttagtaggtctaagcttgaaatgggaactctctgcctaaccctaacggtgtatttggttgggagtaacgaaagtagagaaattggaatgagaatgggaaagggaataatactggaatggaataaaatttcatatgaataaaaacaatctataaaaatgttattaatgtttttttatttgtgcattggaatgaaattcttggatggaatagtttgtctactgaaatggtggaataatcattccaatgctttaaagtgcagcaaaacgaaggaatagaatgaaaattgattcatttctatttcatcccatttcattgaccccaaattaaacgtaacctaaaagatttggagtaggaaacgtagcaattgacatccaagtgcacacaaacacacaatacttataacagcaacaataaataaattacacattacaaacccacatccagtataaatggaatcccacaacataaattgagtttgtcttgcaatagcatcatgatttggcaacaggtaaaattggagtataattctttaattgcatattgctacatgaatcatgtggcatccacagttgacttttttcagacaaaatccacacttaaattcttaagttcaataagtggtcatttcgtttcataaatgcatatacaaccatgttctcctggcaaaataaatatctatgccaagctctaaagaaagaaagaaagaaaaaacaacaataataacaaagaaaaagtaaacaaaagagaattgaaacactaacctggccactgttgtttacaagatagcttaggaatataagaatgtccaatgcagactcaaacattgtcttcgcaatttgagaagtggcctggaccaaaatggtagcattaatgcttaaggaagggtcagcatccaaattctgcatcattttccgaggtacaagaaatttaagataattttcaataatattcagaactctgctccatgtagtagctttctcacacaaggcgtgaagagataagagcatgtcaatagaaaatttccttaagtttttgtgatcctttagttttttctcccaagcatcatcattaccaaactcggatacactcacagccgctaacgtcgaactatatccagtttctaaaatcttcaatacatgtggaacaacttcttcacttgggaaaatgggtctgctaacaagtgattcataaaatatagcagaagctgtttttcctagttgttggctgatactaatgacacatctgagcagatcaactagtatcccacgttcatacttactgtcaaaaaattctatgccaaaactaacagcactatcaccgatttcatcggaagaataacctaaaatgagaatataaaaacaatagttcagaaatttgtttaaagaaaagaaagcacaaaaaaagttgaagcaaacaaaataagaattattccagcttcaaatataagaaagatcgctgacataccataaagtaaccgttcaatgtcttctgaacagcggaatagggatactgaactctttcttattacaccgacagagccagctattgactcaacaagcaaaccgcaaggtgcattgcttttgcaccaattaaggaagtagcgtgaacagaaatttttccaggagcaatgaattgacactaaattttgactgacatcctgccacaaaattcctttgttatcatcagcacattaaaattcaattatctattttcaaataacaactagaaaatgggggaaaaactacacatatgcatcagaatttgtcagagagacagaagagaaataagaacaaatagaattgaaaaggaaacctcatcttcaatcagagaaagaatttccttcttcaatccatcagcagtcaatgactggaaatcagagtcagtccagtgtctattatagtccaggaaagttgcacgcaaggcaatattgtgatatactccaggatgtagcagcctacgtaagaaaatggaagatacaactgacgaaatttgagcctggaaaaattttgattagaaataat

SEQ ID NO: 14571 - DNA, 17177 bp, Cannabis sativa
  modified_base (4727)..(4732): a, c, t, g, unknown or other
  modified_base (14023)..(14033): a, c, t, g, unknown or other
  modified_base (14089)..(14107): a, c, t, g, unknown or other
  modified_base (15250)..(15253): a, c, t, g, unknown or other
  modified_base (17118)..(17138): a, c, t, g, unknown or other
atttacagaaaatacggttttttatgttatactcttgttcatttgttgttaattttttgttatctgcatgttattttttgttgttattttgatgtcattttcatgttacttgtatgtattttcttgttgattttgtgttattttcgtgttatttttgaaaaaccgtaaaaatgtaaaaaaaaaatagtctttgatcgtaaaaatgtaaatacaaaaaatagtgtcttatgtaattaaagagcattaaagaaaaaaaaatatattggagcctttattttaattagggccctgtggcccaacttgcacacggccctgtatatttgatgttgtgatcaaaattgtttttgtgtttattaataattttaaatggcttatctatcaaataattgtataaatccctcattagtcacacctaaaatccaatcaaaaccatatataatacatggagtcattctttaattgtttatttttctagcatgatgagtcaattaatttaataacatttaaacacactacaccatagcacggttccccattaaattaaattttcaaaaaactatataataatacttaatttttttaatgcaagttgcttaatattttaagcaagtttattgagttacatgatattattatgatattattagatgaacaaaatctctggttctaatcaaactagagttttaaaactcaaaagcttataaaagagatcgatcggtgtgtatgatgattagggtttttattaagttaataactcttgttattattcaaatcaaccatggaaatgaagcttcaaatcttaaagatgaaaattttgaatgtcttctttctcgagatgagctctatagaactggctatcattttcaaccccccaaaaattggatgaacggtttgttttcttctcactattctagaatttttttttctaaatttcaatgtcatttttgaaaaaaaaagatgaaacttttattttctcattctctaatatttgatataatctttgttcttttttattcttcattaattcatttttcacgtggttgaaaaaaatggacggatggatgatgattatccatacatatatcttcagatcctaatggtatgtttttttatctttatatatttttgtaatttattctttaaaaataattggtaaaatggtctctaaaaaattatttttttagaactaattagggattttaggataacaaagttagagtaaaaagttaaattaatgttatgtttagggaaaaggaaataattgttaccaaaatatattggtcaactttctctccattcaaaaaaaaaaaaaaaaactttctctccaaacaaacaaaaaattgatatgaaattttaagtgtagttcaaaatttaaatgaaatgattaatttcctcaatacaaaggcacgtgcgcttcacgtgtttcagagcaaatcataaaaaagtggataatatatagttatatttatacaatattagtagttgagttattttttcattttattttttgagttattgataatgcaccataaaatatttattttctatgaaatatactaaggaagttctctctttaatttttaatgtgttatgtttcacatgtaattatattaaaaataatataaattatcattaacacaaaaaaaaaaaaaaaaagaataatataaattatgaaataagatttttttaagcaaaaggactactgtgttttttgttatttatttgtcaattcagccttaaattttttattttgcataatgttcactcttgagtttttgtatttaataaataatactgcaataattaggcctttctaattagttttttttctttttcaaaaaaaaataattttaaattttttatgaatagctttgatatatatatttttaatgtctgtataaaacaattcattcaaaagcccaaaaactataggaaagtgaatccataattttctcatgtgcatgctatgatataagttcttcacaacaattatataggcatatgaaaacttaagattaattaattattagagtacggctaattacaaccaacttttattataactacttagtcaatcttcatatttaaaattacaggatattttttttcaaattttttttcatagcagtatattataattacaatattattattgtaaatttttaaaaaatttcgaatagtttacagcatcgaaaacagagttcttgatatttcagcttaccaagcgtgctgtttaaaaaacttcaatgatctattttcagcattgtaaaccattcaaaaaaatttaaaaatttataaaaatgatattgtaactataaattaaaacatcgccttgaaaaaaaatatgacatatatttcacggagattataataggaggttaatggtagcactcatctaattactaaaacaaaattcatatattaattaaccatttcaatttatgtaaaacaggaccaatgtactacaatggaatatatcatttattctatcaatacaatccctatggtcctttatggggtaacataacatgggcacattcagtttcatacaatcttatcgattggattcacctcgacatagccttatccccaactgatcctaatctcgatatcatcggttgttggtctggctcaacaaccttgctcccgggcaacaagccagctattttatacaccggcggtgattccaaaaatcgccaagtccaaaacctagccttacccaaaaacctctcagacccttttctcatagaatggataaaatctccactcaaccctttactgactccgatcgatgatattgacccgagttcttttagggaccctacaactgcttggcggggccctgacaacatatggagggtcacaattggagctcgaatcaatggatttggggttgcattactttacaagagtagtgactttttgaagtggacaaggtttgagactccactttacttgtctaagaaaaatagtgtaatgtgggagtgtcttgattttttccctattggaattaagggctcagatggtgacaatcattacttgaatcaagatcaatttaagaagaaatatgttttaaaagcaagcttccaatttattagtagagagtactatatacttggtgagtattctcctaaaactgaggagtttaaggttgagagtgaatttatggatcaaaattgtgatttgagattagattatggaaagttttatgcttcgaaatcgttttatgattcacaaaaaatgagaagagttttatggggttgggtcaacgagtcatatagcgaaactgatgcctcaaaatggttcgggcttcaggtattaattaatttcaaccatacaataatttttaattattagttctattatatatataaataaaactaatattatttattttatattttagtcttttcctagaagtattcttcttagtaagagtgggagacagctagtacaatggccaatagaagaaattgaaaaattacgaagtgatgatgagaaagttagtcttcaaaacaaagagcttcgcagtgattcactctttgaaatttctggtgtcactgcttcacaggtaatttatcgaacaaaaattttcctttctaaattatatatattttttttctttattttagacctaaactagttagaggccaaaaaaataaatgaacaaaaaaaaccaaaatttgaatttaaatttcattataagagtcatgatcacaatacattaatattttagagcatatgttttaatgataaatttcatttgatatatttttttttttaaaaaaaaattgtatttattatataaggcggatgtggaagtttcatttgaagtaactgagttagaagagaccgagttaatggacccgagttgggttgatccccaactactttgtgatgagaaaaatgcaagtgtaagaggaaaaattggagcttttggtttgttggttttggcttcgaatgacttatctgaacaaactgcaattttctttcgcatattcaaaaccaataacaataagagtgagaagaagaagtatgttgttctaatgtgtagtgatcaaagcaagtcttcgttgaggaatgatcttgacaaaactacatatggagccttccaagatatcgatcctcttcatgagaaaataacactaagaactttggtatgtatcatgtttatgtttatgatttatactatctatattaattttatataaaaagagtagttatatgatttggattttcaatcttttgttcagattgatcattcaattgtagagagttttggtggtgaaggaatgagttgcattacaactagggtttatccaatattggcaattaacaaaggagcccatttatatgtattcaacaatggaacaaatagtgttaaactctcaaagcttaatgcttggagtttgagaaatgctcgatttttttcatggaaaggagaaggacattagtaagacctcttttttcatcactttatttgaggatatatatagtttgttgttctatttttctaagacatttcgttatattcgcatattcatcgtacgattagtataattgtgcgtgaattataactttctacactcacggcgaactagctagttttggatggatgattttttattttatctttctttgatatattatacattcactaagagaaataactatttttagtgacaaatttttagtcataatataatttttttgtaactaaatgtgannnnnngtcacaacaaaaagttacttatgattaaaatataatatttagatacatgttgtcactaatttacttttagtcacaataagtattgtgactaaaaatacattatttagtcacaacaaattgtaattaaaaatattcattttaacagcctttactaaaaatattaaaaatattatatgtgtgtatattataatatcaaatgtaaatttctctatgtatgatattgtgacagcagtgtcatgtgacttacaagaaaaaagacaaggagctgtataattttacattgcttggagaaggttaaatgtgataattcttaaactaggtaagtataagactacacagggtaaggggacttaaatgaattgattaatagtacatatattaacaaaatccatcttctgatgccatggaattgaagctaattattcaaatcctaataatggtgaacaaccttatagaactggctatcattttcaatctcaaaaaaattggatgaatggttctcttctctctctcttctcttattttcattatttgaatcatttttatgtttttttggcttcaatttcatgtcctttgaaatttgaaacatgattgactggcttcaatatatatcagatcctaatggtatgttttttactaataactcaattcttcatctatgtttgttttctcttcaagtgaaattcttacacactttagttgattaagttgaaacatttaatgactgaaaaaacacaataatccatctgaaattatatagaaaagttttggttctttgagaatttcatttgtactatcaaaaaaggtttagattttcatgtgaatttgaactagaaacatttaatgactgaaaaaatagaaaccatctgaattttttctaaaatagttaagttttttcatgctaaagttgacaaagatcgacccccatctgaaatttccctaagaaagttaagctctttaggctaaagttgagatctttgaaagaagaaaactaaatgacctaaaaaaacaaaacccatctaaaattttctaagaaagttaagttctgctaaagttgagaaattttatcaaatatataaatttgaaaagatgaaccccatctgaaattttattacgaaagttaagctcttaatatgtactaattaaagttgatatatttgaaagaagaaagctgtatgacttaaaataaacaaaacccaactaaaaattttccaagacatgcattatattttttcatttgacaacttatttcatcaaatataaattttgaaagatgaattcatcgaaaaattcttttcaaaaagttaaggattatttggcttcataacttaatagggatcttcggcaaaaaaaaactttagaaacagcttttaaaaaaatgagtttttaaaaattaaaaaatagaaattatcaaaatgatattttttgttttcaaaaataatttttatttgtctaacacattatattttatagttttgttcacatacccggacctggactcagagccagaccccgaacgccaagtacgcgcttagaccccgacccgaccctgactctggccgacctggacctggacccggaccctataggtacggacccggaccctaggtacggacccagaccccgaccccgaccgatctgggctcagagccggacttcggaccccgaccccaaacccaaacacgaaccaagatcctaacctcaaactctggacccctacccgacctggacccgaactctgaactcctacttgactcgaacctaaacccaggtcataacccaaacttggacacggactcgaatccagaccccaatgtgggttaatccccaattacttggtgatgagaaaactgcaagtgtgatctaatgacttatgaacaaactgcaatcttctttcgaatattcaaaaccaataatagtgagaagaagtatgttgttctaatgtgtagtgaccaaagcatgtatttattttttattttacttttgttatattttgttatttttatttttattgggaatttgattttgaaattaacttattataaaataaatttgcatgtgcatgtcttcctcgcgtccggggtctaggagtgggtttggattcggggtctaggttaggtcccaggtttgagtctaggtttgggtctgagttcgggatctgagtacggatttgggtccgagatttgagtcgaggtcgcgaggttcgagtcccgagtcccgagtctgggtccagctctaggttcaggtctgaatcgtgaagttaggtccaggactagagtctgggtacgattctaggtcccaagattcaattaggatcagagtccaaaatattaattaagaaataaaaaaaaattgaaagtgacattttttttgttttcaaaattttaattctcaattaaaaattaaaaaataaaaataattttatagaacatgtttttagaaaatatttttactttatttctaattaataaaacaaaaaattacttataaaaaatgttacgaaacacgctcttaatttattttaagtgactatacaaagagatcgatcatattgctatttttttcaattaagagttataatttgactatcattaatttataataagtttgaaaacttgttttatttatttatttatttttttttggtgtagattgatttggtggagaagggagaagtgttattacagctagggtttatccaaaattggcaattaacaagaagatcatttatatgcatattcaacaatgaaacaaatagtgttaagatttcaaatattaatgcttggactatatgaacaatgctcaaattgtactgtccatatgaagaaaaaataagaaaaccaaaaataattaattggttattaatatttataaataatatacatatatacgtacgtagaagaaaatgtttcatgcatgcatatattaataattgatgtgttctatgttatatcttaaatatcaatgatgtgtttgtttgtactttctttatatttgaaaacgacaatacatatttacattatgtgatatggtgacatcatacgacaaaaattactatgactttgaagaaacgacaagtcgttttatcatttaaataaattttatgtttgcatatcttcctacataaaagtagaacttttactccttttaataaaaacacaataatactaaaataaaggattttatcgtattagtaaagttcataataagcaattaataaatattattaaattacttaattaaaaaattatgatgctaaatatatacacaactaacaaattcattaggaaaattttaaaacacgtttaactgtgaagttctttcataatatgctaccgaaaaataaaatgcaacttgttgatataaatagtatcaatcaattcatttaaactctctttaactatgtattctcatacttacacagtctcataatcattatatttgaccatcataacaacgatttgatggtgagccatcgaaaaacaaacaacgaaacaaaataaaataagaccatgtcacagagataagactaattgatcgcagtagtgaaaattaaaacgcaatagctaatacaatcccaaataagctgcacctatgctgagattaaactaatgaacctgtagctataaatttaataacaaaaaactctaatattttaaattagctagttcacaactctataattttaacactttcattgataaaatatttcccctataggatcttagtccttaaatttgttgctcatattctatctaataaatcattatcaaaaagagccagtgcttaaaagatcctaaaaaagttctaaaaaataaatcctaaaaatactcttttttttaaaaaaaaattatcccaactattttatttttaaaatatttttaaactatatatgataaaatattgaatgaaaaaatcaacaacaaattacttctaatttattactaatgactccaaataatactaataaaaattttataaataatactattaaacttaaccaaaaaataataattatatttcaaaattattaggaattaaataataaaaactcaattttaattaattatattatatcattatttcattaccaagcgtagcgtgaagtgaaagtaatccactgtgcatttcggaagagaaagaaagccatagcgaaaaagattacaaagaaagaagagaaacccttcaaatttcctaacttaaatcccaaaaaacgacaccaatcaacaacccttctccaaagatttcatctttccaaacaaatttcttcaaatttcattctgttctgtacaaatgcgtgttccccaatttctcataatttttacaccaatttcagaattttaacataaaggttacatttttaaggagtttcgggagttgggttttctccgatttgccaagaaatttcatataagagttatttttctgtttttctggttttttttttttttagggtttgggaaaatgaaggaggagaaagatgaaggtaaggcaagttcatcatcatcgagttcatacaattggttggctaattttcatagagatttattggctggtgctgttatgggtggaattgttcacacaattgttgcaccaattgaaagagcaaagcttttgttacaaacccaagagagtaatttggctattgttggaagtggaagaaggagattcaagggaatgtttgattgtatagctcgtacggttaaggaagaagggattatttcattgtggagaggcaatggaagtagtgttattagatattacccttctgttgctctcaatttctctcttaaggtacatgtcaaaatctttttcttttctatttagggccaaataagttagttcttgtgattcaaaactttatagttcttatggttgatattgaatacttattgggttttgttaattagataaatattgtgtgttttgtcccacattgctcctataatatgtgtgagtgatttgcgagttttattttataattagcctttattaaatctatcagaaagaaaattcattctgtttactgaatgttactaagaaattgttacttaatctgtcaaattagtggatagttatcggaaaagttgtattttagtagtcaagtagctcaagattttatgtgtaagaaaccttaacatgcttatctattcagctctttacttttactaatattaaatgacataaactaatggtcccctgttcctgattatttaagataatgcaatctagcaatttgtaatatgtttaaaattcagtttagctgatgtttatcgatgtaacgattcattatgattcaatttcttatctggggtttgcatttttgtatgttgagagtacccaaaagccgaaaaaagctcacaattcaaaggctagtttcgggttttttttttcacttgccaatccttaaccttttttataagggaactaactagtggctagggattcttgagaaacctgggtttcttttctttattatgattgtgatagatttttatatacatatatgtattatttaaagaaagtgaattgaatttttcattattggacaaactttgaagacaagaatggatttatttttaaattcaaacaagtggttagattaaagtttttacttttttggcttgaaaaacaggttgtcccatagtatttgagcaacaataatcatgtccgtactagttgatgcaatcatatattactagtggattgttgcttttatgtaatgatgttttgtatgagacaataaagtattgagaagaatctttaatgatttgttttctatttccgtcacaggatttgtatcgaaacatgttaagaagcggaaactcaacgtccggtcattttgcttcgggtgcatcagccaatttcattgctggagctgcagccggttgcaccacgttagtccttatataccctcttgacatcgctcacactcgtcttgctgcagatattgggaggaacgatgttcgccaatttcgtggcatatgtcattttctcacaaccgttggtaggaaagatggtgttcgggggatctaccgtggccttcccgcctccctacatggaatgatcatccaccgaggtatctactttgggggatttgacacaatgaaggagatgatgtccaacgaatccaaacccgaggtgtcactcctcaagcgatggatagctgctcaggcggtgacaacgacagcagggatgttgtcatatccgttggataccgttcgtaggcgaatgatgatgcagtcggggctcgaaacacccatgtatcgcaacacgtgggattgctggaggaagatttataagacagagggagtggtgtcgttttatcgaggcgcggtttctaacatttttaggagtacaggtgctgctgccatcttggttttgtatgatgaggtgaaaaagttcatgaactggggtagattgtagcagaggaaatccagtttttttttttttcttttaattgcctaccatttttgttgactttttggtttgaccatacatgctaatgtaagaaaatgaaaggaaagaaaaaaaaattacactacagaaaaaatatatattatatataaatatagaaatactttgcatatgaatattattattaatgagtaataaataaatttaactataaatattaattttaaatatattaaatcattaaattttagtttgataacgaataataaaaataaaatttaaatttctatatttaatttaattatttaattaaaaaatatatttatatgaaaaatatttaagtaaaatttaatttcttttatcattattttgtcgaattttttttttaactgatagaacaatttcaacttatataatgtaaaaataattaaatagaaaaattaatcataaaattcaattttttttaatattatttatttatgggtaatacctattaagaatacactctattaattttacaatgcacttttcaacgggtattacctattatgtttaggtgtttctccaatacactttttttagaatgcactgataaatctttatttattttggcatttaagaaaaaaatttagtcgtattttcttttataattttatatgttatagaaaaattttaaattttaaaaaaattcaagaataatttataacataaaatattgtttaaatagtatattttatatatgtataaaataaaaaagatacgatagcaacaaattatttcaaacatatcggtgcatatacaaaattagtctaaattagatgtgttatatcatttggtgttgtattttggtgaatattttaattatagatatcattactcgtataatttagctttgaagtatttggataatgttaaaaggttttatatatattgaattgtaaattttatttaattagactaacttaaacttaataatttcaataatattaaaaaaaagattagactctgaaaatatacaacgaatatataaacgcgacactctaaccatttaaagtgtttgtacttattggttaagattgattgtttaagagagattctacatgattaataataatggaatgtaaagagaacattccaatagtgaaaactttttgaacagtcaaatatatataaatgtatttatacatatttaaatatgattataatatgatataataatccaagtaagaagcatatataatggagaagaaaaaggaaaaaaaaggtcccctatgctatgatttttgtccaatgaaatgagttaggggtgagtgttccacagtcaagagataatgaacgacccccatcactcaagaagagtcaccactcaacttataattaaaacctataataatataatttatttatttatttattacaagaatagtaatttgacattaagtaatggtaatttgatattattttaagagtaataataacataaatgtgtactaaattgttacataatgttatatttttctaatgtatactatgtatcgctttaaataaaaagtagcagacctaactcataatatgagatagtgttatactgataaaaattttattagtgtagatgagttttgtgggtattcgcccctattgggatgagtatttttttacttaatagcatgtttattaataagcaatgagaatcgatagtaagggagtcattctcttatatttgtataatgtgtgaaaactaccacatataagatgtatgagttacttctctcattgctaattggttttgaaatagtatcatatacaccttaccatgcacctacctaatcttactttctaaactacatacttctaaattctaacatggtatcagagccaaactaaactctaacgagtatccaatctaaatccaaaaattaatctaaaaggatgagccaaaaaaattatttgtgattcggggtgagtgagccaaaaagattaatttattaaaattaggaaactaagaacttgattaaatatggaagaggaaaaaaaaaaggagtacttcccccaccaattttctaagaaatgtcattaaaggtaatggcttttactttttaaatattaaatttataatgataattttgtcttttaaaatatgtcttacaaaataaataccatatactaaaaatttaatacaaaataattttttaatcaatttaaacattttgattacgtttcatgataaagcaaacaagataaatcattatcattctatttccaaacaattttagtaaacagcatattaaaaatattgattttgattattcttcatttagttacatttttttattattttattctgattctgaatattgtgcagtaaacgtgatggagatgggaataattttttttattagtattatggttttaataaatgaatcctcgtagaaattatctgccttaacggggattctctacctacctccaatgaaaaatatgtaagggtggtgccgaattgggaatggaaatgaatagagcacctctcatttgttatgtttgtcatccaaattcttattaacttagtttgagaaactcgtaatttcgtagtaaaataaaatattaagaaaaattaaaactttttatagaattttacatttttaatattacccaaaacattttatgtatttcataaatttttatataaaaaaagtattaattaagtattttacttttatttaaacattttttattacatttatcaatacaataattttttctaatcaacataattattaaaattttaccattattttgtggcacatataattattcgattgcttataaaattggggaattactttatatactattttaatttttttttttcaaatnnnnnnnnnnngtttctaaagtggttacagcgctaattgtagtagggtttctatacgattttttgtnnnnnnnnnnnnnnnnnnnctagttgcaataggggtttctacgtagaattccgtacaaatacaaaaaaaaaaatattttgaagtgtaaaaataaaaaaacccttatgaaattttatagactaaattttaattattattattatatttttagactaagtgcatctaaagccctaccattaaggaactcttagttgaggaacttgggttgtccaattcattatttttcttcttattttataagtaaaaaaattaaacttttacttttaaaaactctttctaacattataaatggtataaattatttgaatgtgactttataattattttttccattaatctctttaaaaagaatcacaaagagattcttcttacgttaggctgtaaagattctatgtggtggggtccactttaggtgtacaatctaacccattgcatgtgtgccacgtatgattctccaatttttaattttaattttatttatttaaataaaaaaaaggcacaattggattgtggtttgtggttgttaatgttgttgttgttgtcatcaagtcatcacttaagctgtcttttccaaacctaaaggaaaatttaactttattttaaattttttaaattaaagattagaaaaattaattaaaaagaaaattgagatgtgaaaagtggggtcatgtctcttaataataattaataataataatcttatatagaagaagcttacatgctttttttttttccattccttaattgggaaaaagatttttgagatctttgaacaattctctctttctttaccacacaatccaaccctctcacatatatataccttctctcaatatataaatgtaaaaacgaatattatttataacattattattataatgaataattgaataatttaatgagatatagtgtattatatcatttaaaatgagggtgtttttctatgaagttttagtttatttaaaagaaaaaatgttatctaatatcgctattaatgaaattaagtatcggatcacaaataatttaatgaaatttttttatgaagtatcacttactaatcgtatttaagtatgtagtcctagacactactgatacctaatatcaatactctatttaaaaaaggctaatttggacattttttcctctgaactttgacatgtannnnatcatgccccctgaatttttttgttcgttaaaaattcttctcaaactattgagattgttggatttaaggacttttgtccaattttactaaaaaaaagtctaacgtggattaaaatttatgggcataattcaatacatgttaaagtttaaggagcataatttgtaaatatcaaatttcaggaacacaatttagtatatggacaatcgtcatattagcaaaattgaatgaaattaaacaaaaatccttaaatccaacaatctcaatagtttgaggaaatttttaacgacctgaaaagtttaaagagcataatttagtacatttcaaagttcaggaaacaaaaatcctaattaacttttaaaaaatatgtattttaatgtcttgttgtgtcagggattagatattttttctccgtagtcgattctgagggattctaaatttgtattcatctcatattctttgttctttcattaggatcgttcttgataaggatagctttgttatttttatttattctagtttgaatgatgagattattatttaatcaaagtttattaaaagattattcaaaaaaaaagtttattaaaagatatttcactgtgtgatttgtcacttgtttattcagattgaatatctaacattcgtcacattatttatttttttttgaaagggaatgtcatttcaaagagacgacttaattaagagatttaattaaaagagggctcaatctcaattagcaggctcaaccctaggtataggcggctagatctgtgcctaggccccacccaatttaagggccgaaagaaaaattcttttaaaattacgcatttgttttttcttttattaattttgaaaataacatatttttttctaaataaggaccaaaaatttctatttttctcatgacctactaaattttaaagccaactactctctcaaccaggtgcttaataatacacaatagaaaaccatgccacaactctgaaaaaatacacaaaagaaacattatcaaaagcattacacatgtctaaatctcttgaaggatattactcaaattattagaattagataatgacttataccttatttagttgaaagtgctattaaaattttcttcatttattttttactttttaatgaacgaattataaatatttatatttttctaaaaaaatgccaacattttttaaatagtaattttgaactttatatttatttgaatttgttcaataaaaatacaaataattaattaattaattaattaattaattgtgaggtggctacatacaatcgtcacgtaataacattgtgaaagaatttgaggttttgttttgtcatcacatttcttttaaattaggacctcaaagtcaatttttatattcaattacgttttttagttacgtaacaaaaatatatataaaaacaaaatcatatttatttatatttatgctaattaacttacaaaaatatatattttaattttattcttaaaaaaataaaataaaaaaatagagtcgtgtttgggtagaagaagatatttgcaataattggagtaacactgtcagaatatctaacagtctcattttgatatttcatattagcttgtcatcgtcatcaaagtacttccttattccaatattattattaataattaattttttaattaaaaaaactttttttttcctaaacacttattttgtattatttttagtgttttattattattggtataattaaatatgaagtataacttatgacacatttactatacagtattcaaaatcggaataaattagtaaaaaaatataacaaaataaatgaaaactaatcaaaatcaatatttgtaatatgttatttactaaaaattnnnnnnnnnnnnnnnnnnnnnatttatcttgtttactttattaagaaacgtaatcggaat

SEQ ID NO: 14572 - DNA, 12738 bp, Cannabis sativa
accacaacgtctcttggaggtttaggccacgtcccgtgcaagcggcataccggcaagccaatagaaacgtacctgttaacctctggcagcgctattgggtcggtctgatagtgtccatgagtattccaactcatggagacatatgagtcccctcgtggtcctcatatgtccgctctactagtcccactgaccagtagtagctcatttaacaccaaggtgccaggggtggtggagagagatactccccccttaaagagcattctaagcttttagccttctaccaggatcatacatgattttggctatgtagacatatggccaaaccatataccaaatcacagagtttctcaaatccaattgtgccattctatttgtagactcaaataaatggtgaataccaagtcctgtctctatccgaacaatgatgaagatatttacgaaaatgccacgactgtacaaattaagcatcaacatgccaccagcatacacaacaacatgcgccaccacttgaccactacttgccaacttgtgggcatcacctagcttgtaacatgccatcttggcatgcacgctacattgagcattgtaaacaatttttatcttcttttagtgatatttctttacgttttgtcaaacgatatgctaattaaactactcactttataattagagtattttgtttatataatgatcgtttatttttaaatattttattttattttgaattgtttttattatgaaataagtaaattaaaataataataatataataaacactcaaaaataatttttattttaggacttttttcttcacttttatattttaaaatgatttttttttacatttttacgaaaattcaaaactcacatagtaattaatagaatagtatatttcacaaataaaatttaaataacaatctacataaaaactttaaataactcaaaacataaattaaaataaaaataaataatagtatatggttaacttctctttattttatttagattaagaaaaggcttatggaaggagttacttaagtaacactctacactcttcagttcttcataaaagaaaaaaaaatgatcagaaagacgaaaagcctccaaatccaaatggattgtcaactccaaacaaaggtaaccaaaatcccccattttcgtttttgttttccttttttgcagacccaccattcttacgattgtgttcatgacttttcaattccatgtatcatttttggaaagaaatcaaaagtccttttttttttttattatttgtataaactccatttgaatttggagttggtttggtttcttggattgaaaaagacactgattaccgaatactcatttctttgtattgaagatttttatactctctatcacattttgctatgtttttcccatgtgaaaagatgtgattttttatctgtgattttagggtagtatagttatagtaccacaagtgtttgtgaaaaagcttttagttgcttaccacaatttaaagaggtttttggttttcattttttcaatcaagtggatctctttttccatgttttttgttcatgagagttgtgaattagtttccttttttttttctttatattgtataaggtaaaacaatattctgattgtatagaaataagtctgacccagttggttcttattttaatataatttagtaacaacatttcttgtataattaatatgatttattattcctttctctttttcaggaaaaagtttgtgaactatgtggtggtaatgatggtaattttaaacatttacttgtaacttgctctgtgtgcaacacaacttgtgaacacatgtaagattcactctcttagcatgagaatgcctttgtttattctaactttgattattgaattatctttatgatttgataaatgaagtcaatggaaattatttttgtgtgacatggattagatagatgtctatggctgttattgctgtccttcttgtttttttttatgttgttcaagtatcactaaggtagcgtttggttgggagtaatgaaatggaatggattcgaatcgaaatcattccaatggaatgggttttccactatttcggtcgaatagaacatttatcaatttttttttatgtattttctatttgattccatttgatttctattcctaaccaaacctcacctaattgcttttgttgacaaaagtttatggaaagaacagagcattgataataatcaatcttaaatgatttttctgttttcagttattgcatgagaggagaagtaaaggatgagatacctgaatattgggtctgtgaatcatgccaaagtgttagttactcgactttgatagaaacagtgaagaacgacgaagctgtcacaggagcattgagaaatgggaaattctcagtttcacagcttcattccaataagcaaaagactgtagaaactggtaaacttaagttcatttctcatgaagaagtcattaagctatctcaaatgcttactaactctaaaaagaataggtagagagatatatgtgcatagcatctacattgctataaaattttgtgttgaaattgataagattgtttgtatcatcaattctgcatctttcttttcatttgtaaattcattaaaaagaattacattttttgcatagaaagtcaagagggaaatggaattggttgtaattgacgataattatacagttctgtgtgtgtttgtctgatcatgtaattacactgtaatggtgtgtaattgagatctgtgtaattgagagatctcaattacactctctaattctcacaccctcatgagaatttggtgtaattatattgtgtagaaactaaaaactatccattttaaatattagatactaaaaattattattttcgcatgtaattactaactattttgccaaacaaaacattcagaattcataagtaattgccacattatatccaaacacaccttgtattttaaaatagaatgtaattacttctctagtaattacacagttacttctaaaaacaccctaatatattaaggtggtgttcctaggatcctttaagagaaaaaagttgttgtcccccatgcacaaaagagcctctaacaacaaaacagccggtacattgttgccatcaccattcttaagttgctttgttgtttgattcacagtctatgtttctgtaggtggtaaaactaaggatgttcaagaaggagagctgccgaaatttccaccgagtttttcctcgtatattacattttttcctgctccaaatgcaacttggaagtgggtaacttatcctttcaatttatttatttttacttgaaaaatcttgaatttctcgtactgtgatgttgtggaatcgttgcttgcttgaaaaaaaaaaatgctcagatatatactttgtgctttaagaaatactcctcctcaatgcttctctgtgattggcatttgtggttgtagttttgatagttttaatctgcaaattaaatcacaaaccagaaaacaagaagataaagtaaaaacagaatataaagaacacaaggaaatttatgaaggttcacaccaatttggagctactcctcttgaactcttttcgaggaattcgatcttcactatgtcaatgacacattacgaattaatcaagaaaatttgacaactaagtactgaacatctccctttgagtaaagcttctgaattggagaagaacaccttcaaagtcccttgaagaattaccctcttcccttcgacttctctctgttacgacaattttaaaacctcaccaatacagtggctctctctgtactaagtactgattgcaatacttacaaaaactgtacttatacaaatgaaaagaagctgacttgaccactaagtaagccaaccgaattaactaacttcaagagtagtcaaacttgaatatccaatccgtaagtgccatgtcatcaagataaaagactaggatttaataaagcttctctgagatggtctagacagttatacagtaaaggtgatttcccatcatctctttttaatgcaatcttgtttggtatttgtgagaataggaatagaatggaaaggaaataccaattcttttgtttggttgaaattttggaatggaatgagtatatatgctttcataacaaaatgcttgtcttttcatgtatctcaaatagtaaatcctttgaatttcaactgttttttctttcttcaggggagacttcagcattctaaattggacaccatgtgaattgcttggtaggttccaggcacaacttccatgcaaagttcatcaaaaagtgtatgaaatttcgagaaagatgcctaccgttcttcaacttaagattcttcctcggtgccatgtcttcactgatctcttccaggatgtttgtccagatcttttagatgttggaatgtactttttcccagctgatgataacagtacaaggtccatttcagcttcttatttattagatgatatcgctttttgagttatgttcttgtgttgtaaatacttttcttttatatcacttgtagttcaagacaggaatatgtgaagctgtttgaatacttggaattccataaatctgttatgacaagttgtgtcaatggtgttgagctactaatattctcatcaacacagcttaatgacgattcgcaaagtaagttttttttctctaaattcttgttgttagtgtttctaaacaaacattcttagtgcctaatagatgatatgaggctcgagtcttttctgagtaccttacatagcagttgaatagtttccttgactcgaaaaattatttatttatttattttttattttttggaaaaacagaaagatgccacttgtcttaaaatgatccctctcccacgctatatattgaaaaccctcacttgtggcggaagaaaaccgtgattacataggttttagcataaaacacaccaaaacaaacaagtatccaatttggataatccaaaacagttcactagtatataaaatactcatttgtccaaaaataagaaaaaattacaccgaagctctccattctctgtgtaaatctaagaatgagaattgctcaaaatacttagtcttgacgcgaaaatttataggtttagacggggtttccttcatgaaaaatatattgtcactcgcattattttgtattgacattttcattttttcaaatcttaaacttatttaggttatgactaaactcacaggtgccttaaattaagtattcattttcatatgaacactacctgttgccattgatgacttgtttctcaaatgagctagaaattgctatgtaaaacctctataacatgtctgatgttttgttatgataataagattgtctatttgctattgtctttatatgcctatacacaaaatttcctttcccatgtattttgccagatattttgtcttcagaatcaaagcagttcttttggggtatcttccgtagtagcaccaacaacgatacgcctcttccttcaaatgcacaagagaagctccccacatcggttaattctatgaccgacgatgaggacatggaaatcgaagtaccattgattcgtaaaaggcgatcggtagaattcagaaaagactaaactgaaaaaggtttcatatcagatattgtagctgttttcttaaccatttttatttcctcattcttctcattcttgtttagctgagatgtacatatatagtaagaaaaagaagctcaatggctatgatttttttgacagaatttggaattgtagtggaaatattttgtcatttttgtatgagatgatggtgaatgagattttgattaatgttacaagaaagccagagttgaatttgtcattttgggtgttcaatctttatttaatctcttagactttctctaaaatgttcaattgaattggaaaatttgtcaacaattatataatctgctcgagtatttacaaataatattaaaattgtttcattaataattccattcaaagtcagaagtaaccatcacaaacatactaataataaatactattaacttttataacctaaatatcttcctaaactatatgagactatgagtggttgcaaatatctcctttgtgaaaagtcttcataaaaggccaaaagggcaaacaatatatcattcaaaacttaaaaagagtcttttcagtagagtcggcaaaacaagttagacacgataacacgactcaaaactcacacgaaagtaagcgaatttggatcgtgttcagattgacatgactaacacaaaacaaacctattgatgacctatttaaaattattttactactttaacatgtcatacatgaatcataatcgtgttgaatatatcataagcgtgtcattagttgacatgtttaaacaaaatatgcttatatacagtgcatgttcgaatcgagcatatacctatgcaaacaagaattatcacccctactttttagtatcctaattacacactccaaattggatatgagaaactggtgtggtgtggtacagttcaagcagcaaaagaaagaacaatcagattaggtagctaccacaaagaaagtactacataacaagcacttaatacatacaattagcatatatatatatatacaacttctttgggtgaagttcaaaaaagaaaaagcttggaatatcaccatcaacacaacccatgtttctttctagatctcatttcatgtacttgcttatccattgctggaataagcttggaatttcatcatcaaaacaatccatgtcccatttcttggacttgcttatcaattgctagaatatcgttcgctttcttgttctgcaaatccaatctttctttcatttgatgaatttctacacctgaatccaaaatcctgcatatgaaaaatgagtaaaagttattgactgaaccctttattttgttaaatgataaattaaaccttgtattttttaaaatggtacaaaataataccttaaactctgatattttcttttaatacacccaacttgaagataatttataacacaaagatatgcaatattatgtatccaatcgagttattattaaattttttaagatactattttgtaccattttaaaacataagattcaatttatcatttaataaaacagaatatccaatcggtaattttttcaaaacgcagaatcaaaaataatatttatccaaaaacaaatgaaaatctatctttgctatgtaacattaatatagattcaaaatttatacctgtaaaatcactggtgaatgaggaacaatttcaccagataacaaattgttatgtttatccttctctccttctccacatgtttccttctttacaacatctttatccactaatgacataacaagatccttaattttttcgaaatccatctttaatccactaagttctgtaattttgtgattaagctcatctattttctttcttaattcaccatgctctttcctcatttcagcattctctttcttgatttcaccattctctttcattaaatcctgataaaatatatgaggtgaaatatacaataattttacaaatttgtaaaccatatggaaatataattaagaaagagtaaatagtacacaaagttgtcagtttgtaagcggcataaaagtataagtattcaatttttataaaactgtaatttttctcccgtttcgtcaataaagaccctgttattgtcttaaataagacacttataaaacccgaattttagattaataggtttggacgaaaacatgtagtattagttactttcaaatcttattttaataaattcaaaacagtctgtattgacgaaactgaaagaaacttccaattttacaaacattgagtatttagcttacaaactcaaaattttgagtatttataatagaaaagcacctttagtgaaacaatatcttcatcattattcattgttggactactaaaatcaggtggtgtccttctggcattaaagagagctaaaggggcataaacaacctgtatacatagaaaaataatatcaaaaaaaagaaaaaagaaaaagaaaacatagacaagataggaatacacaccgtcggatctttgaaaacttttctccatattgtatggaggcgggccgtcttggtcaacttccagtttaaaattttaggaatgttactaccaaccttagttgcaaacaatgagcctaacttcggaagaacttcaaaaccccaaacttgaaaagctaaaggaaagccacataactcataccccgtttttcgacaattcacagcagtagaaagattaccaatcgttgcattgaaagaacggcggccccaaggatagttttcaaatagttgttcatcatcaaccaatctcagaacaaaattgtcaatatacctatcaccgcgcttactttctaaaatgttttgcacaataaaaacctttgtcaatttaacagcatcgtcatcatcatcaatattggttttcataagaaattctgccaactcgtttcttttaatgaattctttgtcaggaaagtacttgttcagtaatcgattagtagggcagtcaatgacatcaaaatctggtggaaattcattgcaattcaaacccgttatgaaaccaaactcagcaataccaaactttgctttgtggtgaccaaaactcaactgaagctcatttatattagagttgcactcttgatgaagtaagagagagtggataatcatgtttgatggtttgagagttttatctaaatctaaaagaaatccaaaacatgatcctctcaacttttgtagctgcggcgcgcttagaaagcttcgtatacaatcaaaaccgtgccaatgacttgaaatgtgaatgttagaatcaacaaaagtaaatttgtttgcatcgaaattctacacataaaacaaacattgaagaaaaggtaatctttttttttttatatataaaaaaaaaaaaaacttgatgaagtgaaaaaaggatacaagacattatatcataaataggtctctaattctaaattctaatgatgctaagtcaaatgctcttaagacaactcagctatgcattggacatcataactgaatattcaacattcggttatgacagttggtactcgagacttcaggatttttcttagtctccattgttgtacaaattgaaactcggattcaataaagagattatcaagcccatatggctggtttggccgtggcgtagagtggtgtctagtcaacactcattcggaaccacgtatgtgattgtgtttttctttatgtttcaattctgttaagctatgattccttgattaaaccagtttttagtttatgattgattgttgatcaattgtttttggtttaaggtgtcaattatgttcttgtcttgaggttgtggtttcaacaatgtaaaccaactccaatttaatcataccctttacatgtaaaccaacaattttgtttacccttttaaaagttgaatcaaagattgttcaaaacatattaactacaataaaacataatcataccttataaattgcatccttctttttattacgacgacttgaagaaaatgttttctttcgtttattttgacgacgtgatgaagctctcctttttttcttcattagggaactaattgtcatatctacaatgataagacaaacaataaacatagttaagcaagatgacatagattgaaactaccaacaataacttgcaaagtcaaaatcaactattatatttgtggatttctgtagtacactcccttaaaaggatgttcgggtagacttctaacctgtttcagcatctataaaagttttttagtttattttgttttatagttgcatacgttgtagctatttaagatcatttgtaaattttcaaaaaatttcgaatgtgttacagtgcccaaaataaagttcaaacagttacttaacacgagtataggagcaaaaagttgtgtgtgcaacgaaatatttaaaccttattttcagtattgtaaactactcgaaattttctaaaaacttacaaatggtcttatataactattacgtacatcatcatgaaagaaaaaattggattaaaaaagctctattaaatgctaaaacaaatagggagtctacagaatcatatattgtagcaatgtgatctaattggctgtcaaattagagatgaaattgatatattggggaacaattacaacacagtcaaaaatttatagcagagttagtaagcatttgagatagttaaattagtgtacattgctaagtttttgacctttgactctttgaagagctactcttctcatgaggaaagaacttaactttacctgtttctacagactttctcttcttggaatgaagctgtgaaactgagaatcgcccatttctcaatgctcttgttgtgacagcttcgtcgttcttctcagattccatcgaagtcgggtcactgacactttggcatgattcacagatccaacattcaggcacctcatgctttacttttcttctcatgcaataactgaaaacacaaagatataaaagccataagttagtgacacttgaacaagtaataaaaaggacagcaataacaaccatagacatctatctaatccatgtcacacaagtaatttctattgacctcatttatcaaatcatgaacataattcaataattgttagagagttctacatttctagttcatggaaaaataatatcatatatagagttcataatctacttacttctcttttagattttgagatggtaccttatgcatcttacaattctaagattgtatcggaggcaaaaacaaaaacttctaacaagtatccgaaaacaaaaagtagatcgagaaaaagtaggccaacaaaagccaccaaaaatccaaaaagttggctcaatagagccgcttgtgatcgaaatataatgtcacatataagatagatgaattacttctctcatcgctaattaattttgagatgaaaccccgtacattttacaattcttacaataatcaaagttaaagtaaacaaaggcacttccatgctgagatagagaaagagagaatcttacacatgttcaaaagttgtgttgcacacagagcaagttacaagtaaatgtttaaaattgccaccattatcaccacatacttcacaaactttttcctgaaaaggcgaaaggaataaatcatattaattatataagaaatgttgttactatattacatgcaaaatagctatagaccaattgaagcaaattaaatcataacaaatgaaatcaataacaactcagcaaagaattcccaatcaaaagcaccaacttcaactgggtaagactaagtttcatcaaaactgtaaaattcttactagcataatctacagtaagaacttgactattactagtatattatataagtatttttttcatttttacactttaaaatagtttttattttttatttattttttttttttttgcatttttacataaatccacgtagcaactatcagagcaacttaaatcacaagatttacataacaatccacgtagaaatcactgtaaaaattaccgaaacaacccaaacaaaaaaaagttgaaaaaataatactaacatatatatacatacaaaatataaagaaaaaaggaaactttaccactctgatgagcaacaaacatgaaaaagagaccctcttgattcaaaaaggaaaaatcttttgagtacttcaaaattctggtagattagaagatatttggtctatcaccaaaaattttacccaaaaatttaattataccctttacacgtaaaccagcaattttgtttaaacttttaaaagttaaatcaaagattgttcaaaacatattaactacaataaaacataatcataccttaaacactgcatccttctttttattacgatgacttgaagaaaaggttttctttcgtttattttgacgacatgatgaagctctcctttttttcttcattagggaactaattgtcatatctacaatgataagataaacaataaacatagttaagcaagatgacatagattgaaactaccaacaagcaacaataacttgcaaagtcaaaatcaactattatatttgtggatttcggaagtacactcccttaaaaggatgttcgggtaaactttcggcccgtttcagcatctataaaagttttatagtctaattttctttatagtcacgtacgttgtaattatttaggatcgtctataaattttcagaaaattttgaatgtgttacaacgcccaaaataaagttcaaacagttacttaacacgttttttgcatcaaaaagttgtgtgtgcaacgaaatatttaaaccttattttcagcattgtaaactactcggaattttttaaaaacttacaggcagtcttaaataactataatgtacatcatcatgaaaaaaaattggactgaaaaagctctcttagacgctgaaacagatagggggtctaccgaaacactcctctaagggtgtactatagacttactctatatatttgttatattgtagcaatgtgatttggctgtcaaattagagatgaaattgatacattggggaacaattttaacacagtcaaaaattcatagcagagttagagagcatttgagataaattagtgtacatttctaagtttttgaccttggactctttgaaggtctctgtagatagtttaatgacttcttcatgaggagagaacttaactttacctgtttcta

SEQ ID NO: 14573 - DNA, 3492 bp, Cannabis sativa
acaaaaaattgttttctattctcacttttaaaaacacaattttaaaaattaaaaactgaaaacacagccaaacaagctccaattctctctcacttgttatgtaatctgaaactttatttgtagaggatcccgagtaaaataaaggaacaagttgagacttgccagggatccaaggatccgaaccacaaataattgttgagccatcaccaactttcattcttaggtcttctttcaataaaccaacaaatgccttgccatggaagagatgataaaccacctttccttgcatctagaaaattattatttggaagatatcgaccctttaacacacgacttagtagagaattaggattttgaaaaattaaccaagcttgtttagccaataaagcttggttaaagtgaacaaaatctctaaatcccatacccccttccaacgaattttattcttgtcggtcgatgttccccaccagaagttttccatcatagattcaatttctttgcaaaacttggatggtaagttaaaacaactcatcgcataggtaggaataaattggattaccgctttcaagaggacctctttgccaccaatagaaaaaagcttgtgtgtcaaagagtgtaaaagcttccaaatacgatctttaatgttgttgaaaagttgctttttgttgcgctcagagcatgccgggagacccaagtatttttcatgacattcacaaataggtatccctaaaatttgctggaaagaaagcttacccgactcttgagtgtttggtgaaaaagacatgacagacttatctgtattaagttgttgcccggaagcacggtggtaaacatccaaagcccttttaatagcaccacaagatctgtcatcagctcgacaaaacaaatggctatcatccgcaaagaataagtgagtaacagttagggcaggtcgtgaaactgatagacctttcagccgaccaattgattcttcatattgtaagagtctagataaaccttcagaacaaattaggaacaaatatagtgatagcggatcaccctgacgaagaccttgttgaggaatgactgatcccgatacttcaccatttataagaaatgaaaactgatttgtttgcaagcaagtcatgataagagagatccatctaacaccaaaacctattttccccatgacagcagaaagaaaagaccattccactctatcgaatgccttactcatatcaagtttgagtgcagcatagccaatcttaccccgagttttatgcttcaagctatgcacaagtttgaaagccaccacgacattatcagttattaaacgattcggtaagaaagcactttgtgactccgaaatgacatgtggaagaatgcttttgaaacgaaataccaacatcttggagatgaatttgtaaattacgttacacaagctgattggccgaaagtctttcatctccttcaatttttttgttttttttttgtttttggaattaacaaaatagtgttttgttgaaagcagttggagatccaccatcattgaggacatgaaggacggtttttgtcactaaaggaccaataatatcccaattttgttggtagaacatagcggacataccgtctaaactcggattgctatcacttcccatgctcttaacaacctctaatacatcacatgctgtgaaatcttgcaacaaaaaactattatgggcaactgtaatagtggtaggaatggtagacaagacatgttgtagagcccaatggtcttcctcctttgctgaaaataaatcttagaaataagaggacacaatagttgagatacccgaacttgatgttaccacattaccatctaagtcacaaagggaacgaattctattattagattgtcttactgaagctttagcatgaaagaattttgtattacgatcccccgattaaagccaatcaatacatgaacgctactgccaatattgttcttcattagcaagaagttcatctaaaatattttcagcattttgcacatccttaggaatggtttggagatggagcatgaagggatttaaccttttttttgttgagttaatgtctcttttgagatggccaaattttgaattatgccataattaggtgacccttaaagtagcatcttatatacatttatataaaaagtgtttccatcccatgattgtataaatcaattcaattacaattgaaaaatttgtgaaaaaaagtttctattccatgactgtatatgagtgtattttttaatatctacttagatcaaattgcatattggataaggtgttgaaaaattcaacggaaacttataaaaatactgatttttgcttaatttttacaaaaatactaacacggtagaaattacttttatactggattggactttttttttttcttttatactgtagacacagaaaattaataccaatgatttcaccttcgtcccccacacatagaacctactcggcaacaccaaaacacccgaaaaatacccattaatttcggtgaaataataaacgaaacaaaaaatttagacactaaaaacccaccaaattattttaaaaacaaaaataaaaaacaaataacaaactgaaaataaaaactagaaaaataaagctagtttacataaatatggtgaggaaacttaataggaaaaaatgtggtatttaaaataaaaacttaacatatacgggatatgctactttgaatcaccatataaaatattaaaatttcctgcgtatattttttttaaaataaaataaatgaaactacagtgatcgtcagagttgtcattgggactggaaagtcggcggagtttgctgttggtgtcaaaaaagtcgtcgggatagttgctggtgtcagaaaagtcgccggagttattgtcgccggagttgttgttggcgctgaaaaagtcgtcagaattgacattgtcgctaaaaaaatcaccaaaaaaaatactaagaaactggtttcttaatgaacaaacggtttcttcatcgtttcttgatgaagaaaccaattttttagtgatttttccggtaattattctgacaacaataccaatttcgacgacttttctggcaactttcccaacacctgcagctactccagcaacttttttggcgccggcaggaaactccgtcgactttttcggcacaagtgataaaacttcctaaaaacaaataaaaacattaaatattggctttgaaaacctaatttacatatatatgacatatcaaataccttaaaaatatttaaaagtaaaaaaatgccatataaattggtcaaatttaaaagtattatatttaagttaacaagttttaaaatcccatagtgagtgtaattttctctttattaatcatatcaaaaactaaatccaagcccaaccagtttatataaaaaatcatgcttaattttaagggattatttcacaaatacacaaaaataacaaaacaattacaaaaatacgatttcacaaaattttaa

SEQ ID NO: 14574 - DNA, 2983 bp, Cannabis sativa
aaataaaaggacagaatttggcagtggtgaaaattcaaggggcaaattataatatattagtcataattcgaaaggtaaaatttctaattagttaaaaaaaaaaagtctcaaaagtttagaaggaataattagcaacggtaatagtttaggagcatatattttttttaccaaaattcagggggcaaatacatatttattcattaaataatgatccaacttattacctcttcttgcagaaaagtgggaagattctcaattgaaacaaggttatatatttcctccaaaagtttctcttctttgatcccagaccatgtctctgcaggcaatgccagaagaagtgctgttaaaacatcattttcggctgggtgtaaccaaatgtgatctttagagccagagcagtggcaggttgaacttgactcggaggaaggtaatagcatgtcaactccctgttcagagtttccatttaccacagtcccacatactactgtgattggatttctgccattagcttccaagcacttaacacatgtttcccgacagcagtagccctgtgaaccagacttaccgaataaaatctctgccccgtggcaacagacacttgcagctaatttcggtaaattatcaccgttgttaggagttgttatgtttctgcgacaggaattagcggatgacagatattctgttacgtgtttataaaggccggtgtcttgaacttgtctcaatacttcctcctgtacaaaagcattgaaaagtgaataattggattgatgagcaataaagtcttaaagtataaaatgttgaaactttacaacaccttgacagagagtctagcattctcttctgggcttacaccttgggcaccatcttctcgccttcgaacttctgcaacccacttaataaactcctcaaaattggatgggagagatgtaaaaataatagaaatgactttctgaatgtccttcacactttctgacttcaagagaagagggacatcttccattaagtatttggcaataccgatccaactctcgtgtttacagctctgtcggtaacaacacaataagttcaataagcaaaatcctaagtatgcaaactaacaatctattggccacttatctctctattgtgatcaacttcggcaaaggagcaacaaaatacaataacggaaatatttttcaaaattatagataagttatcaagaaagccaagaaaaagaaaagaaatgaatgaagtaacttctaagatagataatccatggaacattaagcaattcaacatccacaatgaatttaatttaatattaacatgtcttatatttacacttaaattcaaaacatgcaacgtaccagggtatacagcagtccaggctccctgtgaggcctagatactagcatgaacctgagaaaagtaagaagaagaaaaaagtagctttattgggaattctaatataattttcttttataagcacttgaactacagattcaatatcaacagaaaacagtttgtttgtttttcagaagactcttaccctctacgctgtccagtagtttcatcaacattatccatggcgtcccatagaattggtaacggaacccaatgtgggggatatttgaaacgtgcaacatctaagataagtgccatgtcctttccagcatgataaccaccaataggagaaaaatgaccagttccagtctacaacaaaaatttaattgatacttacaaaccaaagcaacaaactcaacattaacattcatgcacatatatgagtacacagaaagacacaagaatctcttaatgccattattgtagtgccatgttaatctaagattcgaagttaaatggggaaaatttaattgctgtcttctatattaaccaatttagcatccaagagaaatcacacacgcaaacacgggcaaaatttgtttttctaccccttgaaacaagcacacatacacagaacaaaagttattgaaatgaaataaaattaacctgtttgagagctgctctattatacgatgagatcaaatgacaatcatctgaagtggaacattccatgacatacttgcggaaatcgttgatggtactatgatttgtacggaaagcttgaactttggctccagcacattgagccaagcatacaagcttaccgaatgagatgcctcgagctttaaccttttccaaaggttcacaacaatctaacatagactcatcaaaccatctccaaggtcctatgagataaaacacaaccagctacacccatttacataatataattcaaagggatcaatatatagactttagggattaaaaatttgatgagctatgatattcagttttaaggaaacattgaactctactgaatgtaaatattgaaaaccaaacctttccattttcttccaggatcaatagctagggcattcaacaccatggacaagctcgccaatccacagtaagccggttctgactgagtctgaaaataagaaatcaatctatagaaattctccatggttccactgtgaattgcttccataaaaagttcctgcaaaactccaaaacaaggtttagtgagtgaatgatctaacctgtgaaaacttaagtttctcccctataatatcaaaaatttgaaaacccataatgtataataagatacacaacctacagttatgatcactgtcaatgtcaattcataataacatactaatattaccaaaaaaaaaaacaatagaatttaatactattttgactctgagttttgcaaaagttagtaattaaactctattttgtaaaataacaaattaaactttgtattttccaaaatactacaaaatagtacctgaactcaattttcgataatttttataatataactgatttgatgataatttctagcacgaacatagaatgtcataacaactttagatcaaattattattaacttttattttgacaaaagatcagtttaggttactatatgaaaaaatcc

SEQ ID NO: 14575 - DNA, 10558 bp, Cannabis sativa
cttgtttggattcaggaattttcagttttgtgatttttacacttttaaacaaaagagagaactttttataaaagttcagcaaaagtttcaattttttttttgagaaaatcaaagtttataatgttagcaagccgtaataagtagcaagaagttctgaaaattcattacttgggttttgagccgtttttctgaaatgttccaggtttgccgtttggatgatatggaaagggaagcattgtaccagaaaggaaagaagaggccgctggttggaatcaatgatgaaatatataggtttaaagttttattacctaatgggacaactattggattgactttgccggaacctggtccaaaaatgccagttgatgagttcattaatttggtgaaaggtgaatattatcgacgttctaaatcaatgcaatgtaaaggacggattaactggaatgctggttctttatctcttcaagattcaaatgatgccaagatcacaagcgctgtgtatttcaaggattttaaaccacataagtgccacattttaatacttcgtgtgagtatacatgggaagtttggttgtagttgaaatggagaaaatgaaagagagatgaggaaaaaaattgataattattttgtttcttgaattgtttcttttagtttagtatggtatttttcaatattttgattgctttagttcttatgtttctacctgtcttgcttctgaattaggatggctctggcaaagttactgaaacttttgaggttagtactcaatctgctttatcttatcttagttcttaaaataattgagtcaatagggactttaatacatgtgtccgtagtagcctcacactccaattccacgagttgcagaatatgtgggatttgacgcctgataccgacctgttaaaggaggtcccagaatcgtacacatttgaaactgcccttgcagatttgattgtaagtgctcgtttcagttgaataaaatacgagtttagctgattgcataattttcttgtcaacattgtatttaatgctcttgtgtttattttatcaggacaattctctgcaagcagtatggtcaaacagtaaaaatgatcaaagacttattaggtattacattgatgtaatattgttattattgatacgtgatttgctcgcattgtggcttgtgatttttagagaattatttatgtttgtgctagttgcatgtgcaacttgcttgttttctttttccttttttgctctagcgtactacataaagggactgaatttagaaaaaaaaaagcatatccagtctgtgattgtttctctcaatatattttcactgcagaatatctaatattgagtgacattttgtttttatcttttgaacgcagttaactatttttaacttgctctgttatgtcattttatacactagtaacacaagatagtacatttttaactcttaagtaacatttgttgtgtttgtgtttcaatgtttgcagtgtggacatattacaggataagattgtaatctttgacacaggtacaggaatggatggcactgatgagaattctatagcaaaatggtatgtgctagtagtatcctttccagcattttgtatgcatttgaatttaaatggtgatttctttttatgtgagacataccagtgttttaattagcgtcttctacatactatacaggggaattatgggtgcctcacttaaccggtctgaaaaagaacaggctattgggggcaagcctccatatctaatggtaaaccagtgtattttgtcttgtttggtctttcttgatctttttacctatatccagcatatattccatgtttcctattgatttgcattttattgatcatcatgttgctatatcaattgaatgtcttaattgtaaaaatgtcttgtatcttctctaactgtaatgtaaagattacacacctcttaaatgctattgccttttattaaccaaatgtcactcaagtgtgttatgagtcgttttccctatttatgcagccttcttttggcatgtttgggtatgggggatcttttgcatctatgcatttagggaggtataaacagatccacttcttctattttgctacctcagagtcttttttaatagtaactaacaaccatttattgcctttatattctgtttcagacatgctttagtatcttcaaaaacaaagcactcaaagaaggtatatactttacgtctagagagagaggctttgctcagccgttctggctctgaacttaaatggacggtaattgagtagcataagcagtttcttttcctttgaagactaaatgattctattttttatgatttgacaatgccttgactaatcgttttctgtggctgcggttcactgtgtttgtttatattagactgctggaggtcttagggatccttcagacgatgagcttgcaaaaacaagacacggaagttttactaaggtaggctgttgcttccctttaatggctatcaggtgattcttcatgtgcatctgtaagaggagcttttctagcaaggaggggaggggattgccaccctacatatttctttcttacttctcttgcttattgtaactgtttgaagtgtcattgatgtgcattcaagaatggatcctttcttttttaaataactattcctttagcatttgcctagtggatttttcagctaatctatatgccttgagtattagcattgtaagtctatgacattgatgtgcctagtgagtctgtaactctggtttttgtgaacattaaaactattttgtaaaattactatactgatatgaaaattttgcaggttgaaatttttgaaccaaatataaagacttcagacatcttaggacttcaatgcagactgaaagacatatactttccatatattcaggttagctgtactccggtttctctctctcttttcttttattgggagtttatatttgagttagaatgctccaaccatgtagatttggcatggattctgtgtatattatggtgtagagtttgttgtatgatctttatactgcaataccacccccaattttctcacttttgttatgtgtacatcccttttgtcgggattgcagtgtgatgagatgtccaagtcagggaggacaattacaccgatatcatttcaggttcactctggtcttgttaagaaattttattccttgaagtttgtttactgattaaatatggttagtgtttacctgaagttattttatgggttctcactgacacgggtactatttaatatcaactactcaatggagtgctcaaaagaataattgtaaaagaaattatcatatgctggctggtgtgtgagtggattatcttaagaagaaaaaatattagtgtgaagtgtaatcttatcttatatacatactaagacatttatgtagtttttactttgtcttatttcttatactaagtgcacgctcatgcaagaaaaattgttgagctggttattgttacaagcatttgagttcatcatatgatttgtcaggttaatgacactgatttggctgagatcgatggtggtgaagttgccactacaaacttgcattcttgcaatggtcctgattttgtcttacaagttcatttctcctttaagcaggacagtaaaaccaagagtccaggtaactggctagtggctatggcttcttttgtgaacttgtgacattgttaattctctaattttatccacatttgcttgttttctagtgtcatctctgttattagcatggttttaattataaatatttgttctgtttctcaacttaaagctgtgtcaggatcaaggccatatcaagaagccaatgcacggctgaaatgtgtgtattttcctgttgttaaggtaaattattatatgcatgacttttatttttctgcatacacttgggaaattaaagtgaaaaatgtctttcagggaaaagagaatattgagaggattttggagaagttaaaagatgaaggacatgatgtctctgaaaattatgaaaactttagtcgcgtttctatccggaggcttggtcgtctcataccagatgctcgttgggtaagtttttaacttcattttttttttacagtagaggctcctgggaatctttatacatatattgtctagtaagtattaacaagttctgcttgaaactaataatttactattggcatgaaatatatttatttagttttcttaatctagaatgagtaaaatcttattaactaagaactattagtgcctgattagtacctgggggttgaatttatctttgtatcatttcacatttgagagacctatttttaattgaggccagtctagtccttgcttaaagatgaaaataaatgttatcttaattgtatttcctttcataacctaattaaaacaaaatgtcaggcatggctgcctttcatggacttgaggcataaaaagggaagtgcagcacagtcattgaagaaatgttgtttaagagtcaaatgctttattggtagggtgacttcaacttttcgttttttgccttctttttctctaagagttgctacatatctgcactttgttacgaccaatttattcgtttgaggattttctgcattgctctcattgtattggttaaattaaacaatgccatgttgcagatgctgatgctggtatcaatccaacaccatccaaggtaatgctactctttcatttctgcagtaaaagttaagcaaatggttcctctctctctctctctctctctctctccatgtacatctgaaatatgttggtgataccttgtacagagatgcactattgatacttttttctaatataaattgaagagcactcgtggtcaaccggttattgacttctgtaacctttataactatactggctgtgttaaaaaaaatgtgcattctgcatctttcttacatatactaataaaactaagacatcagtagtttcatttgtgtgctgagagcatttaactttttccatttgggtgtacattatattataggacataattactcaacacatgtatctttttctgcagactgatttggcacaccacagtccttttactactgctctaaggaattttggcagtaatcttcacgagaatgaaaaaggttttatttgttcaattggaaaatttgtgcatctcatttagttgcatctccattgtaactgcatctatcaaatccaactcattttgttactatgattgcaggaatagatatcagagtttataaggatgagaagttactgaattcttcgcaactagagagtgaatatcgggattggctccttcaaatgcacaaccagtatgatgaagaagttgaccacggcgaagatgaagctgtacttgttcttagtccatgctcaggaaaggggaagaaaactggcatctcatctgatggtaggaatgaaaaagaaaaaagaaattctggattagtaaaattgaatgggtgaagtaattggttttcctttaattgttttctgtctgactttcattctgattctatttggtgcctttgctttttttttttttcatttccaattgatttcttcaattttctcattgttaaattaaagtttcaaggcttaacaaaatcattaagaggaaggagaaaatatgggaagctggacaaaggattaaaatttttaagggagcatgtgctggtgtttataaaagtaatgtctacgcaacaatagaatattttttatttagaggtctccaaggggatgcaggtggtacgtatttgtccttggtactattttgttatgtcaaattgaactagttattcttcatgcaagagtttggatgaaatttaacccttgtttctttccatgccttttccaataggagatggtcagattatttgcaggtatattttatacgtttcgagtagttaaggttctttatttagtagttttttgtgtctcctcaaattaagttttaacaataaatattttgtttacgatggaccaaaaaggccacttggtacaccagaaagggatgggtgtgttctttccgaatgtgatgggatgatgagtgttaatatgaatagctccttgtctttacctgttagtctgattgatgtcgaaaaggttccaacatacttctctatctctattttttttccctatggtaaaatgataactgaattttccttactttgctcaacatgttatccatttattgcagtgcttacctgttgaagatactgaatggaataaccagatggataagtggcttcagaaatctccgtctacaattgacttgctaagtccaaaagaatgtgaaggattagaggttggggtagaggttagagtttatatttattagtttaatttgaagtaacaaagtgagatttgactaaactggactaaactgttaagtgttgattgaattcatttctaaagaccacaaactagatgttgcttgaaagtgctataaggttggcttttcatcttgtcttttggggaagcgggttcaaattatcagatgctatcaaattcatggtagtgtctctgtttccaggaattgcttgccaatgtaactgctggaaaagttcctcctaaggaagtggtagcagttgttcgtcctgccaattatgtacgtaaaggtgattcaagagtgctggatcagagatatatttttaagtgtaatatagacatgtcgatggaagtaaagttcattggtgaagagaaagatcctcataaagatgaacatgtttattcaaagcgtgtatcaccttcttcaaatcatggagtacatggtatctatgtctttccgctaaggtgcaagcagaagctcccacatttgtttcaaaaagcaggggtctacaaattttcattttctcttgtaagtattgcacaaaagttcatttatacttttgtttctataattatatatttgtatacatattttttttatgatgtaatatgatgcatctatatttttttcagattgatttaagttgtgagaagcttgtcaaaagtgtcaaagtcgaggcatcttctcagatcaagaattgggcacttttaagagataagcggaaccaatcatttagtgtgaggtaacttttttcagaaaaaatggctgttttttttggtcttctattgaataaaaactagttgtcttttgtaaaatttatgttctcacttttcttattcaacattttccttctcctaaaaaataaagaactatatattagcttatttgtttaaaaaccttgttgtgcagtgttggttcaactttgagacctttctccattgcatgttacgatatctatggcaatagagcttcttttcaatctaatcctgaagttgtggtcaagctccaagcaaacaaagacttagaatttcatgttaaaaatattgagagtggcctttcaatttcaaagcgaacactaaaaattgaggtatgggtttacatatgaagatgttccactcttgttcaactaagaactaaattgcattaggcatgtttgcacttactatatttgtcaacattttgaatgtaataggacttactgattgaaagtagtgacttggataagctccgacctgattacaaagccactctcctagtatctagctcaaatgggaaattctctgtttccattccttgccatggtgtgtagtacttgtgcaaaaacaatgacgtaaaattcaattttatgtgtttttctatttattgatatatattaatatattaatatctttatctttattccatttatctattgtttttgtctttgtggtttcagttactccaggttgcttacaacttgttaaagcccaacaagcatttttggctaatcaacttttaccaggttgcactgtcgaggagtttgaattagaggtgtgttaatttttatcactctgcgcatatcagttcaagaacttttacagaatagatttttagtaaactgattgaaacctggtgactgcaacagtgatcagatggttttaattgttaacaaggtgtcttatattttcctctctccagatgttggatgaatatggtaatcatgttgtagaaggctttgaagttcaggttgatgtagacggatttcagatgcttgatcaactaggcccgaggcgtaaggtcaatatcttaatccttgcacattttttttaatgattgtttactacgaagcataccatagtttaataatccaagtcatttttagtacttcaattcttaaaaatggaatgtatttggttgtgataaaaatttgttaaatataggtggactctcatggatgtgttgaccttagtggcctcttgaaagtaacagctggttatggagagaatggtaaatcttgggttttcagtcaattaagcaagagcttgagaataatgaattatattgtactgtacaagttacattatgttattctatatttgtgccctgtgcagtatctctctctgtatcatcaaagaataaagtgtttttcaaacaacagtttcacattgagagaagggaactaagaattgtgtcgaaggtcagtgacttttcgattgtctttctgctgcaaatgatgcaagtcctcttttttcccaccattttcttataaaaacatatgttattaggtacctgagattcttacgactggttccatactggaagatgtcatttttgaaattgtgaactctgagggcattgttgatgaagctatcaacgatgaacagaaaactggccaatcacatatgctcgcaattaaggctgattggtttgatatggagtcgactacacgatatacttttaagcatgggcggtgcattgttccggctattcctctatctaaaactgaggggaacttttgtttcttagctttccactctcgccattcaaaccttagtgtgaatgttaaggtcagaacaactttgtgaaagctatatgtgatgtttttattttgttgcttaaagtagttttcaaccttcattcatatactgaatgataaattctatttgcaggttcatgtaattaaacctgcgataccaacacccaagttggagtataatactatttcatctactcctccattgcttcttcaggactcgtgttcagttaatcaagttggagtaaactattacatgttaatggagaataagaaaaaggtacatggcgtgcaaatattttgtcatttttaatttacttccaaagtatgtgtagtctatgtctttggcttggattcaccagtaagtttcacaagctttagcaaggatagatcttcccttcgtggacacattttgtgttgggttttatgtgtttcttttggtcactgcaggctcttgaagagaagatatgtaaagctggtttgacaatccaatcagtggaagaaaagtatgctaagttaaataaaaggaaggaagaaattgagcaagctataaaagaattgcaaggttttgacttgctagcacacctaaagctattccttgttatcagttgggtttatcattgtgtaggagtgtgatgtagctaatagctataccttaacgcactttgttttttcttttgtgtggttaaattactgatatggcgatggataagacaccctctttctttattgcaaggcctgtaccttgtttttctagttgcaggtcatgtttttccttaattaaaattgtgtcagttgaagtatacttaacagtatcctgtatttgttgtgaaatatctagattctactgaacaacatcaattggggatgttaaatcacttgtccacgaaagaagaggtgatcgaggaaatagaaaagataagtaactctgctgctgcagttcttgtcaatatttctagaggagttccatttcgggagccagataatcatttaatgaaaggcataataggggtggttgctctacttggtagtgttcaatgtggccagcttagcaggtcaagcatcttatgactatctatatttccaatcaaaatactatcttgtcatttgatgatcggcttttttattcagttttgaattgtggttttgtctacatttaggatattatcggaatacttgggtatagatcaaatgcttgctgttgtcgctagatcttttgaagctgctgctcaatttgaaacatacacacaaactggtgaagttgatcgcaacaatgctcttcatgctgaagcagccattcttgggaaatccataaatggtcggtttactgtgatatgctttgacaatataaagtaagcttgttgtttttgttgttgacttcaattaattctggcaacattgtctattttgtctaaaatacaattaaaataatgactggatagaaagttaagaggatttgtgttaaactttatctattattccccatattgttacagtccatacagaggtggttctgatgatcaccatcaaaggaagctggctataccacttccttgttttattgatggaaccatccccaaaggttttctgggatttgctgtaaatatgattgatttagatgaagatcagttgtccattaaaaacagctcaggccatggtcttagagagacggtattctatcgcctgcttggtcaactacaagtttaccaaa

SEQ ID NO: 14576 - DNA, 8963 bp, Cannabis sativa
  modified_base (606)..(608): a, c, t, g, unknown or other
tattttgaaatagaagaaaagactgtaagatgaaaaaaaatttaataatttttttaacaatttttttatacaaattaaattttattcatttccattctcattcctattaccattcttatatttacatccctcccaaccaaaaaccacccaaaatacagccattgatgtagtcacaaatcccaatccaatggttgtgatcaaagaatggtactgtacagttttttacttagatgggctattagccaacccctttacataaagtcccattaatatatatatctccatttttctacaaatgaaaatttgtttagcagcagagaaaatgggtctgtgaagtttcccggccaaaaaaagaaaaaagattttataaacttttctcccaaagacattaatagaccatcatttcttaggagaacccagtaagtattaggtccatacacacaaggagtttttcttcttcctttaatctttgtagtgtagaaagaaggaaaacaaaaatgccattcataccataagagggtttgtttttgctttcttctcattatttatttattttcaaaacccatttcatacaagatgatgtatgataataataataataataannngaagaagaagaagaagaaaatgataaaagacaatgtaatggcaaaaattaagtaatagtttctagcaaaaagataaaactaagtaatagtttagttagtaactatttttctctctaatgaacacagaaattctccataaaagtttttcttctttctttctgtttcatttgtggccatgttactttttgttgttgttcattcatttttttttttttttttccttttctaatgatccttctaaatgggttttttttcttcttaaagatcatagatttctccattaaatgtttcattttttgttggttttgctataagaatctactaactgaggaaaaccctacatgggtgttgctcatttctcagcctaaacagattcagagtaatgggtatgatgtactcaagctttactgcataaaaaaggtcagtaatcactatcacacacacactctctctctcatactattcttcttcttttgagtttgtgattatacatgtatgtgctgtgctttattgtgggttttggaggttggagttattgtgaagaatttattattaaaagttcatccatgcagagaatatggaatataatctttttagtccctaccattcactattgcttgcttcatatttattcaacgacaacattatgattgtcgtttagatggttttctgctcaattcttttcaaatgaggaagacttgtccaaaaggtcagatcttgatttaaaaacattcaaatcattttattaaagaaaatgttagctaaatctccataggagcttttctcctaaacccatttcatattttgtgattgtgtcttcaggtcctcaatgttatgaacatattttgtgtttggtttggagttctggctgtgacaatttacatttaaatttataatttgtttctgcttttaaaacaaaaactcataatatgtttctataaaagttttattttcttattttttctttgtttggtttaagattcaagaatttcagttacttgagtagaattaaaatagaaatcttttttgctctttacagaacaatatcacctgacttgcatataagacaacttgatctctccttgtctctttctaacagcaaggcaaaagagaagaaaggcaagcttacttgtaactttttgcttgattttgttgtgaaaatgaagatatttgttcaaatcatggtactttatttatttgttatttgattgagaatctattttgtagaatattaaatcaagggatgttttgtttctttcccattcagatggaaaatcaagggaatgccttagattttgaactgtggcagctgagacatgaaaacatgagcaaaactttggaagagttccattgtacaacttttacaaaatgtaaggatatagagaatcagttggattcgaattggaagtggttaaaagctcattccgaacagcttgtgcaacgtgaaaatgaagttttgtccaaagagaaacaatttgaagctaaagagttggagttgaaacaattggatggaatgcaaaagtcgagtctggagttgtcaaaggaaattgagcaaaaacagaagcaatgtcgtggtattgaaataagaattgaagagaaagagagggagtttcttaacattaattcatctgtcttagatgctgagagtaaattggatactctacaaagaagtattgaagagcaagcacaaaaacatgaaggaatgttgaaggagtataaacaagtctccgagttgaaagaagatcttttatataagaagcagagctttcttgagaaatgcatgaaagaaatcgagttgcaggaagatcttcttggtaagaagcagaaatcacttgagaattgcaccaaaaaaattgagttgaaagaagaccttttaggtaagatgcaaagatctgttgaaaattacatggaggattgtaaagttcgtgaaagttttattgataattatgacaaacagatcaaacttaaagaggaaaagcttgtttcatatcagactttgatcgatgaatgctctgatgaactcaatttaaagaaacatcagcttgatttggttcaaaagttaaaggcagagaattctgattcattgcataagttaatggagaattgtgatcataaagtggaggagaaagagaagaattttgaaaattttgtaaaggagcttaagttgaaggaacaatttcttgaatcgaagctcgaagaacttgatctatttgataagaaagtcgttggatgcttcaaagagctagaactaaaagagaggcaatttgaaaaaaaggccaatgagtttaaactgaaagagagtgagtttgaaagaaaggccaatgagtttaaactgaaagagagagagtttgaaagaaaggccaataagtttaaactgaaagagagtgtgtttcaaagaaaggaaaatgagtttacactgaaagagagtgagttccaaagaaaggccagtgagtttgaattgaaagagaggaacttcgaaagaatggacaatgagtatagactgaaagagagtgagtttcaaagaaaggccagtgagtttgaattgaaagagagggactttgaaagaatggccaatgagtttagactgaaagagagtgagtttcaaagaaaggccagtccgtttgaattgaaagagagggactttgaaagaatggccaatgagtttaaactgaaagagagtgagtttcgaagaaaggtcagtgagtttgaattgagacaaaaaggatttgcaccaattgaaagatcacctgtattggttgtcaaagaaaaaaccaacttatcatctgcttctcctctgtcttgtgtgaccaatggtgagaaagacttgttttggcttttgaatgaatatttacagaagcatgatttggtttgtagtcaaattttaagtgttgtcaaagcttcatcttcatcagatcctgcaaagttggtgttggatacaataaacaagatctatcatttgcattccgctagggaaaaaatcgagtttgaagacagtattgctagaaggggatgcagccttttgtcagagatgttacttaaagtctcaccagagattaatcctcaagtgagaaaagaagcaatgaagttagctagtgcttggaaggccagtttgaatgtggcaagtgataattttgaggtgtggagtttgttgcagtttctagctagttttaaattggcctctgcctttgatgtgaatgagcttcactatcttcttgatgctgctggtttgattattcagacatcccaattacgttctccacatggggatataggtaagctttcatgaatatctctattgatccaatttgggtagtgtctttgcataaacattatagtttggtgctaattatccattgcttagaatagttctttagtttattggcatgaatcaaaatcaagttttctttttattattattctaactctttttgaagaagttttgaaatgttggttgggaagtgaaagtgatcttttgaattatatattgacttgtgaaatcgagtctaaactcttttacctgttattgctctctgaattctaattgtgatgttatgttcttctttctatgctttgaatggaccattggaaattttttatatgccctataacattatcaactacacttagaatacagttatttaatctgttcttctgggatttgactgaaaacacttataatttcacttccaatttcagaagaatgtgttcgaactcttatccaaggggaagagatcattcgagctgttagacttatttgtcgattgaagttaagggacatgtttccaccactccaacttttgattaaatttttggaagatattgagcgttctacacaaaaatcatatgaggaaaggaaattttacaaagcaaaggtatgaaatgagaaccccttaataatttagatcccaatataggtttgtttttctagtaaagcttttagtttagctgtatatatgtaatataccttttatcatattagattgttttaaaataccaaaatccataaatattgttgttattttttgctctaaaaaattatcttgtacttgtaggttatatttatttgatattttataatattgtttattttagtagttttatatttatgcaacgatattttacaagttgattgtaccataagctacaaataagtgaagctgaattatcatgtgtcatgtgtattgtgtgtatttgcagaaacaatccattgacaaagaagtagctgctctgaaaggtgtgtcggaatgcatgaaattttgcaatcttgagtctgagatcctatccaacaaaatctcaaaacgctttggcattttggaaaatatgagccagtcattaggccgggaggttgatccatcacccaagaagaaacaaagaaagattggttctaatccaaaggaaaattttgctaggtgttccctgacaaataagttgggcgacactgttggggctggtagtaggagttcaggttcacgtttgccacaatcatcgtcacccttaaagatcggcacaactacacctccattagtgcctaaggttgccaattcaattgttggctcttataggagtccaggttctgcttcttggaccaaacctcccaaaggttctgtcaagttgaattttagtcatacagcacgaccggagtgtagcttcttaagcgtggtggcgcgtagccataatgaagtcttggcaatcaagtgtcggaagattggtcagtctaatccattgactgctgaagctttagctgctctgggtgctttgactctggcatcttctgaaaaatgggataccatctttttggaaggagagtcattgctgcttatgaataatcttcaaggaatttctgaaccaatgaagtccatttccagtgtggtctctgactcaattgctaaaatgaaaactttcaaacaagtcattgcaagttggataccggctgaggctaacactatggctcgtaatgtagctaggtgggctgcagataacaatgttaatggctcatcttggatatcagttcctagtgacttggtttataagttttacaaagtataatgctttttgactttactagtttttgtaagtgtaagtttagaggtatataacataaatatttttggtatagaaaccgaagctttacatatatacattactttaaatttattttatagttttataaagaggaatttactattttatagtttcattaactattttatagttttatataagactttctcttctttattttattttattttttttaattagtgaactaattcacgtttcgctcaattattctttttagtttgttaaatttcttttgcaatagtaaatatcacatctattgaataagtgaagaggttgtattaattatatattacaataaattaaagtagtatattattttgatgtgttggaaagaaaataaggtaaagaatgagattgagactatataagattcttttgttattatattgtactatgtgtgtaaataacttcacatggtaagctacaacaattgaaacacatgaacctagcaaaagaaatatttataaagtattagcgatatgtaatttttttagattagggcaataattttcacaaatggtacgaatgtgaaaattatacattaaagtgtaattatgaaaaaacaaagtcataataacattaaacaccagaccttttttccttcaaaataaattgtttatttgagctattgatttccatatctatgattaacactcccatttaattatattaccgagttctcaactataagaagttgaacttttataaattctgatattttttttactttatactatttactttttgttattcaattattctcaatcattttaaatctaatttactatcgttgactaaaagaaaagtcaacaataaactttatgtttattatagaagtttttttgttaattacttttgcactaaacccgttaatcagtaaatattagcgcaataatttaaaaatcactgtagcgcacttaagctaataaggcgttacattttttctgccgagcgtttcatgagatgcaactagttgatgttgctctaaattatcggcatgtgacaaatgaaccccgatgcttgctctgccaacacaacactgaaataataaaccatgctctgctcttatgttccatcatattttattatctttccacttattagcgatgtgagactatctaacaacagttgaacttaaactttgattatcacttgccaaaatcaatgagttgcccaaattttttttactcacgtttcaggaaaattatcaaaagaattattgagcaatttgttgtttttctgtagtgtatatggtttgaacataatgctgagacccatggcaaaactccaaaaccaatcactgttatacttaattatagagcattgctattgggcatcagtggtgcctagcactcttaagacgtgtcgctttacgattgactagcgatactccctaaagaagtagtacacaaagccttatataagcaactcaaactgaggggtacccaagttaattaattaaaaaaaaaaaaaattcaggaactaactagacaaacctgctacatttgacagatcactagatgagactagtagtagcagtacaccaagttaataaaatctcccacagtattggactataaaaaaattaaactaaaaaattctcctagatgccgaaacagataaatagtgcatcagtacacaaaaaaaaatacattatttaaaaatatgaacacaaaactaaaaaaaaattgttgaaattaatataaaataatatggcattatttttttaaaatattaaaaagaaatttaaattattattttattattgggatttagtgtaaatgtaagggaccccaaatataatgtccaagagtattttttctttctcatttaaaaaacccgggaaaactctacaaatcacttctttcccacattatccttccaacagcagcacactgttgctaaatactcaaggctaaaatcgacatttcactaaaaatcaagactcaacagagtaagcttcacttcaacaataaataaaaataaaaggcttataagaagaagtgtaatttccactcccaaacttttttttttgttctttttctttatgaaattcattttctttctttcttcttcgctctgttattctagtgttcctcactcctctgtttctcttcttcaccaagaaaaccataaaatccctctccttccatggcttcttccatacccagaccaagaacaatcatgaagagctccatcatagcaatcaacccatctttcccattcctccatttcctcccaccttcacctctcacagcccttctcttctctccccgaaaaaacccgaaaagcctccacctttgcaccaacttctccaccactctcctcctcttctcactctctctcctcttctccatcacattcttgctcggaatcttcctcctcggcttcctccgctcataccaaaactcccctcttccatgctctgtttcatcctctcctgaattctttgcagcctcgctctcttcaatgtcttcctcctctcttttggacaaagaagaaggagtgcctaggctttcatacagtgccatggtgccattaccggctcacggtctctccggtaacctctcggagccggagagggagttctggcagcagccggatggagacgggtacaggccttgcctagatttcagtattgggtatcgaaaagcctcggccgaaatctctaaggagaagaaaaggtatcttatggtggtggcttcaggtggattaaaccagcagaggaatcagattgttgatgctgttgtaattgctaggattcttgaggcttctttggttcttcccattttacaggtcaatctgatttggggagatgaaaggtaaaatattattattgaaagactctgtttttatttttctttttctgatattcttttcttgtattgtttttaagtgaattttcggatatatttgatgttgaacatttcaagaagactttacaagctgatgttcgagtagtatcgacgattccctcttcacatttaatgttaagacaaccaattcactccaagattcctcgtgacatcactccaaattggattcattcaagattctttaatcaagtatttactatatactaattcataattaatggaatctcattcttcttcttcttcttctttctttcttaattgttaactttcattcttttaattactattagttgaataaagatgggcttctcatactcaaagggttagattctaagctcaccaagaatcttccccctgatttacagaagcttaaatgtaaggtaaggtataatatata

SEQ ID NO: 14577 - DNA, 7012 bp, Cannabis sativa
tttaaaaatcgttaaaaatttctcctgaactattaagattattgtatttaacttttatataattttagtaagaaaagtctaacataaatgaaagttcaaaatgtatgatttgacccatgtcaaagttctagaacataatattaaagtttggagaatattatttagtaaatggacaatcaccgaattatgaataaaattggacaaaaatccttaaatctaagaatctcaatagttcagaaagaatttttaattgttaaaaaaattcagaagtataattttgtatatgtcaaaaagttgagggaataaaaatctaaattaaacctattttttttttgaatgccattaaacctattttaaattttcatcatatattcatatctccattcgatatgttgtgtcgattttattaattaatagaatcagcaatgaaatttcacaaaggtagccgttttatttttatttttattttgatgtttttggattttatcttttttattttgcatgtgaattactaattcctgtgttctaattgagtggtcactgttcactcggataaaacgacaggccatttaagcgtggacgttaactccgtctctaaaaaaaaataacgcgtaaaaaaatcttcagaggtcaaatagttaccggtcaaatttctgccagtacggcttcactattcactctataaataccccttaccccctttcctcctctcataactcaaaactcaaattcaaaacaaactcctcacttatctaaataacctcatttctctctcaaccttttctctctcactctaaacacaaatctctttgttacataccaaaagctcaaacttagggtttaacatgtttttcagatctagatcaccatctccggccaattctccgttaaggactaggcctggtactactccaacttcttctcctcaccggacttttaacgactcgttgatggacgagaacattgagatagctcagtccctaatcgacagttgggaatcaaacgagaccgtttctctttttaacggcgaccgtcaagaagccaggcagtaccttcacgccgttaaggatttacagtcggccatgcatcattttatatctcagagttctgcttctgataagctcatcaaggctcagaatctgatggaaactgctatgaagagattgcagaaagagttttatcagattctttcttcgaatcgacagtacttggatccggaatcggtttcgagtcactcgtctcgggcttctacaatttcgagctactcggatttcgaggatgagttggaagacgagttgagagccacgactgagtcgatttctgaagttgagcgagtttccatggcggctatgacggatttgaaatctattgcggattgtatgatctccgctggctacgcgaaagagtgtgtgaaggtttacaatatggtacggaaatctattgtggatgagggattataccatctcggagttgagagaatgacattttctcagatccagaaaatggattgggatgttatggagataaaaatcaaaagctggcttaacgccgtgaaagtcgccgttaagacattattctacggcgagagaatactctccgaccacgtcttctcctcttccgaaacaatcagagaatcctgcttttccgaaatttgcggagaaggagccacaatgcttttcggcttcccagaaatggtagccaaatgcaagaaatcattggaaaaaatgtttcgaactctcgatatgtaccaatccatctccgatttatggccagaaatcgattcaatcttctcctaccattcaacctcaaccgtccgatctctcgcgatgaactcactcctcagattaggcgaagccgtacgaacgatgcttacagatttcgaatcagcaatacaaaaagactcatcaaagactccagtcccctcaggcggaatccatcctctaactcgttacgtcatgaactacatctcattcctcggcgattacagcgagatcttatcagacatcgtcgccgattggcccttatcagtacacacaccattacctgaatcttacttcggaagcttagataccgatccagaaggaacatcatcaatctccgtgagattcgcttggctcattctagtccttctctgcaaactcgacggtaaagccgagctctacaaagacgtttctctctcctacatttttctagcgaacaatctccaatacgtcgtcgtaaaggtccgaagctcaaacctaaagtttctactcggcgaagattgggtagccaatcacgaagcaaaggtgaaacaatacgtgtcaaattacgagcgcgtgggttggagcaaggtatttaccgctttacccgaagatccaacggctgatcttacgccagaacaagctaatgtaatcttccacaaattaatcttcagtttcgaagaagcttaccgtaaacaaacatcgtgggtcgtacccgacccgaaactcagagacgaaatcaaagtcacgttggctaagaagttagttacgccttaccggaagtattacgagaaacatcggggcgggttaatgagtctttgcgggtcggattctttggtcagatatgcccctgagaatattgataatttcttgtctgatttgttttttggagttggaaatgtagggagtttaccgtcatcttccactacttcatcgccggcttcttcgacccactcacgtgttaggcgatagagcacgtgtgagaattgagatgaagaagatgagtcgtttttggggattgtgatttttttttttgtcgtttgtgaaaaatatcgtatataagagcacgcctgcgcctgttgtatagaatatatattatcacacgtgtggattgaaatttcatacgtgtaaagtgattagagaggataagaagaatattagttgaaagaaaaaaaaatgaagaaagagaaaaattctttgatttgtttatataagattttttttatataatatttgaatggtactttattatctcaataattggtgaagctgttgagcactttttatatgtggttgaaaatttacgaataagataagaggaataatttataacaactatattatatatatattctggtgagaagaataattaacaaccgcataagaagataatatttaaagaagaagaaaacaacaaaagtttagctgatactttgttttcgataacgaacaatgaaaaaatatgcctggagtagctatatactgttgagagtagcaaacaggcccttaataattctcttggaaatatcaatcatatagtacaagactatctcaaatgtaaaaataagttataagtgtgcttcaataaagtaaataaattttaaaattaatgatggtcatttaatattttattgagaattaagagcaagcttagattaaggcgaattaaacttgcgcttagaatcaataattttattttcggaaggtatatgtaagccagctttgttgagaatataccaaaaaaaaaaaaaagaaaaatatagtttattatttttatattaagtaatgataatataataaataaagaatgtaaagttttgtaaaattgaattaattataataattagtggtattataataaataaaagtaatatttatttaacacaataatatatttagtacaatttttaatttatgtcaaatttgacacacttttataaatactattagttagagtgttttttttcctttaaacgtgctaaaatattacaatacaatattttttttagcacttaattgtggggatgctattctttggatgttactatgtattcgtatcataaattattttaaggctaaataattaccatgtctttttcgtgagctggatttgggtgtgtatgtagtatatcatagttggaaaatcattattaacaaagctaataaaatgtcattttcatcatgaactggattttggattttacgtagtgtaaagtatagaaattgcctaatgaagtaaaatcagcatataccactatgtttgtaaaactaatgacattatttttttaatatatgcatactagtttggagatattagaactaattgtgtatataaaattaatttaattaaatacttttatagttttgtttggaaatttcaattgaaaatatttatttattttaatttatgttatttttagatttgagttggtaaacttataatggcattttattggcccaagcttatctacttcgttccatgccattttctacaatgaatcataatggcaagttggtgaatcacgtccaaagctatcaagggccctttcgaaactttactcttcaatgggccaagtcaagactcttttcatagcccaacacatttgtctaagtaattggactcaactgtcacaaactatgaacttatgaatgtcttcatcaaatgagttttttttactgctaaaccttctcaaatatcgttttatttgtatttaactttccaagcttaaattttggtattaaaactctccaaacgattgaactaatagcaaatttaaagtgacattcagttaactgtcatcgtaggttgcttatgtgtacactcttgtacgcatgacatatttatattagttcacctaatattattatttaaaaattatttttaaaattcattttaaaattatataaaatgataaaaaaaaatatatttaaaaaaataaaaaaaatattacaaaatttgaaataatttttatattttcaacataataatattaagtgtaccaatataaatttgacacatgcacaaaagtgcacacataaacagtttatattggcaattaactgtaaaaattggatgacaccttaatttgcaagcaattcaatagtttggagggttttacgttcaaaatttgagcatagagggttacgtgcaagttgagtaatagttgagagagtttagccgttatttttcctcatcaagaataattaagtttagttgtggtcccacgatagtatttgtccacggcttcaacaaccggaagtaatattggcagttaaaccacataaattttaaattttttaacacttaatcataaaaattaaaattttgacggtaaaaatctactgaacctagatttcgttttgcttttcatactttcatctaaaaactcagttaagtactacattagattgtccacgtacaaacaagtgtacacgtgacatatttttagtgatccatataacattaattacttaaatattataaaaaataaattataaattataaaaaattaaacaatgaaaaaaatatttttttattttattttactctttctttttgttttcttttcctttttgtttttttttccttcttttctttgaaaccctaacaccctcatatcttccttatccgccttcttcttcttctccagaaccaccaccacacctctaacaccatcaccacctcttccaccgccactacactcactatttcaccaaaacaaagaaatgtcaaaacaaattcaaataccatatgctatgaaaacccaaactgaaaatcaaatacccaatcaaaagatagtcgttggtgacctaatcgcactggcagatgacgaacacaatgtcgcatatcttctaaaactaaatgtagatccatcagtgacctaatcgcacatcttctattcatgactagccaaagcaaaaaaaaaaaaaaaaagtaggatttttagtttcgagacctaaggaacacgatcccatggtcttgttagaccacccatgaccgtggacggctgtagggttgtcattgtagcgggaaaatggaagagagggagagagggaaagattccgagaaggagagagggggtcaggttcttggatttttggaatcaaagagctaggtttctgggtccttaggaccatcgaccccgacaacagcggtttgtggtcttaccacgccgtcgagcaggagagcagggagagaaagggagtgacaggggagagagaaatgaaatgtttcacttagaatttacaattagagggagaaataaagaagaagaaggaaaaaaaaaaggaaataaataaataaaataaaatatattttttattattgttttattttttataatttttttaaaatttttttatataatatttaaataattaatattatatggatcactgtacatttgtatacatagggcagcactaaattgaaatttttggatgaaagtactgtgaatggcaaaacctaactgtggtcaatctttcaatcattctttaacaaatactgccaaaccatttagcataatattcggtcaatctttgaatttgaggagaaaacatcgtcactatatactatatagatatacctctcttcatattacgatgaccattaatttctgaagtaaaataaaatgaaataggagtcatttcattcatggaaagctctatcataatatatgtaaaatatacaaagaaaaacaattttataatttacaattacttagcaatattcctaaatataattatattaaattatatgatatctaatatttaattatacaattaataacaatataacaactaaaaaaaatattaagtactttcagcatttctctatcataatatattattaagtactgctttaattaaacatattattaatcctcaaacacgccaaactaatagcaagccattgttttactcaaatataaatcttaagtgatcatcatgaactatatatataaagattaatatatatatatatacaataatttcctattatatatatttctacttttccaggtagtacttctagtatgtttattatatatctgaattcacgtacatatttggcataaaaaacaatcaattattcaacaatatatcttcttaatttggaaaaatatggaaattttgacagcaacaacagtataaaaagacttgtagagttgttaattttctatatatatataaaaaataattgaatagtgttaattatgaaatcaaagtaataataaccatattctcactttgtttttagtaagtacaaatat

SEQ ID NO: 14578 - DNA, 6977 bp, Cannabis sativa
tctctctcgtcagattgtgtatttttccagttcattttttttttttgaaaagggttatagagatagaaggtgaaaaaagcatctaattctctatgccctaataaacctaagctcaagttacctatagtaggaagagaggcctagagagaggacaaaccagggatagaggagggtgtctttgctttggtcttggggagtgggacaggggacttgttagtagatactcactctcttcatcaaatgcgtgtgagtgagagtttcccaattattcttttatttattataaaaaattaccactactaaaaaaaaaatagtcaaatatatatttaatgcaactagaatatatataatgtttaactcttcagtccctttcttcttgttctttcttcataatgcctaaaatgtgaaaacattaaatttaattcttagtatgttaattgcttgcactaaagaagaccctagtaacaagttatgcttttccttttgtgtatgtttctcttattttgtagttatttgctttgtggttgtggaaattaacaagttgataagtgggaactatgtatgtattccattaattgaatgtcaatctattccatttctattttcaaataatttttttatatgattaaaatgaaaaagcttctagctttttttattaatacaaacaaagatttcccatattcaatcttttatttttcttttaaagatcacattattaaatataataacataagtacggatacacgacaatagtagctatcatgtttggttcataattataacataatcatattctttcattgatatgctctaacataaaattaggtggacacaggtcacaaaacagtgttattagctattaatttaaaaattaaaagatttgccacttgaaaaatggacccaaaatatatttcattgttgttaaccctatcctcttcttcatctacagccaacccaagtctcattagcttatcatttgccttattattaatgttatattatataatgtaacttttcaattcacactactatataataatatttaaagtttataaaacggaaatgtatatatagttatctttttgacaggacaaaatgaaatatattgaatatacatgaaaacataatttcatactttatcataaagtttttaaaagatgagtgctttgtttgttttataaaccctactcattctcaactctacactaatatgtttggtttgggttgatttggtttgcatagggaggaaaatgatcaaagggttcactagagcaaatattatccaattggtggtgatagtaatataccaatatatatgtatacatatagtattgggaatatcggtaaaatccttatatttttcgttttcaaataattataattgtaatttttctaagattaaacattttgctatatgtttgtttgtcttttttatttatttattttttttgaaaaatttacgagcacctcagttaaattagttatgtaagaagtgtatttttctttttttatgagaagaaaaagaggagggcttaacaggtgtgacttttttttttttttggtataattacgagagtttcaaccatgcttatgtatgttcatttattaagactctctaaggtgggttggccccattttcgatagggtgcgttacacttacacgagccccattcattgtcctaaaataatgacaaaaggctaaaaaaatcattatggagtatttttttctttaatatataagcatttttacatacacctaatacttctatggtggtgagttgagcaagcctgaaggtgttaactaagaagtaattactctgccactaaacttgtcgccctcactgggcgtattggtacaaaagaaggccttgtaatattaaagagtgatcgagtgaaaggaacgcaggagggtgagagagtggtgaaaatgagaaagaagtagtatgtatgtgcctatgtgggggtattgggaaactaaaatcccaagtcagaaagcaataataaaaagcctgttcttttccttaaattattttaatatatactaaaggagccgtactgatacgctatcctgttcttaaagatacatcaagattttcttcacttcaatgctcttgctctttccatctatctctctactcttccttccttctccaaagagcttgctgtattattattgtttgttacttcatttttccttttgacatgtaatccaaactcatctcaacttctctataaaggttccagagaggagagttaaaccactactaaattttgtagttataataataataataataataatagtaaaagaaaaatgcaaagctttcgagcagctccatcaaaccctgaattgtacactcactcttccttctatttcaggtcttgtgtgtctaatcttttttatcactccatttttttttctctttattttaatgcctggttggtactgttttctatggttggttttaccagaatgtcaacttgctaagaactttcattaatatatattaaagcttgtttctctgtttggtgatatggaaaaataaaaaacaggggagatgagtgtagccgaaaccaaacacggttctcggatcttgtggagcttgaacactccgcagccgcttttccacacgatgatgctgttgatttaagcccaagtatcccctttttacttatttatctctcttttccataaatatatacataaaatggacattatcgtttgcaagtaagtaacacataaacatctctaactactcctttttatgtgtgtggatattttttggtttgttgtaggctccatcttcagtttaaaatcaaacaacatcgctgttttacctaataacttgcacccccacgagactttcaacccggtaagccatctcttctctactctatctacccacttttttctttgttgtgacaaacgacgtcgtttttgtagggtgcagtgtgtttggacatagctccaacgactacagggacgagctgcgtggacacagggcagggtcaagtccaagggcaaggacaagggaaagggcaagggctgcagcagcatcaacaggtggtgtaccaacatcatcagcagcagcagaagcggacgaacgtcgtcgtttcgcctttgggaagcggacactttgagaattggggtgattcagccatggcagacaatagccagcagactgacacttctacagatgttgacactgatgaaagaaaccatgttagctattaccctcttctctccttcccctgttcttcaaatcttttattactaaagtgggaatctttagattattttgtttttgtttaatggaggggtcaacttggaattatcaaaaaatttgttttattttggggtgcaaaatctcttggatttgttttttacttgatcgatgcagggagagggtcatatgatgggacccaattttgcaaagagttagtactatactactatagtactacttactactgtgtcatgggccatggctttcacagaatctcttatgggaatcatatcttaattatgtatataaattcatcagaagtttttatcacaagactaatttttctttttggtcttttaaccaccgagtaattaatttattcactttgtttaaacattatttttgttaaaagaaaagaaaaatatgccctgtatatattttgtagtagagagttcagaaatggcagaagtatctgattgcagctttttggatttgtccttagtttcaaggaatgcagcatggatcacttgtagttgtggattccatggacgaccagtctgccaaggtcaaaactggtgaccaaaaggtctttcaatcacacttttttcagtctcttgttgttgttggtgttattagaattttttttcttttttcttttttttttttggtataagaaatatttaatatttagtatttctaattgttcatcaaattttcagacactacgtaggctggctcagaatcgagaggcagcaagaaagagtcgattaaggaagaaagtaagtatgttaatttaaatgtactctgtggcttggattgaagataattagagcaatgtagatgaaaagaaatgcacactaaaagaaaaaaatttattttaagctggtttggtgtccttgaatggaaattttgaagctccttaacttttaaaacatggaaaaataaaagaatgtcaatgtcaaagtcttaagttaatgaatggaatatatttggatgatttataggttttggttttggataggcatatgtccagcaattggagagtagccgacttaggctttcgcaactagaacaagaacttcaacgagcacgtcaacaggtacattgtgaaaatttcctggctataataattttccggggaagtgggatgtttgctttgtcatgtttgaagctggtttaatcccaactttgttaatgtcttaatgcagggtatgtttattgcttctggattttcaagtgatcataatcagttgatggcaggaaatggtacgtgttattaattagcaatctttactgtgttccagctggggttcaatattaacagtaaaataaaaccttggaaatattttggttggataagggtatgaaagtagtttgcaattgtgtaaacttcatctaatagtttctgtaggagggaaaagagtttggtagagtgtttaaggcttttgctttctatttattgttgcaattaatgatatgaaatccatggaaagttgaaccattgactactgtacaaagaactgtagcaatatacctacagaagaaaatatgttttgaaaagatgtttgagtgtcagtagacatgaaagaaaaattaacagagaggtacctgaaattaaaaagtagcaaaaactaaataaataataagctcaaatttgggaaaacaaatatacattaatgatgccatgatggggaactttatgtacattttatagaccctgttaaatgcttagatgtctttgattaactctgtgctctgtgctgaactttaagtgaacaatcatcaagtttattaatttttttttccaatttctaggggcccttgcatttgacttggattatgcacgctggcttgatgagcaacaacggcttacaaatgatctaagatcggctgtaaattcccacatgggcgacaatgagttacgtgttcttgtcgatggagtgatggcacactacgatgaaatattcaggttgaagagtattggtgccaaggctgatgtctttcacatgctctctggcatgtggaagacacctgcagaaaggtgttttatgtggttaggcgggtttagatcatcagaagttctcaaggtggtcacctatagtttcagtttttttttccttctcttttatatttgcatttttactaaattatagattgaaagaaagaaaattaagctcttgggcttttgttttctctcattgattgtttccttgcgatggagattcagatactagggagccaccttgaacctttgacagatcaacagttgttgggcatatgtaacctacagcaatcttctcaacaggctgaggatgccttgtcacaaggcatggaagctctgcagcaatctcttgtggagacgctttcctcggccactctagggcctgctggatcgggcaatgttgccgattacatgggccaaatggcgatcgcaatgggcaagctggctactctagagaatttcctttaccaagtaataattcattcttaactttgatcatcaacaacattgaaaagacaataaaaatttatccaacttaatagttttccacatcatttttacttgttaggctgatcttttgaggcagcaaacactgcaacaaatgcatcgaattctgactactcgccaagctgctcgtgctcttctcgttataaatgattacttctctcgccttagagcactcagttcactgtggttggcgcgccccagggagtgatttacctcaatctcaatttaactgtcacgtaactaaacattttaattaattaagcagttatattcccatttgttaggaagaagaatttaatagttctgggaagaaagacaaagatagtaagccccgttagattggcatagtgaatatgatcacatgtatatggcttcctaaaattagtagggatggttctttcctttcctagctcttggggcaaggaccaattcatgtataaaccattttccccttgtggagttagcctatactaacttttatttttataaagaatgtgttaaaaaaaggatttgtaattgttttaacaggcactaaaaagttaaaatatgccatttctttcccttgccaagttggaatatatgtttctgccttaatcacacagcaaacttttatactttggcaaacgacagaattctgcaatggtgaattttccagcacttactattgttaataatgttattgttggaacttttgtgaattttacaaagaaaagggaaaaaaaatgttagaagtgaagtgtgtggtattgcaaagagtcctacacgagatagaaaaatttatttaagagtgtatataagatgcaacaatgagatttaaatttaggcccttaatgtcacccgaaccaccacatgcacacgctgtcgtttactggaaaattatttaataaaatatttagttaattaattaattatttttaacaatcataagtagcaaacgtgattcttaactgcgtatgacccatgatcatattagtgtttcttctaactgtgtttttattgacttaacctctatataagttgcatcctactagcgatagaatatatttctcttttaaaaaaaaaacttgttttacttaaaaaatttacgatttttcttagagcaattatttaggagtgtaattgagtggttcatttggtgcataatgaaatcgtttgcagaagttgttttatcttaggaaccagggccggtcctaacttttagtgagtcatagaaaaaaaaaattattttgggtccttattta

SEQ ID NO: 14579 - DNA, 8229 bp, Cannabis sativa
acttcaatcacacattgtcgatcaggctaaatgatcacaatttcctcctatggaagcaacaagtgttagctgccattagaggaaataggcttctgaagtatattcaagatcaggctccaccttctcaatatcttagtgatgcagatcgtgcaggtcacactcaaaatcctgagtttttggaatgggaagttcaagatcagctgttaatatcttggcttctctcctccatgatcgagagcttgcttacgagaatggttggctgcaatactacgagacagatatggaatgctttggaaaaacactttactcttcaagtgtcatcaaaaattctggaatttagaaccaaacttcagaacctcaagaaaggatctcaatcgcttaatgaatatctcctcaaggttaaacaacatgtagatctgttagcttcagttggggaggttctctctgatcgtgatcatatagctgcaatattcaaaggattacccaatgaatatgatacattcattatctcctccaatactcgaatcgaaggatattctatagttgaaattgaagccttgctacttgcatctgagtcaagaatcgaaaagacagatcaagaagtggatctgaatgtcaatcttgctgctgtaaaacaaggaacagatcaggagaattaatggccctatgaagccttcctagctcactttaatcgtaatttcagaggtgtcaatcctcctcgaggtcagttctcttaccatccatctcagtttccctctcctcaattttctatcagtatctaaatagaggatctaactctggctttactcctcgaggacaatcgaccaattactaccctggaagaggacagtattcgaatcagtatggaggcagatcacaaaccaatctcaacaaacctcagtgtcaaatctgtcacaagattgggcatctggctcttgagtgcttctatagatttgacaaaagctttactggtgccacaccagttcaggaaaataccaaacctattcaagctcatactgctcaggcaattaactcagcacaaggatcagacaccaagtggtaccctgactcaggtgctaccaatcactgcacaccagacatgaataatctggctcagcatgatgaatacaatggtcaagaacggctgtatgtgggaaatggctcaggtttggcaattcgacacactggttctgctctttttaaatctcaaaattcagataaacctttaatccttaaaaatctattgcatataccagaaattaccaaaaatctcttgagtgtgtcaaagtttgcttttgataatgatgtcttctttgaatttcacccatttgtgtgttatgttaaggattcgaagaccaaggccataatcttgactgggaccctgcacaatggcctatatagttttgatccagggcaatttcaggtgcaatctcaacccacttcctcatgttcaactaccaacttcacagatcaatctcctgcctgttttgttacatctagttctagcaattttcatcagtctaatgacaattgtaattcttgtaacaagccatctttgtctctatttgacttatggcataataggctaggacaccctagtgaaagagttgttcactctgtcatgaaatcttgtaatctctctggaagtaataaaagtgaacattctatttgtcatgcctgctgtcttggaaagattcacaaaatgccttttcctaaagcatctaaaattgtttatacagagcctctacaactcatagtgtctgatctttggggcccttcttatgtcacctcctacaatggttataaatactacatgagttttgtagatgcctatactagatttacttggatctatctactcaaaaataagtctgaggctctcaagacttttcaaaactttaaaaatgagacagaactccaattaggcagaaagattaaagttcttcaaactgactggggaggggagtttagatcatttactgaaccattaaaacagtttggcattttgcatagacatccttgccccactacacatgagcaaaatggtctagttgagagaaaacacagacaaatcgttgaacatgggttaagtttacttgctcatgcttctatgcctctaaaattttgggatgaggcttttaggtctgctgtatatctacacaatagacttcctaccccagttttgcagcaacagtctcctatagaactgttgtttcaaatcagacctgaatacagcaaccttaggacctttgggtgcttatgctatcctaatatacgaccttacaatagacacaaactagactataggtcttccccttgtacttttgttgggtatagtctgaaccataagggatataagtgcttagatgcctctggaaggctatacatctctcgagatgtgatctttgatgaaactaagttctcataccagaaacacactattcaatctatccctgtggttcccagttctaaagaacaaatgccatctgctagtattcccatatccactcaaatgtacacagctgaattcctttttcccacagatagcttgtccactcattctcaaacacctgtgtttcaccctgaaatttttcctgagcctccaccttattctatctctcatgtctctactgattcttctcagtcaagttctcagcctggctctgtcccacttaatccaactgagtcaacaccatctgtgtcatctcagtccatccccccttctcttatgtctactcaacctgtacctactcaatatgtgcaaactcaacctgtgaactctcagtctgttccttcatctaatctgcctgttgtcaataatcattccatgaaaacaagagccaaatctgggatatacaagcctaaggtttatctgacttttcaagagccaaccagtgtgaaaactgccattcaacaagaaaaatggagacatgccatgtctgatgaaatgggggccttaagaaaaaatgtaacatggacttatgttcctttgcctgatggtaaaactcctattggatgcaagtgggtattcaagataaagcttaatgcagatggcaccataaacaaaatcaaagctaggttggttgctaaaggcttccatcaacaacctgatttcgactttactgagacatttagccctattgtaaaaccagtgaccattcggattgtgttatctctagccttagcaaaaggttggtgtattcaacaactcgatattaataatgcttttttgaatggggatttgcaagaggaggtttacatgatacaaccccctggctttgagttgcctgatgctcctcacttggtttgcaaattaaataaggccatctatggcctaaagcaggccccacgggcatggtttgacaaattgcatcaagctcttttgtctttcgggtttgtgtcatctaagtcagatcacagcttgtttattaaacattcatccacttgcatgattattttattagtgtatgtggatgacattattatcacaggtagtgatgctaaacaggttaatgatctcattcatgctcttgacactaagttttctctcaagaaccttggaaatctgcactattttctgggcattgaagttgagcatactgaaacagggctgcatctatctcagggtaaatacattcaagatctgttatgtagagctcaaatgcaggacgctaagtctgctcctactccaatgactggtggattaaaactctctgcttactaaggagatcctgtggtcaatctgcagcaatacagatcgatagtaggagctttgcaatatttgacaatcactcgtcccgagatttcctatagtgttaataaagtttgccaattcatggccagtcctctcacactcacgggaatgcagtaaaaaggattctcagatatcttaagggcacggtctctcatggtttgtctctgcaaaagtcatctgatctcgatgtaactgcattttgtgatgcagattgggcgagtgatcctgatgacagattatcaacttctggtttctctatattttttggctccaatttggttgcttggcaatgcaaaaagcaacccacagtttcccgatcaagcactgaagccgagtacagaagtcttgctcaagttgtgtctgaaatcacgtggatgcactctctgtttacagagattcatgtcaagcttccccgtacacctgtcatatggtgtaacaacttaagcacgatcttactcacggctaatcctatgcttcatgccaagactaaacacatagagctggacttgtattttgttcgagaaaaactatcttaaaggcttgtcaaggttcaacatgttcctgcctgggatcaaattacagatggactcactaaagctacttccacttccagatgtgtgttgttcagaaacaaacttggcattggtcccagtaccaattccaagtttgagggggagtgtaaaggcagttaattctgttatagttggttagagtttgttagtaatgtttctctctcattactttctgttatttctgttttgatctgtatataaactttctagctcattaatgcaagtaaccttttcagcctttccaatcttttccttctctttctctctgttctttgttctttctctctttctgtttgttgttcttgatactctgtatcaatggtgagaaaagcttccaacactaacatagagatagaaaacggagaaggttgctaatttctcaaggttgttacatctctaaggtgctaaagaggtttggttttgacaatgccaaacgacttcaatagctcatcattttaagctctctatcaacagtgtggtggacaacattatgtacattatgatctgttattggtgccatggaatgagtgcgatcggcaggtacatgagcaggccaggaaaggaacactgggagactgtcaaatggatgctgaggtacctgaaggaaaactcaaaacttggagtagtttattgctctaacactaagaaaccagaagtcttagggtatgtacacttggactatgtaggagatttggatactaaaaggtcttaaactcgttttatattccgaaatcagtgactggaaagcaaaacttcaaccaaaagtggttttgtccaccgctgaggctgaatatatgggttgtaaagaagttattaaagagacactttggctaaaaggattaacaaaagaacttggtgtaaacctgagttctatcactgcttttagtgacagccaaagtgcattgcacttaagaaaaaaccaagtatcccatgagagcacaaacatattgatgttaggctgcactttatatataagagatgttatagcaaagggtaaggtaaagctagagaaaatctcaagcttacaaaacccctaccatcagtcaagttcaattactgcctcaagcttctctctgtggacactcatgactactctttaactactgatcatggatcctgaataccaaagttacaaggattatggttagaaatgtgtaatccctaatcctttctccctcttttttattatgtctgttattgaacctagtcctaatagcagttagaagttgtagtcttagctgttagtgtcagttaatttagttaagactgctaactttaccaaagtgcatgtaccggttctagcctaaagctataagtagcaatcttgtaaaggtatagaactaactcttgtatagatttagacacattcaataaagaatacatttctttttctataattaataattgacactactagaaaaataggttttagtgatagacattgagtgactctaaaattatttagtgacacttcacaacacatcaatacagtattattaggcgccttacttaataaattgtatgggaaaaatgtataaagatatgagatcattgatcaagtaattaaagacaaagagttcatacctgcaaatttccaataagatataaaaataaaagtaaacccaagatagaaatgagaatggcgaataagttttcttgtacattgctacttgtgtcaaggttggagccaaaagaactacaaataagaaaaaaaaaacatgagatataaaaaataattagaaatgtcatcaaatattataaacattttatttacaaaccttagatttttcaaaccccaccaaaagctacgagtgaatttctggggaaaatctgttttgttgactatccgagactcgatggctccagaaaatattccgaaattgaagatttctggatttggtggactaattgggcaaaactgatttagctttgttaaattctttataggatgattactcccaagatgacagtcaaaaggaccaagtgtacattcttttggcccataatattcacaagcatgatgccaacaagctgtctcgcgataaattgaatagaagtaccaaaacgctccaaacacctaaaaatgtcgaagtttttgagaaatgatttttaaaatatttaattatattggaacatcttaaaaagaatttttcaaaatgtttacttatgatattttttatatatttataaaaacttattttataaatgaactatgatctatattaaaaatatatgaggagaaattaatgataatacttacatgaccaaaaataatgtagaagaaaaacaagaagccacctctgacccataaacgtccagtgagtgtgtcaaaattctttgccaattctttggttgataagtacacccgaaaaattcgaggcacatattggagaagaagtattaagttgatgaactttcttgccgtcaaagatttagatccagtaatcttcgagaagtacattaaaattatcacctaattaaacacaattcttaatcatattagctatataaattatatagtaagcattggaaattgctatatggctcgactttgtgcccgaacccaactagctaggtggctaattactagagaagagaaatgttaaaggccgctcatgatacctaagtgtaatattatagaaaattattaactaattataggacgacacgtgcaaggtgcctagcagcaatactctttttaaatatatgtggcccaattaataacactacaaaaaatttcttatttttaaatacaacaaaattttattaaaataaagtactttaagtagactcatcaatcttattaattacctgaggaagaggaagaattgacaaaagatcagtgaaaagataagaccatggaaactttttgaaaatggattgatgaagtttcttggacattttcaatgcagtatgaagccgaaaacagatatggaaaacgtatgaaaaatcggtaagagatcgtaaaacaagcgctacgatcaccatattatggtctttttcgatgcactttcgatcatcatctacaattggtatgtagaggaacaatggatcaattgagattccaatcacacatgaagctaagaatattttagtccatagtagagagtctgctgcccatggattcaatatattgtccactttcaagttgtcttgtcttccatcttcttgctttggaatattattatccctaaaattaagtgtatatatacattatatattcaaaaactaatcataagtaataacaacattttatagccacactaatctaatattttttgaagtgagagaacatattataagactaagtaatctctcgtttataagtcatactcttaattttttttttcggccgatagaacaatctcaacttatataatataaaaacaagagattttttttaattagataaaaaaaaaaactcaaaattttcataatattacccatgggtgtaatacccattaagaatacacttatatatataactaaaacttataccgtcattagaataaaattattatatatggtcatttctacaagcggtgtacaaaatattgactaaaccaaatcatttaactcgggcaacctaagaagtgctgacagttaactgaataatacgttaaactttctaccagtagttcaatagtttggagagtttttccgctaaaattttaacttaaaaagttaaatgcaaatgaaacaataattaggagagctgaccagccaaaaacactattacgaaatatatatatatcgttggtgatcaaaccctagtttatatctctaataatgattcaattttctttctaatcctaactacgaaaaagttttaccaaaatccatgagagtattattatgtttatttttacaaaatacaaaattatttaattgaaaaatacaaaa

SEQ ID NO: 14580 - DNA, 6427 bp, Cannabis sativa
ggtgtacacgtcgtgaaatttgtgtgaattttgaaaaagtcaaagacttcaactggaaattggcacacattggtcgaaaggttccaaatggaggttaaaggggaaacaacgaaaatatctttttggaccggcagcacttggctcacaacaaatcacaaacgacttttaagaccagtagcactttgagcttacaacggaccacaagtggctctaagaccatgttaggatttgggataaagtgaatggagttccatctcaaaactaattgacaatgagaggagtagcccattcatcttatatatgatattttacttccatacataagcaatgtgggactaactttaataatctaaaaattgaatttgttttcttttactctacagtgaatgctgatgaatgtctaatgactcgacttagggaaatgtcactcgattatcacttcaatgttgaccaagaagtggggtcatcaacatgttcattctttggattcaatagcaaaccacatcaatgtttttcctttaatttagggatgaaatcaaactatgaatatgtactttgtcttcacaatacatttacaggaactgcaagtctgtggcgaatctaagccataaaagatgctggtggatggaaagatcgaaccacagtggaaaacatggatctagtagttagaattagcttaaagggttatctttgttggggacttaggagtaaagtttataatttctcctgcttttttgatgcctgcaaccctttttctaactttaccaagcacatcaatcctcaccaacctatgttcctattttgctaggttaaaaatgaactaccaagtacttttaaggcacatcgataccagtaacaccgctggtcatgtggtccacctaacctcttaagaaaaatatcctaagaaatcatccttcacgaagtgagtaatccaaaataatttgcatataatatatacacacacacacctgcccaacttggataaaattattaagggttaaatttaggctttgttctagaaaaagatcgctgcgtaccttcatatatcacgcagagggtgtcaatctggaagagactacatctgatatatgctttctttttcgagaggaagattgttgctcactgggtcacattcttcttctactgcattgttataccaaccattgttgttcctgaagttcaaatctcaaagccacttgctgtttacactccagcaagcatcacgattctcaatgcagtcagcacctcaaggtattagaaatctgaagacaaacagagttcatttttacgttctttaatgttagcaataataatgtgaaaatacttaccacgaggcagatctttaaacctggttgtgttttggatcttgtttgagaatgtcatgtcaatccatctgtctaaagcaacaatcataggactcttacaagcaaactgggttgatgaatgggctgcaacagaaaagcttggaaacacagtgaagccaaagagcaatttggtcaaccatgttctaaggaagccacgacctcaaactagcagaaggtgttttcttacttttttattattattttttttccaattccaatatttttttctcttactctgagtataacactccctagcattaaaatagctggctgctatttttttgtttctttcttctcctaggaaactactgacttttagctgatactcttctcactattctagcatgattttttaactaattatcttgaaacagaattcacgtactagagctgttaatgggaatgtttatgttgcgttgtgcagtctacaatctactatacaagaaagatcactttttcttttatcttttactgcaagctggggatttctttataatggctttaggatatgtaggaacttttgttcctaattagtgtaaaaaggacaggacagatgatgtggttgagtacttatcagaggtgatcaacctgcacatgtgatagacttttccttattctaccttagctttaagtgtctaggtaaaagaaaatgcaaactattttgttttgaatcgtataaattatagaacaaatgcacaataatttgtcctctatcagacgaaatgacacctatacagcaagttcttttggtattatgtataaatggattgtagcatttcaatttatatcataaataaacaaagtgttacatctccaaacgaagaaaaagaaatggtgatctttgattaaaatgtaaagtataggatactagcaacattttcagtgctcataaatttcagaatgcttcaaacttctatgggcttatctaactctacaaatttcagaatgcttgaaacttccctgggtatttagaattttatttcatagaatttctcgttttctggaactgctcaactaaattcttcctctcaaatctcatgcaagagtccaacttcgaagcataagaaaagctcaagagccaagctctttccctaacctacacctattccatacctaaactactcaatttaacatatgcagattctctaacccaatcaccagtcagaaagtaaaagagatagttctgtccaagcacataggccgtcatatgataagacattcttaaaatggcaagttttctcaggggtaactagaaggcgcatgaaagtaaggtaataatacattttgtacttacattatcacagctgttatcgctcaagaaacataagcgccttgcttttctgaaaattttagtcaaaccaagcagaggaagaaatacttgagtaaagtatagtgcactactagtatcaaacagatggccaaaggaaactagccttaaaggccaaactttgaatccgcaagtcttgtacaccataaggaattctcactttcatggagagtagatttcataatttaaatatcagcaacctcaataaatttcacaaatcgtcggccaaaaatatttttaaataaagatgattttcaaccaaagaatagttcattaaaagaaaatgagccagacttaattaacctatgataattgaacataataaagattaaaaactaggtatcctctaattcctcactctagctcatcaagttttatttcatgttgttcaccagaagaaagaattttcacaccaaccataccccgctgccactcagcacttcccaccaatatcagcctctcagcatttatgcgtgctgctcgtttgaataccctgcaagagataagtttattagcaatataaaacagcagatacagtggacattattaggcataagaagctaggcagaaaatattaccatttaaggggtttgttctcgagaactaaatcaacagtttgacctttttctctgagtatggtagcaactgtggcagctggtccttgaagatcatgatctaaagcgcacacaatgttatctacttggaggctgagtgctggcagacgacctttctccttaagtaactgtgaaccccagcaatccatatgtcagaaaatgaggaatgatacatagtctaacattattagcaaaactaaaaataataataatataaaaaaagggacaacaaaaagaaattaattaataacaagtgtcaaaatgaatgtgccaaatctgcagacatcatcagccaagaaaaaacattgccaatattataataaaaatagagcataagcaggtcttcttcaatagccacaaaatgcatagcatgaaatattaaccacaatagaaacaataacataaaatgtttagctgataaataaataaatttagctgatgtttgcacaaaatttcaataaagatataataggacacaatctttatgcaaggaactgcctagtacaagtgacaaaacaggacaccgaatgtttcacttacttccactatgacagcatcaccaaacccaaagccacaagcaggaatgtcatcaccaccaaaagtagagagcaacctatcatatcgtccacccccacaaatggctcttaattttccatccctatcaaagccctacataataacaaaaggtagaatgtatttagctcaagatcattcttccatagtccatactactacttataggccaccaaaaaacagccccaatctaacctcaaagacgataccagtgtagtaggccagaccacggacaatggatgcatcaaactgaatccattcagagtaaccaaacttttcagcaagtgagaatagctgtttcagttcaacaactgcctccccagcatctccaagtatctctacatgttagaggaatgcacacagtttgctatatctgagtaggaaaacaagcagataatgacactactatcttcaatgtttctaccaaccttccaactctgtcaatgactttattgaaagaacttgcagtagctgctcaacagcttctgtggaaacaccagcggccttcaactcttccttaatatcattgagtggaattttctcaatctgatagtgaacaccaatacgcaaagagatcagaaagaattaaaacatcaaattgaaaaaattaaactcaagagaggcatgaatggttattcattcaaatagaagctacaacaaaacatcaactcaacacaacacgataaccctgataaaagagtaccagattaaattctgctaaaatttgttcaacttactttgtctataatgatgcaaactttgccaaacaaatcttcacgaattgagtagcggcttaatacttcttgtaaaacctgtaaacaaatatataaataatcatttgccgtgatttctaaaaaaaatataaatgagcactttctaacaacagatgtaggctgttgtctattaaattgatagtaaaactcattcgtagagcctcaaaacaatttgttaggcgggcatttgagtcattgtatttagggtgggtttgtgagtgagaataggttctacatataagtaagtgagggaagaaatgaggtacgcaatgtattgacaagtctctcttgcatcaaagaacccattacgtttgtttcgaatataagagaatgtcaatccctaattcgagttaatgggctgacttgttgggactcaagtaaggcccaacacactaatcaggtatatctattccaatttcagaatttattttcatctcctggtcatgcgaagggataccttctacaatagcccccctcaccaacttcaatcaccatggtcgcaaggacccaagcatgtgtgtcctgtctctgatgttgcgtgtggaggtggcaaccactgtggtgtcagccaatggggaacaacaacactgaatttctcgagtctccccatttgtcgaccccaaggaattaatgggttccaaactcgttaggaatccaagtcgagctttctagcttgttctccatgggaattatttctcgtgttcttcgttgctatgggcttgctggaaaaatggaggaggctctctgggtctgactatctctaagaaattcttctctcttatttctcctcgtcgtgttgggttccaaaaggtaatatggttgttcttagattggtttttgagcgagaaagacaacaaatacatacaagaagttgggaaggaattgattttgatagaggaaactaagtggtagacttggatgaacttctccctcttccttcctcgcacaaaatttatgagattaatggagttcatgaagaggagcaatttgctatgtgtaactagatattgaagaaagaattgctcaaatattttggatggctttttgatagagggcgaaaaactcaaattctgccatttgattcgctttcgagtatgaattgtgcatctatgtgatgagtatagcttattccaggagtgaattgcttggtattactattcggtgggaagaagattggtcgacatgtacaaaggctcatgcaagtgacgctttgattccctcattctgatgatgaaaagaggtcaactaactttgctgaattggttttttgaaagaggtcgactcgcgagtggtgccttttctcttacagcttccacaaccaacctaaatattctcccaacttgctttgttcttctcctttggtgcgcttccgtaaatcctttgccaacgactatacgttgacgctgctataacagtttgacaaaggattattattcaagtttagagcttggtgccatcaatcaccttgaggataaggtgaatatcgagctgtcgataatgttaggtcctaggattagtatggtgtgctagcatacagtaaataaagagaatattagagtcattggattgagggtgggtttgtgagtgtgaataggttctatatataggtaagtgaggaaagaaatgagatgtgcaatgtattgagaagtctctcttgcctcaaaggggcctaagtaagggcttcaatagcttgtaattggcttttcttatacattcaatataattttcctacttattggctactaatctgctactgttactattgttgttgctatt

SEQ ID NO: 14581 - DNA, 2766 bp, Cannabis sativa
aatataagtacttaatatttataaaactaaaactttttttcgagttttgttagtacatattttgttttgaatttattaaaagaacatttagaagtaactgatactatatgtttttatctagatgcaatgatttaaaatttagaccttatatgtgccctgtttaagacaataacagagtatgtgctaacgaaattagagaaaaattacagttttacaaacaatgagtacttatactgctaaaaataaacattaagtttatgctacttacaaacttaaaaaaaaaaattaaaaaaaaaaccttaaaatttcttatatcacccccttttctcattattttttatttaaaattaacaaaaaaaaatattattttataaatacacaaaaataataaaaaaattacaaaaacacagttctatagaattttaaatatttttacaattttatttacagaaattacagtcttatgatgtaattttatgttgtactcttgttaatttgttgttattttttgttattgtttgagtgttatttttctgttatttttatgtagttttcttgtttataaaacaccataaaaaaaatattaaaaaaaaatctttgaacgtaaaaatataaaataatctttttttaaaaaaaaatgatttatgtaattatctcaaaaaaaaaaaatacataaaaaatattgaaaatttgaacatggcagattgtaaaaaaaattagttctaaactagatagatgggttttttattatgtattaaaaaaaaggcattaatgctatttatttaggtccacatttggttgcttttcaatatttgaaacaaaaaagttactgaaatttgaatgtaaagcaaactataaatataaatgtataaatgaattaaatttttcagctgaaaatcaaattataggagcgggtaacaataaatatgtaattatttatttttttcaaaaaaatatgtaattatttatttatttatttatttttgtaaatatagctatatatagatgcttaattagtttaattaggttaatgtttgaacaaaacagtataacataacaatagataggtaaaatgtgcttatcacttacttaataaggcctaccattaaactttccaacttaaaatcaatttataacattaaaaaaaagttattttattttttcatataaaataaaatattaatgtcaataaaaatagaaaaatatggactaatattaatataacaaaatgaaaattttgatatatagtaatatcttatattatggttttgtttctttgcctaaaaacaaataataaaatcttaaaaaaaaaaatctaaaggaaaaaattagggtttctcattcttaaatagctattgaaggttactttttttgttcggccaggccctttggccttccttatgtttaggtgtgacttggtcaggttttatttactggcattcgattttcgctactgcgattagtcttgtcactgtgacatgattttaagtattttagtcttgtctatgtgacatagttttgagtgtttttagtcttgtttatatgacatgattttgttttgttttgtttcgtcctgtgtttcttctttgttctttaatagctcgtcatatcatatcgttgttactggttaggaataataagttttttgcgactgaaggagttgttagtagtgcagttacgtaccttacacaatagttgagtgcttgagctacgaaattgaacctacgtactgcaacagtttctactgttgtgtcttatgaggttaattgtaatgaaactacatatatgtgttgttcttaaagttcactgtgatgttataatcttttttatttgattttattttaaatttttgccaaacgatctgagaatcaagcgactgataatttggttctttttcgtgattgtatctctaataaagagattacctaataattttacaggctatcattttagttaattgttattaattaataaaattttataatttattaaaaaaaaacaaataataacaaatacccttgaaattttcaaataattaattaatctccgcaatgatcttttggttggttactaattaagcttaatcaaatatccatatgaatatttttcaaaaataaatatgtatatatatccataatccatatatgaatattaaaaataaaatagcaagcattttttttaattaatcacttatatttttcaaataggaagacttcataattaataattttagcttgtggtgaaacctgcagtaatcttatgtatatatatatagaaacaaagttctgatcagtcaataatattaaaaatagttgaaaaacggtaaattagtaaaagttatataatcacaaattcaaggctaattattattatttgaataattaatgtacttacttatcattagcaataactaaaacaaagtaatgactagtgtatattcagattaaaaaaaaaaaaagtaaaaacactagtacaagtgagtagtactactacactagtacttatccccaaaatacaaattaacaaacaaaattaagtagagtaaaaatgtattcttcttcttctaataataataataataataaagtttggtaggattagggcatactaattaagcttacaattaatagggttggtgtatatatagttttgtttttgttttttttttatttgtaaggaagttggtgtatatagttggacgactaggaacttcaatttttttttatatataatataattaaaaattagttctatattatatatata

SEQ ID NO: 14582 - DNA, 9315 bp, Cannabis sativa
ggcctctcaactgaggcttccgcggcggtggcgcagaacatcggccgtgaaactagaaacaacaccgacgatgacgttgcccttttcagtcgatacggtttctcttccgatcaaatcgataaaatcttcacaagaagcttccagatcctctcagtgaaaacactcgaacccaagctcaaattcctctccgatagcggaatgtcccgcgaaaatctggttcgagtcatctccgccgaccctctaatccttaaccgaagcttggagaagcaaatatccccttgtattcggtttttgaagagcttctacggcagcatcgaccacgtggtttccctctttttggtcaagcgcggcacttgggttctccaccagttctcggaaacaacagcgtccaatgtcgaaaccctgcggaatcacggcgtctcagattacaacatagcgaaaatgttcgtaattcgaccaaaagctctagcctggagcgtggacgcattcactgagctcgtgaaggaagctaagagtcttggtttcaacccatcgagcttgatgttcatccatggaatggccagtctgtcggggatgagaaaggacaaatgggtgtccaaaatcgacgttttcaagagctttggttggtctgaagagcagattcggggtctgatcgttagacaaccacaagtaatggatgcctcggaggagagactgaagagggcattggagttctttaccacccagttgaaatggggtcttagtgatttttgtaagtaccctaatgttctgttgtttagctttgagaaaaggatattgccaaggacttcagtgcttcagattttgctttcgaaacatctcatggataagaagagtataggcacggcattgttgcttccgaatgacaagttcttgaaaagatttgttgagcgttatcaatcggacataccggagctcttagacttgtttaccattacaaatgttgaagaagatgttgtatgcagtggaaactaaggtggcatctctaacttgttatctctattaatggatatttatttttgttgtagttagtcccatttttggaccattggtttgggaatgatagaaatacaggattatcaataaaaatttaaaaaaatagtagttttttcttttatcaatattttgttgggtttatacatttcattggtgtaaattttcactcaaatggaagaatttatctggtaccgttaagattgatcgaatttttaattagtggaagtgaaaaaagttcgaaaagaaagaagaatgaaccacttgaaactcttacaagacttgctaatagtttaagacaagtttagatagttgaagtcaatatgggatgggacagaatcattttggccaggaatcggttttagatgagctgggcactcttacatacttacataggcagtgtaaatggagttttctttcctcaaaggtggaaacaaatgcccccattcctataaaggcattatatttcataaaaattattataaatgatgtaaaaatacaaggtacatactacatatgttagaatccataaatagtcaacttataatccctcaatgtacttaaatatacatagaaaaagtcaacatataatctggactacatatcagtcaagagaattaaagaagctacaagggaacaccctccctcctggccaatgttttgcagctcaaaaacatattcttcaacttcaagacatctacatacattggcctctaagacatctaactcactgtcaacaattagaccaggatttaagcattttcatagccaccaggaaatttgaattttgaaatgatgtataattaaaaatacgtctcaagcctcaaactaactttatttcatcgtatgttgcacataactcagccactggaggagttagggctgagacggacctaggtactaacccctatggggctgtagccatacccaccagtgaaaaaaaattacacttcaaaatgctgaatattttatgtttaatttgataattacactgaaatagccgtaaatattttgttatagcaattaagttccccatgaagtaaaattcttgagttcactggttactggttagagctgttgaacataccagaattgataagctataacaacacttcttccatatccgttaaccaatatgttactcaaggttgtgcgggagaaaatggtggtctaaggcaaggtaaaattatggggccttatttatataattttttttagatatttcattgcaatagaaaattttagtttagtaaaaaatgtctacacagttgccactatacactaagttaaatattttgttttatattatagtaatttacggcatagatacttaagtttaattttcggttttatgtaggtacttgacagttaaatgttaagtcattatcaatgttttattttcttattagtatatttaaactattttatttttttaaaaaaataaaaatgtaatgatttacttaacacttaacatcgaggtacttacaaaaatttcagaattataaagttaaatatttatttgtaactgaaaattaaacttaaatatttatgccataaattattcttatattattatttattaagttttattatgtaaaaataaattgaattattttttggggtcggtaagctggccctagccacgcgactatttctaaaatcgttcttgatgctactactctccttgctcactcccactcctactaacactagatacacaatacatttaggattgagcatcagtcggtttagtcgattttttttctatattaaaatccagaattcggtttttgctctgaatttgtgcaagctgaaaaccgaccgaccaatccagaacctatcttaaaaccgaccgttttgaacatcggtttggtcagtttaaactgcccaaaccgatcctcttctttttttctttaaaatatgatccaatttattctataaacacattattctacattttacaactacaaacatacaaattaattattcaaaaactaattatcttatttttttaattttaatattaataaaataataatatattattatatattattagtaattacaatagataaagtaaaaacaaaaaaacttaataaattaatgtatatgtataacggttggttcgattttttctatcagtttattaattaaaaaaaaccgactaattaatggtggttttaaccgttaacggttttttcggtttttggttccgtcagttttgattctaacagtattagataagtcggtttgaacaattttttcaattttctaaattttatgctaagccctaaacacatccttctttcttagagaaaaaaacatccacgttaatatacagttgaccttgaggagggaagggattttacttttcttattaccatgagtaccactgaagtcattcaaatactttgcactccaccaaattctttacagtcgggtcatgaataaaattagtctgctattccaacttgacaagctcattataaaaagattgaaatcagcataagacaaaggtttagcaatattagacagaaaactagttatagcattatcatatttattatattcttgagaccaagtgttaagaaacactccaatagtaaaagggtaaggtagataacaagtctttcaaaaaaaaaaaaaaaaaggtagataacaagaataaaattaatactataatgaaataaatttaatgaattgtattaaaattgaattacttttatttattccattccaactaaacaaaaacacataatgtgaaacaagacaaaaagaaagaaaaaaagtagtgagtgtgagtgatgtgtgattcaaatatataaattaaaatttgaaagtgttactcaatttctgtaacacgtgtaagcctcatacagtagagtaggaaatccgagcgtggattatgattggagtgagtgaagaaacacccaaaaaccacactcctcactagtcactctctttctccttctttccttatcttcctttccattttcttctccttcctaacaaattaatggaagagcggaaaatggcggaatgggaagaaaagtcgccgctttatgaggcctacaatgagctccatggcctcgctcaggagttccacacccccttcgatgcccccgccattctcatcgttggtcaccagactgacggcaagagtgctctcctcgaagccctgatgggtttccagttcaaccacgtcggcggtggcaccaagactaggcgccctatcactctccatatgaagtacgatcctcaccgcgagactcccgtttgtcgtctcgtctccgacgccgacccaactctcgccgatgacaagtctctccgggaaattcaggtgctttcggataatcaatgcatatgtaattttattagttgaatgtggcatcatattataccaattgtgggaattgttggatctaacttgcctgccatttctataattttggagggtttattttaaatcgtttgagccagtgattttgttgtggacaatctgactgtttatttttttaaaaaaattgaaactttttgcatgttatttaaaagggaagaaaaacagtttgctttacttggttgctgtttgtagaagattaaaatagaaagttagaaacatattactctgtcctgaaaaatacaaatatttatttttcttttgactaaaatgaagtaaaaaactttacgaattgaggattgtattctatgttatgtgacactgataactatttattttctttattttttttttctaaaatgagaaaagaaaaaaaacactacaacaagacatgaagactagtaatggactacttgcattcatgcttgttggatttacatggatgaaatctgcattctataccaattttttagtattcatgcagattgtttctctaacttatgactgttttcacgtcactttttgtggcttatactgtaaaatagtaggctttcaaatatttcaatgtatgcctaatatggtgaaacactctagattctatcttatgcttttaattttaaaggtcaattaattcagtaataatatattatcccatgagtccctttccataatttttagtgtcctgcaggcttatattgaagctgaaaacaagagattggaaagcgagccttgtcaattctctgcaaaggaaataattattaatattgagtacaagtattgcccaaatcttaccattatagacacccctggactcattgctcctgctccaggacgaaagaatcgtgaattacaggtcaaatatccaattggtgaaccccttataacatagatttcattattcctcaccagtgttgtgatggtggtcacaattgttttctattaaattcatgtcaggctcaagctcgtgcagtggagtcgcttgtacgaactaaaatgcagcataaagaatttattatattatgtcttgaagattgcagtgactggagtaatgcaactactcgaagagtggttatgcaagtaagtcattttgtttagtgccaatagttctgctttttgtgactcaagcaacaatgttatatgctgttattactatcatttcctgcttttttgtggacaacttctacttttctgcatggaaaataattggcgctttgagttttagccaagtgctgtaggctgtagctgcattgaagctctatgtgctatagtcctgagccaaggacattccgtaaaaatattatctttaaagtgaaatatgatagttgtatcttacttaataattgtttttacttttattcattgatgatgtgcagattgatcctgagctttcaaggactgttattgtctcaaccaagcttgataccaaaataccccagtttgctcgctcatcagatgttgaagtttttctttcacctcctgcttgcgcattagacggcttcatattgggtgactctcctttttttacatctgttccttctggaagagttggttctggacctgatacagtttatagatcaaatgacgagtttaagcaggttgattcctataattaatttgttcatatatttatgtagcgatgataggcttttaggaattttatgtacttttcataactacttcaaatcctcctatttgaagttatgggtagtgtgacctcaaatatacatattctatttctatggtgaattaagggagaaaacttgttgtaaatggctatgtgcatcatagagatattggttttcaagtatcagaaagcattttaaacaactgaacttgatgaaagtcatgcattgagcacttggtccctttggaaacttcttgaaatacttgggttgtcttgtctctgttgcaaaatggtaactctaaccagatctgatttcaactccttgatggagtaaaagagctgacaggatgaccctaatctgtaggcttgtcatttactgtagataaatgttaaaattatgatcttaaagtgaaactagaaaagagaaaaaatgagtgtgattgaagaggaagcatgtatcagcaatgtacagttttctctttgttttccagttgagggtcgaagaagtgatcccttccattagaactccaatggaactcctttcagttctctacttctttttcttctttgtattttttttataaagtaattagattaggacttaaataactgtttgttgatttagcttcctgtctgataagctattcctgaaacctgtagattatatctctattttcttaaatgtaggcgatttccttgagggagatggaagatgttgcttctttggaaaacaaattgggcagatcactttctgagaaagaaagaagtagaataggggttagcaaactcagggcatttctggaagaattgctgcagaaaaggtatgaaatttccatactttatatttgcctccctattcatgtgatgttatgctttaattttaacctaccatattttatattacaattttgaaaggttatctttgcaggtacatggatagtgttccactgatcattcctctgcttgaaaaggaatacaggagcacaacaaggaggatgaatgaaataaatcaagagcttaggtttgattcttcattttcattttttttaaaaaggtttctatctaggcagttttgtcgggttgaagtatataaacattgttgaactagacagctgtggcccatggggtaggttggacagtaagtattatgtctatgttggcttttttccccaacattgttatcatagttagatgttattctcttctttactgtatctgattgtattcctatatttttgtacttgcagttcagtggatgaagtaaaactcaaggaaaaaggaagagcctttcatgatctattcttgacaaaggtttttataaactaaggcgatcaatatattttttaactatttcatttataattatatctttttctcttttttgggagacaaatcttgtttatattttatttatagattactgctaatttcacctttacatgagctgaacaaaagttatttgctactcagctgtcattgctattgaaagggacagttgttgcgcctccagataagtttggtaaattatcttgaattaactctcaccatttgccattctgtttttgggtgtttgtcactattggaagcgtgttattatttttgttctagccttgctgtattggtaaagatatttataacacatttttactttttgaaggtgaaacactgcaagatgagagaagtaatgggggagcattcattggtattgatggtcttcagattcctcacaagcttatacctgtaagttattatgttattagtatatttagggatttttctttttctcttcatctaaaaaggtggatatgcctatgcctgaatgctgttcttttacttatttatttataaatatatatatatttatattttcaagtgtttgtgttttcatttctgttaataacttgtcattgtttatcttgctgtagttataaatgtaggcaatatttatttagttacattacatctaacactagacttcacaagtaaaactgagtgatctagctttctcagacttttgatgaataataagagacattttgttttgctccccaataatgtagaatgctggaatgcgtttatatggaggagcacagtatcatcgtgccatggctgagttccgttttgttgttgggggaacgaaatgccctccaattacacgagaagaaattgtaaatgcttgtggagttgaagatatacacgatgggacaaattactcgaggtacttgtcattttcacgtaataacacttagtttcttgaatttcggttgacacttattttttgatttcttgggaatcagaacagcctgtgttatagctgttgcgaaagctcgtgatacatttgaaccttttctttgtcaggtaatttggaatgatgattatcacatcatgcttacctttttacaattttttttttggattggattctctttattttttgtaaaggattgtactatttacctccttttttacaaattacaaagtttgtaggggaatattgaaaaactgatattcattaattccttgctgcagttaggttctagactcttgcacattctaaagagattacttcccatatcggtctatcttttaaaggtttggcctgtatcttggggctgtttgatgccatttattactagtctttataaggccttctgaatgtcttttagttacaattttgattatattactttatgtgaaattctacagaaagagggtgaatatctaagtggccatgaattgtttatcagacgcgttgcttctgcctacaacaactttgctgaagctactgaaaaggcttgtcttgaaaagtaaacacattacctcagctacatctttttaattttttgtccaggttaataatattacttttaaacacatgactctcattgttttacatgagattttaaaaaatttgtagacaactgtaaatacacaatgatcttttctcaaggcaccacttttatgctttgggattttagtatcaaataaacaatttttcatggatttgaaaagcttaataattgctacaatcttctcaggcattcatgattaagataaaaagtgaatagttaaacttccttgatcaatcacaatttttgtctcccaaaaggagtcagtaacgcgtgtgctttagaaaaaaaaaaaatacttttgcattaagccatctatagaaagggatgatccaacacctgtacagtgttcctttgcagttcagcatgctggatttgaatgtcaaaactgataaatagaagtgatgaattgaaagggcttaatgagctgattt

SEQ ID NO: 14583 - DNA, 2450 bp, Cannabis sativa
tcaatatcaacattatgcttctcataatggttgggatgattagaaggataatcaatctccatagtgtttgtgtcaaatatgattacatgaaactcagagtctccttcatatccaaaaactaagaaatttccacgccttaaagaacaatgttgtgcaaatttatcccaaccctttttcatccatacttttccatctctactttttgtgagccccacctcccatcttgatccacaaggtagtttaagaaatacttgacttggtaaggaaccaccacagtatttctttaaaaatctactaggaatttgctgcaaaaggaaagatcaaaacaaaatacttacatatatttataaaatcaagacatagtattctatggttgcaaacagtttcatggtaaatgtatagacactccacactaaaaaattaattatgtcaaagaagactcactatataatcatcttataaggagttggaaaaatgaaaacttaatataagatttggtttggtgtaataaactataaggtaaggtatacttacaagcttgtttagaagagtttgttgaagaataatcttgaaaaagtagtgagcagtagaagaagccatggttgaaatttgaaacaaagaagtttaatatatttataaacaaacactttcttctgtattaaaagagctaataaagaaatgtaatgtaatattatttaaaactatttgtgtcatatcaatgctttttggttataggtcttctccaaactcctcatctatcaaaagatatgaaatctttatgatgatgattatattgatatcctttaacgcctatgtattatttttttatttattatttttattatttaaaacttttccctttccttattcattctgtaattatcacctattaacttgggagtcatttgccttgctttaatgattatcaaccacatttagattacacattttatagtaattaattatttaataaattaggcaacccaaaaacgttggaaattggatattataacacaaaccacaactgactgttgatattcaaaaacaatattagagactagcgttgttgattgtagccatgattttcttttttgttagataatacattgtgttgatatatttaataaacacacaaaagtataaaagtttgttattttcttttttaataagtacaattacaatatattggtacacaataatattgtaaccccactccggtaattacgatatatttaagaagatatcatttcatttataaaataaatgcatttattagtttgttataaaattgattctatttgattatcaattactataaaatgtctatgtaatagagaattttctgcttgattatatacggtatgtagtatatattgagtttaatatttattatagaccacaaatttagtaataaaaatttaccctaatttgtgattgattaccattttaataatttgatatggaaaatgagtaatagattcatttattattgtatattgtgtaatatataaaaaagaaaaaaagttcaatatcttaattcaatatggaagcttttgaggaaatgttaagtgcggcttggtttgtgataatttggtttaaaaagaaaaaaacaacatggtgaagagtcaagctccaaaaggaattctaggagggacacaataaatacagttagggagaagtggaattgtttctgttgagaattatgaagttccaagtgaactctactatttatttcatgtgggacaatatccactatagtttccaactcatggttggacttggattggatagagtagctattttcttctcacataaccatgtttcgaatattcctatctaaactattacaaggttttttatatttgttaataattaagtttttaactataactccaatttaataaatgtagagttacagttctgattagtatttcttaattaaactgaaatattaattaattaggattgataaattttttcaatgaatggttttgtgtaacaaatttattgagtcttcacacaaaagctttggctcttttggtaggattaaaatgggtacaagatgttgttggattacctatcatcacatgatcttcttagattcgttgtccttaattttggaattggagtagccactatatcagaaattcagaatgagctaggaattatctttactaacataaaaatcttattatctagctttctggaggattggctaagcaggctctaacaaaaaaaaaatcccttcaaaagaggaggcatttttttttataataaaataaaatctaaacagtttctttaaacatataaacgacactcaatgaaaattacaattctaacagacttgtaaagctacataaagcaataatttaatctaactagtgctttcaaagcttagaagttttgaccttcaagtgattatgtattgatcagcaatacatttcaccaag

SEQ ID NO: 14584 - DNA, 5507 bp, Cannabis sativa
  modified_base (4456)..(4457): a, c, t, g, unknown or other
gtcttggaagggtgagaagtctggtctcttttctgttagcagtgcatatgatatgttgcagatcagtaaacatgggcagcagaggcacccaaatactggtttttggcacaagttttggcatctcaaaattccgccgaaagttaagaattttatgtggcgtgctgtcaccaatactctccccacatgtctcgaattggcttcaagaaatattgatatttcttctttgtgtcccgtctgtcacaatgcagccgagactgcttctcatgcatttttaaattgttcttttgcactcagctgctgggagtaatgtggattcaccattcagtttgatgcttcatcaactatcggtcattggcttgagtctacgtttgagaagtacggtgatgatatatcatgccgtgctatcatgatctgctgggcactttggaagtcacgaaataaacttgtttgggaaaagaaatcctcttctccaattatagttctaaattcagcatggactacacttgactattggtgttctgctcaagataaatctagtgtattatcattgtctctcttacaaaatgataataacattgagcgttggaccaaacccgattcaaatacagtcaagttaaatcttgatggagctttgtttgagaaagaaaatgcatacgactttggtatcgtggctcgtgattctatgggtcgccttgttaatttaaaagctaaatatcatgggggtacttatccagcggaggtggtggaagctcttggtatcaaagaggcacttagctggctaaaagacaaggaatggaattaagttgaaattgagattgatagcatggtcacgatccaagcaatttttagtaatcaacacatgatttctgcttttggtttgattgttaatgattgtaaaagtttattatcagttttaaataatgtaagtgttcgtttcattagacgatcgatcaacaaaccaagttgctcactttgttgctaggcactcccggtttttctctgatcgtagcatttataggaatgatattcctagtgagctttatgtccttttgtatgatgaatgctaaatttcaatgaagttgatatttcattttcaaaaaaaaatcacatcttcctttcccatagacatagtgcaaatcctatcttttttggcagtaatattatcaaacttgttgataaaccttcatcaacaataatcttgacaaagatctaattttttttcagtttaaaatgccatatcattaagtagcaattaaagtgatgagtgataaagatatttaacattgttagtcttagtgagtggtatcacaggttggttaaattgagtgtataactcatctatccactataacactctttggcttatttgtcggggtaaaaagaaacagttcattttgttaaaattctactgtttcaagccatgaataaatgccattctcaaatactaatgagcttggccccccaacatgtttgagaaactttcaagagagacaaggttacatgattaaaggctcaatctataatgtccttttcgcttgtcccatctcttttttctaatgatatagacttgtaacgcttagcacataaaacatacaacacaaagttgactgcagccaaaacagccgacaaaaagaaaaacctatccaaatgaccatcatttagattaggaggaacccaaccaagcttcccatcttttgttgtaactctcataacaacagtcaatatggtacttgcaacataactccccatagctgaagatgacatggacaagcctattcccaagctcttcaatccatctggtgtttgtgaagcaaaaaactccatctgagcaacgtacacaaatgcttctgacactccaacaagcacatactgtggagtctgccatagaatgctcaatgaacttgtctctcttccagtgaaaccgctagcaagttttagcctttgttgctcgacaattcctgcaatgatcatggctactacagctatagccaacccgattccaatcctctgcaacgggctgggaatctttggctttcgtttcgttactttcacatagagaggaatgatgagtctatcgtatagcatgatgaagatcgatgtgctgactatgtcaaacacagtcatgctggctggagggatgtggaagttggcaacatttctgttcatggcagcgccttgttcgacgaaaagtgaaagcatttgaatgaacacaacagaggaaaagatggtgcacagccatactggtaatagccgcagtatacacttcacttcttccacttgagtcactgtgcaaagatgccatggatttggagtttggccttcatgttttattactttcatgtcttctggtacaatgattgcagctcgatcaagaaacctgtcacagaatcattacattatacacttaaaagttgttttttttttatcatcaaaaacagctttagatctacttacttgaatccactagtgtgaagaatcctcctcatgccattagtttcattctcttttgaatggacttcatagagctcttctccatttgagggcatgttttgatgtaattttttcatggaagccactataacctgagaaaatctagagatgggattcccagaaggcttgaagtgtctatatctcaaagtcccactcaatagaaaaacataaccaacaatagcagatatagtacaagtccagaaccccaccacccaatatcccatattctctatgtaaaccaaaatagtctccgccactaagcttccaaggtttagagccacataaaagtagctataaaatgaagttttggattgcctttccttgggatcttcctcgtcgaattggtctgcaccgaatgtagctagtgcaggctctggtgctccatttcctaaggcaatgaggtatattgatatatagaatattgcagtttcaaatggtttatgagtctcacacaactccccaattttaccacaaccatcaggtttgagaagaaatagttgagttgacaaagataatgctattagtccctgcaaaaaaatagcataaaagagttatagttggtcatttttaaaattgagaaaagtgaagacaagacaccataaaagtgagttagcattagaaatcttacaatgatgtagagaacttgaaaaatgacacatgttaggtatctgcccaagtaagaatcactaagaaatgcacccattaaagagaacaaatacacagttcccatccatctactgaatgtttgtgctgcctcagcattggaatgcctcagaactgattttgagaacagaaccaaattcacttcaactccagcaaatgccaatgtgactagtccttggttcactgagacatccaacaaaagtaattccaccataatagattaatgaatttatatagacaaaacaaaagtattgacattgattaacttcaaataaaaatggtagctttccttcatcctcttttcccccacaaaaagaccaaaagaccaaatgattgatttggatttgattttaacttaattatatatgatttttgaaatatgaaaattaaatcaattttaaatgttgcaaattaaatcaaatttattttgaatacaaccacttaggctagctcaaatggccaagaggcacttaggtggggtggggtttatgggttcaaaattcagcaaatgtaactaaataatacttgaggatctaacacaacttgttgataattaattgtttggtacatggaaaggaaagaaaattgatttacaatgaaattattatatgaaaatttgtgctgaggaaattaatttaataattttacattttactttgtacttgtaaaacttttctctgcactatagaagaaacaaaactaattggccccatccacaaatttcgcactcaattttctcttcctttctcattttctttcatacaaaaaatctcttttttacccttacttttctgtttttacactttcttcttcttcttcttcttttttgtttttggtaaacaccttttttgtaacaataaaacacaatacaaaacaaaactattaactacccataaacttatagggagcgaagattgaaagaggttacttggggtttaaaacagaaaagaaacatatatgaatgtaatgataaagaatgagaaagaaagtgaacaatgatatgaattaatggttatataaataaagtacctaataacaacattccacatctccatccaccactcctttctttcacagctgttttaccatgcctatcaactgacccatctcttgtgaatgttgctgttgctccattctcacctctctcttctcctccacctccattctccaaatgattcagctcaaccatcttttcattcacacacaaattaaattactcaaccattaaaatcacaatcactttataaacattaatattcagtcttatcaaattattctaatgcctttattattattattattnntattattattattattttataaacattattatgacattaatgatgctaatttggaaatttcggttactttctttctaaggggaatttcggttacttgtccacatgtcataaaacgcacttcctctattaatttatttttgttgttcttcttcttctgcactaatgattcatttgtaactaatcaccctttccacaatacaataaaaaaatatttttttagtaaataaatgacaaaattgtctttgttactataatcactgtaataataatgattgtatgagaaaaaaaaaattctaaaatatattggtaaaagaagaagaagcatttagatattaccttaaagttattatttagtagtgaagcttcattagagagtgcttcaggagccatggatttgagatgaaataacttggttgtgagagaaaatataaatgggttggtgggtagtgaagaagtgaaatttatagctatgaaaagttggaaaagatgaatcccaagattgtcatgcagaacatttacaagaagaaccaaattaatgtgcccttggatttgtacaagcatgacatgtgtcatcatagcactccacttgtaaagaaagaaaaaaaattgaacctttttgggtttttgggggggtcaatagataatttcattgttgactaaatctaaaagaaaacaaaaagataatctcattcccaatcctgcataagagttgggatatgactaaatctcaaaccaaagacataaaaggaagatatatatatatctataacctcaataaaaatagaatgttcatgggctttttactattaaattaccaaaataacttttaattaattatgaaattacaaaaagaaatatatcccatttagaagcaaatatgtctatttaataccttgtatgtatttttttttttttttttgaaaaaagaaaaagttatctattagtaataaataattttagtatctttgaattattattttctaattttgattctttttattttcttaacttaatagttatataaagtagtttatgcctttttcttacaac

SEQ ID NO: 14585 - DNA, 11548 bp, Cannabis sativa
gaaagataaaatatttggaaagataaaaaataggtgatattagtttttctttttcctccctttgacaaatccaattcccttttcctttataaggagaaaaaagagagagagggagagacagaaagaaaactacttaagacaatggccaagtaataaaaagccattaggacaaagggtgtccaagtacagcatactacacctactccccaaccaatcctcccatttcccgtaaaatctttgggccttcttggataatttggtattttacttgtatttttatttgtagtttagtttgttcgaagtttacgaaaattgtaatgatatatcaagtattataaattaatcaattccaggttaaaagtatatattaatggtcaatctaaagtttaaagaaaaatcttctaataaaaaagattatggaaaagagatttttcttttgaacaataaaagaaaattttaatgacacagatttccatttattgcgtttacagcttagaattgcatatagaattaaattaataaaaggtcactttagtaaacttcctcaaaccgttgaaccacaataaattctaaaatcactgcaaaatattagtacaacacgtaaaaacacattaaagaaattttcctcaatatctaaaaacagaaaataatctttttcttgtttcctttaatgtataaaatatatgcaattatgagtttagagagtataaaaatatatataatagtggaaatgtgtagatttgtaggttagctggaattggcgagattaccggaggtcaaaaccacttgaattggccctgaaaaacacaaccggtgccggacctggttcaaacatccatgactcgttgactcagttgaacctctctccaccgccgtataactttttagtgtttacatctcaaagcgcccactttctctcatcgacttttcataatcctcagtcagacctttaaaattaaaaataatcaagagactttctcaatcgttctttctttattttctttttggtagctatatttatttattaatattattattattattttaagaaacgcagttgtttcagggagagagtgtcatatcatagtccacaacagctctcggtcagccatttgctttctctctctagagtattattattgattaataataatatatataaataaaaaatagttgttctttttaatttctctatcttccccccatcttctctctctatcatttttatttgtcaactgaagaaagcgaaggatttagaagagagtaggtggggagagagagaaagaccaaagaaagctacacagatttgttgggcagcaactgtttgaagaagaagaagacgcaagttttgtttaagggaaaaaaaaaaagagaaagaaatcgaggtaagatttggcataacttcttcatctggttttaagagagagttgggatttggagaaagagagagaaagagttggtacttttaaagagagaaaacaggggagaggacggataatgcaattttctttactggatatgtgtaacttgaaggagttttggtacattggaatatatatacatgtactttgtgtacatgtttgagaagcaggtgccaaaagaagacatgggttttgtgtttggatctctatatctttgttcataaaaccatggtggatccgcggaacacagtaaccttcttggtcttctccttattcttcttattgtctctatttgaacccacatttcagcagcagcagagttcaccgcgaatttcaacctctgagctagccgctttgctccagctcagatcgtccttggggttgagaagcaaagattggcccaggaaagtcgacccttgcgctttctggaaaggcatcaaatgcgagaatggcagcgttgtgtcgattaacatttctgggttcaagagaactcggcttggccgcctaaacccacaattctcggtccaaggtttggccaatctaacgttattaacgacctttaacgcttcgagtttcttgctccctggctcaataccgaattggttcggcgaccggttaccggcgctccaagtgcttgatctccgttcttgctccgtaattggttcgattccttttagccttggaaacttgaccactctaactagtctctttctgtctcgtaataaccttactgggattgttcccgctagtttgggccagttgtctcggcttacggttcttgatcttgctcagaattcgcttgtgggatctattccttcttcttttaccagtctaaggaacctttctgttcttgatatttcttccaattccttacttgggtcaattcctctgggcattgggaccctgtatgagctgcgagttttgaatctttcgagcaataacttgtcttcttcaatacctgctcagcttggagaccttgccagcttggttgaccttgatcttagctttaattctttgtcgggttccttgccttcggatttcagagggctaagggggttgcggagaatgatacttgggaacaatttccttggtgggtcgttgacaaacaatctgtttcctactccaattcggttggagtatgttgttcttagtcacaacaacttcactggttctctccctaatgtgctttggtcagcacccggtttgcgttttcttgatgtctcaagcaataacttaagtggtctattgcctaattccagcttgaacgccaatgctactgctagagtacttaatgtttcccagaatttattttacggtagtccaacgccaggacttagaaggttcagttctgttgatctgtcttggaactttttagaaggcgatgttttggactacacacctgctaatgcatctattgaaagcaattgcttccagaatttgagtaatcaaaggactgtttcagaatgtgaatcattctacgcagacaagggtctgcgatatgaaccgccgagttctgctcaacctcctgctattcctgagactcctaagaagaagagcaataataggaagaaggtgattattttggcagcggttcttggtggggttggtcttattttgcttttagctatattttgtgtattaattctcttttgtgtccggaagagaggtactactactcaaagaggagttggtgttggaccagttcccaccagcagcaccccacctcctggaacatcagttaactattcgagcgtgggagatgcttttacctttcagcaacttgtccaagcgacaggtgacttcagtgactcaaacctcatgaagaatggccactcaggagatgtctttagaggtgtactggaaagtggaatacctgtagtaatcaaaaagattaacttgtccacagttaaaaaggagactcacatggttgaattggagttcttcagtaaagtttcacatgcgagatttgttccctttttgggacactgcttagaaaacgagaacgagaagttcctggtttataagtatttgccaaatggggacttgtcaagttcattattcaagaaaaccaatacagaagacggcttacagtcattggattggatcacgagattgaaaattgcattaggagcagcggagggtctctcttatcttcaccacgaatgcaatccacctcttgtgcacaggtatttttaaactctttctacatgcatgctcctcctgtgcgttcaacttgagataagttttggtatattaactatcatcagatgtgtaattagtgaagattaatttaaacttgatttatcttaactcattgccattgcaacatttacacggagtagaagaaaatagaacaaatccttagcgtgaataatgattatttgatttgtgtatcattattttatccttgagtgacttagcagtttatattacattgaagtttgctctccttagagatatgcatggtcttacaattgtgacaatgtgtctttactacaattattgtatttgttattttcaaatagaagcatatgttatccctagagatgtgtccttgataaatagtagtccatagtaataacattgttttctgggttactgaagagatgttcaagcaagtagtatacttcttgatgataaatttgaagtccggctagggagcttgagtgaggtttgccctcaagaaggagatactcatcagagcaagatcaccagattgctgcgtttgccacagtaagtaatctttttataactttgtttatatgtttccactctctttgtccttatttgtaaggacacccatatgaacattctctctttacttcgcagaaaagaaaagaacaaactcgttttagtattttgacagatactttagttagatattttattattttagatgaattatgttcatttttcagtcaccagcaaagctgcttagtggaatataaatatatgtaaatgattcagattcagtctctaatctctgtccactgcccttcacattccttctttttatttatttaatctcgtatacatctgtggtctactaagtaagatgccaactgtatgatataatgacgagcataatatctatattttcaagtaaaaatttcccaaaaggcatttatgtaatcctagaattatttgtattccatgccagccaacagagaggatattatctatttgcttttaatattattctgttgttgcttaactgacttcaccttttaccaggttatacttgcttgtttgttatttttattttatttcgtaaggtattcttattatttttaagataagatatcgtcttatttctcttctctctataatgcaggtcttctgagcaaggtacttctggtacgtactcatttagtcattaaacattaatatattctcaaaagatctgttcccttaaatttttcaaaacacaaatagatatatgctgttcttgtcgtagaaactcttcattataaaataccttcttaagccattttgtatatgtttagcaacccggtattgttcaagttttagaatcgagtagcataaatatacagaacaatgtaaaatgccttaaatagcaagaaaattctgtttttcctgatgaggcttttatcaatacgtctacatatatattatttgtggtttttcttatagaaactgagagtagatagttcggcttggattctatttaatgtttccaagcatatagatccaaactcttcttcttttctccttttctatttggaggtgatttgcttgcaccttgatgcttattttctttatccatcattaggaatttgaaaatttccgttataatctgtttgagctttctaatgaaaatagaaagggattatcaagagcaaactcaccatctaaacattaaattgatcaaattatgttgtgttatgtctggtctattcaatatgaatattcgtcctaaggtttatgcttctctgaaatgccaaatgccaggtacagcaacagcaatatgtgcgtatgatgtttactgctttggaaaggtcttgctcgagttggtaacaggtaaactgggtattagtgcttctggtgacggccaaatcaaggaatggttagaccaaacactaccttgcattagtatatatgacaaggaacttgtgacaaaaatagtggatccgtctttaatagttgatgatgacctactggaggaagtatgggcaatggctgttgttgcacggtcctgtctaaatccaaagccttcaaggcgtcccctaatgagatacatcctcaaggctctggagaaccctttgaaggttgtaagagaagaaaattcaggctctgcgaggctcagaactacctcgtctagagggtcgtggaatgctgctttgtttggtagttggcgtagcatgtcagatgttacagtcattccggcaacggcatcttcaacaaaattggaagcagggagtggtttaaagcattcaggaacgacaggttctcagggaagtgggcagaacggtgggggtgatcattcttcctcgtatagacggcattctagggagatattccctgaaccatctagtgtacaagatgtagaaagagcggatcaggactagtagagagtgacacatgttataaattgttcttgattctttgtcaataatacaacaggcttcctattttgagtgcctgctttggtaccccagctttgtcttcatcttggaagtcaagatggcgtttcatacagatttttgttctcgagagtggttgaaaaggcttgcgcacatatatacctagctttttagcagggaagatttgaagtttacatcagtctgagatttagctgaacttgtgtgtgggatgaatctggtagagtgaggagacaagggtcagggtctgggggcctcttatttgtttgacagcttgtttatggcaaaaacaagcctacaatttttatgcgattgattttttttttttttttcggttattgtttagtttctgatcctcttgtggaatgtaaattgtaattgttaaagatctcttaattcaaatctgatttcataatttactaagaaagaaaaagaaagggaaagtgtttaagacttgtaccatgttttttcttttttctggttgtactgtaggcatgaaatggtagcagtttccagttaatatagtgcaaatacgtttttactttttcttagttaacttggttaaataaagatatgattagttttgtatcatttgcggtagaagagatagtttttacgaagagggaaaaataaaaaacataaattattataatagaaaaggttccaccgagacttgaactcgggttactggattcagagtccaatgtcctaaccactagaccatggaaccgttttgataattttaatcataaatattttaaaataacaaagtttctttccccaacatctattgcaccactttatccatggttaatggttataccgtaggcactaggcaggtattcacaactaaaatgctctcttctccttcgccatgccactactacaccactgtttacactccacgctcctcctttttccaccgctcggactccaatggtggcggtttctactttttcaaagtctcacgaatccaaaccagagcttccggtgagcccaccccggaactcaatcctcggaaccataactccaagtcaatggccctcctccaccacctcttaaacgaatcccagtcccaacctttgaactttaaaccagaggacctggaacaccctcggttgtccgccgaagagagagtgaggctattggaactgtccctcgtacggaacagaacgcctcagttccctggctccgtctacgtacagtcccccagcgatgctgacgtggccagttcccttcccccattgaagactctgtttcgagatggtgattttgatgaggacaatgatcaggagatgataatgcgtgcggttgagattcggaggaaagtgacggctgagattttcatggaagccatgagaaaggggaagtttgggattacttacagctcgaatttggtgagcaagttgaatgatttcatagattatgttatggttgaagctgcttcgttgaagcgcttaccggaattttcaaactccaacttcaatgttcgcgccaagactgtcatacatgattcaaatgttgtgccactgatcaggttatcttgagtaaaacttatgcattttgtaattttgcattaattatgtgtatatgtatgcatatatgtatgtatatgtgcgtaagtatataatttcttttgttctttctttttgttatatgtaactgtcaccagggtgtaccttaaacagttttcttaaggaactaatgtggtgctgttcttttgctatctttggaattgatttttgcttaaatgaatcaaacaaaatttctcttacataatttgtaggtggttaaagcataattcattgtcttaccctcaaattggaaagcttatttgcatgtctaagggaaatctggagtccattatccgtttagcaaactggttgaagtcaatgcatgttaagggaagatacataggacttgccatgttgaaaggtggagagagtgtttttgaacgtgggagtgaagaacttgatgaagtttttgagtacttggagagaaatggagtcaggaaagagtggacaggctatgttttgagtcgatgcccgcaactgttgtcctacagttttgaagaaattaaaactcgggtagagttcttcttagatatgggcatgaatgacaaggattttggcacaatggtatttgattatccgagagtacttggctactttactttaacagagatgaacgaaaaggtagttaccctctctatgctcattctgcttcctggaatattttagtgttgtttcttactatttattgattcctctaatatcttaacagcacatgttcactaatgctgatctcaaaaaataaaaaaagttcactattgctaaggaaactcatatgtacaaccccacatttttaaatactgggatctgacatgaaatattaattggttgatattaatgatcctcagtttgagtgatagttgtgagtatccctagcattactcttactgctattataattatactgatatggggatcatcgagcagatttaatttttcaattgttactacttcaccaatctacatagacatctactgaaatgcagctccttctaatctaggttaactatttaaaggagtttggcctaagtattgaggaagttggcaaattgcttgcatttaaaccagaattgattagctgtagcattgagaaaaggtggaagcctcttgtcaagtatttatactaccatggaatttcacgagatggtatgaagagaatgcttactattaaaccaatggttttctgtgtagatttggagacgaccattgtgccaaaggtatgccgtactggatataatatttatataaaactacactcatatttttaacttacgtatagatgcctttataggtgccatctttagattcagttaccaacaagttcctgttggtagtgtcattccctccctcttttattgaagttattgcttgtatgtccttattctaatatggataattttcgtcattgttccaaattgcaatattgatttgcatttcttcattgtgaaggtacaattttttaaggacattggcattcgagatgatactataggaagcatgcttgtaaagttccctccactgctaacttatagcctccataagaaaatccggccagtggtttgtctttttctctttcatattctggtttgaatttaatattagtctccggtgcttaccttcatttctctcctttgagtgcaggacattgcacatagttttgggttgggatgatgggaaacattccgaattatattagtagcatttgttttgagttccttgttattaactttaatttttaactgacgcaactgcccatttgctccaaagtagtgcacacaatgttgcatatctttttcttttcgtaataattattttagttttgcagtaagacacaatataatatgttaggttggggttgctgctttttttttttggtgtgtgtcttatttcgttttattctaaaatttatatattggcttagtcgctgattccatttgatccttgcaacgttctttgaccatttctcaaataaggtttcatagatttttccattgcaattttgatttgttggtggtgcgtaaaaagatgtatgatgtgctctattgctgttatttcttttgaggttgtttcatattttaagttagtaaaaaatcctattttccctcatattgttgaaatttatatatattatggtcaatcattagatctatgttggtatctcgatacttagaatcttattgcaatggttggaactggaactgtcctgcaggttattttcttgatgaccagagcaggagtttctaagagggatattgcgaaggttatagcctcaggcccagagctcttgggatgcagtatcgttcataagcttgatattaatatgaaatattatctctcactaggcatacgtcttcaacaattgggtgaaatgattgctgatttccccatgctgctgcggtataatatagatgttctgcgtcctaagtaccgttacttacggaggaccatggtccggcctttggaagatgtaattgagtttccaaggtagctgcagtggcctttagcctaacttttgtgctgttggacattgcttaacaatttatcatggtctaaacagtattatctgcttctcatatctagctgacatactaactgctgaaacattcatgctgcccaaatgaatataatttagtgttatttctatatggcgtttatgacacttcggatgaccaaatttgtagtcaagatgacatttttaattttttaaatcctactaaattgttagcctttcatccttgctttttcttaactgttctgcatatgttttcaccatttaatttcacagcttctttcctcctttataatgattaagttgaaactctgttgtaggtttttcagctactctttggaaggtagaattattccaagacacaagattctggtggagaataggatcaatatgaaattgcggtacatgctgggaacaactgatgaggagttcgaaaagaagatccaagctataagggaaagacgccaaagatttgaatcggctgttgtaaatgatgaattctttaatcctgatagagatattgatgatgacttcacagtcgaacagacattgattgacatggaaactgaggcagaataatcatttccataaatgctgtctcctgccagatttctgttatcttttctagttaatggtccaaagcctcttaataagaagggaattataatcgagaccaagaatggaagtttgttcgagagcaacgcagtgaagtagtcagcagaacaaatcttctaggaagttattaggtattatcattgatttcttaatttaattatcttcaaccagtgttttataactgaaaatttgctcattacacaaaattatttcttagatgtcgaaaataataagaaacttgttttctgcaactgaccaatgactacaagatggccattttactagaaaagagtgcttgtgagagctccactttacttcagaaggaccattttaccaaaaagagagcttatgggaggtgcactttactctagatcaagccaagagctatagcaatgccctgctagttaagcatgaagtgagagagctatgtgatttctctgcggcctgggcacttgtttgatgttccaacatctgctacaacattcatatgaagcatgactttgaaaatcttctttcaacttccaacaactttgaaatatgagttgaatcagacatgattgaacagcctcattcgtacgagttgcaatagactgagaagttcatttagagatgacatggaaagtagattccttgagaaacttggcttagaagcattggcaaaattttgagggtttttttttttttttttttttttttggggggggggggaattctaaatataaaaaaattaaccccaatttattatggagcagggcaccttccttcttttctttttaatttcgattattttagtaaattaaattaattttt

SEQ ID NO: 14586 - DNA, 3652 bp, Cannabis sativa
aaatttgtgatcatgttcaatgcttattaagtgttggaagttaaaaaaacaaatgaaacaactgtaagcatgtcaatatgaattggcagcaatgagagtctgatttgcgattattgttttaataataattggaccccaagaaaaaagccttctacgtcatcagccataatcactagtgaattctcttagcaatgttcttgtaatttttgggtaattccagaggaatacaattctagagaattgctgtacacctccagaaatgaaaattctattttaaaagggtgtaagaattatgttatgcaaggctttgtttattcctacactgtctatctacacttttatgtttgtagtaaacgaggctacatttaataaccaatgtatgctttaatttcatgtaggtgatcaagagatgtagagacatgactaggggcacgatagttgttgaattgggactaacatgtaggagctttccctcttgatcatttttccatcaagttatggcagtacgatcaccccgccaaaattcaaggctgctgccgcgaaagttccttttcatcatactactgatacttgtgcctatttgcgtgattagtgtatggacctatggccagaaaatttcttacttcttccgccctatttgggaccgccccccacaaccattcatacatgtgccacattactatgcagaaaatgtgtctatggaccacctttgtcgcttacatggctggtccctcctatcccaacctcgtcgtatttttgatggcatcatcttcagcaatgagctagatcttcttgagatcaggtggcgcgagctttatccatatgtctcgaagtttgtaatcctcgagtctaatgtcactttcactggcaagcgaaagcctccttttttcgctttaaatcgtgatcgtttcgcctttgctgaggacaagattgttcacgatgtgcttcctggtgaaatggaaaaccaaggatcatcacacaaggatccctttctactcgagaggaggcaacgcacggccatggatttcctagttcgtatttcagggatttcctatggtgatgtccttataatgtctgatgctgatgagatcccaagccctcacactctgaagctactgcaatggtgtgatggtgtacccccagttctgcatctcgagctaaagaactacatgtactctttcgagttcccagtagaccacaacagttggcgagcttctgcacacatatacggcccacaaacccgctaccgccattcacgccaaacagattacattttttcagatgcaggatggcattgtagcttttgctttcggctcattcaagagattgtgtttaaaatgaccgcttacagccacgcagatcgcgtgacacataaagacttcttaaacttttcgagaattcagaagttcatatgtgggggaaatgatctttttgacatgttgccagaagagtatagctttaaagaactgataaagaagatgggaccgatacctcggtcggcttcggctgttcatcttccttcctacttgattcaaaatgcagataagttcaagtttcttttacctggagggtgtttaagagaaccagaatgaaggtgggatttcctttctgtgtttttttagcttattaaagattaagatcatgttgtagatgaagaaagcaaaacatctatgttcaactgtaaaatagacgacaatagttttggtttatggcttcttcgctgtttattaatggattaactaaagtcttgtgttccttccaaattaagaggaaaatcttttgtaaaaagaaaagtaagtcctaagttttttttcttagcataaggagagacattgaggaattttatcatcctttgggcttaaattttaaataatggagtgtaaagataaggtggaactcaaatgaatttccttatgctaagaaaatgtaatcaccattattgtaatttcattacataatttttaaaacaaatcaaacagtaatttgtaatgaggaatcttttttaaacaaattttattccattacaacaaatcaaatacctcctaaattgttacttctaaaaggaatttttacacacttttttttttttttttacatttttatagattttatttttattttacatttttttagagttttgttttttttttcatatattttaattataatttttttttaataaaaataacattatttttcaccttctatatttttgcaaaagaaaaaaaaaaataaatccataaaaatggtaaaaaaaattgtagattggtatttttataaatgttattatttttggatatttttgaaaatatctctctccaaaaatccctaaaatcatatttattcacttccagtctcctctctccacctttcgccaaaaccaaattcctcttcgactagctgagcctcctccggccttcgattcccggcgccggtcagtccccacgcgtcctagccactgcaagccgcttctttttcccacgatcctcttggtcaccctactccgtttgtcttttttttcaaaccccatactcctatttcgatatgatagtagcagggttgatagtcgctgtggagctcaaatgacacttcattctgattctttttaactgaatcttctcctcttttgctcaactccgatctcatccaattttagaggtagaatgatggtttcttatcttcattattatattttatgattcaatactatttaatattgttattttttctttctaattaacggaaagtttgattgaagaaaaaaaaaattgattctagaatttattattttgatattgtgtgataatgttttagttggtatatataatgtttgataaaatgtctgtgtgaagaagtgattattgattaatttatatttacagcacttcattttgattttccaatgttattgtgaaactatttctacaattatcttctcaacaagttatatatcaaactcatttacttacttagcatgagatttggtttgaaatcttttagaatctgccattttcaaagttgattatagcaccaccaatcacagtttaaattgcttgcaaagttgcaattgcaatctcagtttttgtttctgtagttgtagttgaattgttagttttaaatgaagaaatatctaattcaaatagagatttgaatttaaacactagatatttgagtgatagagattttagctgtaaatagtgagtaagaaaactttcaacaatttagaatcacttgagagagtcaagaggagattgatgagaaaaacaactataaggttgcaagtgattaaaggtgttgtttgtgaagtatggttcttctaggtgtcaatttaattatcacaattgcctaataagggcttttttttgtctcggttattagaaccatacttagattgaggttgtttctttctgtctgttttgctgctatcttcagaattctcaaatggtctaagagtacgggtatatgttttattaattttttttttaatctgtagaaattttttcttatttttattgcctctgtattttaaaatcttgatattgagatttctatttgttaatgcaacattattgaatcatatttgttaatgattgcctttgtaacaaagggcttgctttcttttattttaactgattctaagattggtgtaatc

SEQ ID NO: 14587 - DNA, 3472 bp, Cannabis sativa
  modified_base (34)..(51): a, c, t, g, unknown or other
atatttaaaatttcatacaactgtatttttgtannnnnnnnnnnnnnnnnntgtatttatgaaataatcccttttcgattttcccttatgtttaatttagttgtattatcgaattattatatcatcaatcaggtttcaaatagttaattttcatttatttgtttattttttttcgaagagaattttcacatattatctaatgtgatctttattttttttatccatcgcttattcatttttctatatttcttgaatatgaataataatatgtacacacaaaatatgaatcaaaataccaaattaaaactcagtgttgtgacaatgtttttgttttcagtcaatcacatctaattaagactaaatttatagtttaaaaaagttttatcacatcactagaaatagtgttttagtacatattttatgtgtacattactctaaaaatatataagaaatgaaattaaaattcatattctactttatcttaatgagaggcatattgtcataactaacctaacaaagaactttcatattggatattatgattctttaacactattttttcaggtagaactaattgatccagcagtgaaaggaacacttaatgttctaaggtcatgtgtaaaagttccttctttaaaaagggtagttttcacatcttcaatgtctgcagtttcgtttaatgggagacctttgacaccagatgtgatgattgatgagacatggttttcggatcccattttatgtgaaaaattaaaggtttgtgaacattttaaattcgagtaataatatgtgatttttgtgcacaaacaaacttgacgcatacttatatgacaaaaagttttaacaagcgagactcattttactaaaattggttaaccttttttttttatcaaatttgtgtatgtgtataacttatatgtatactatcatttttaattataacaaacactaattttgttattctagatttggtatatgctttcaaaaaccttagccgaagaagctgcttggaaatttgcagaagaaaatgggatcaacttagtctccattaatcctgggtttgcaatcggtcccatgttacccccaactcttaatgtcactatggagtttgttcgcaacataataaatggtactttttttgttactatttttttcttatgcattacacactaagagcactcataacagcttctataaaatagagaaactttaaaaaaatttaaaaaatcgtactaaaaacatgctacaataaatgctccaaactctttcattttaattttttttaaataaactattcatgctctacatttatagaatactattcattgttcgaaatattttttactaattgttttgagttttaataatgatttctctatgggagataggtgtacatatatatattaatattatatatttgaagtgaataaaatataataaaattttaaaaatgtagaattttgataatgtattttaaataataaagtaaacaagctattgagtgctctaaagatatagaaaacaactttaagcgttattattattgtgtttctgatctaagttatatttgatccagatctaaaaacatgtagtataacatttgtttagtgaaatataattatgaaaattatttttctcaattttgcacgtagtttatttttacgaggtttaccgtgtagagcgtgtgtcattgttttcctctgttaatttgtgttagttagacccgaccttgaaatttagtggaccttaggaaaaaaaattggcctttatttagaaaaaaaaaaatatgtaattttaaaggaaaaattttttttcttgggctcctggactaagtgggtcttaggcacagacctaacctgtctatatctaaggccaagcctggtttttgttcatctttattttcaacaattttaacaaacattgtaattacttttgaatgtgcagcacaaactttccctaatgcagttcatagatttgtacatattagagatgttgcattggcacatattcgagcatttgaagttgctaatgctaatgggagatattgtgtagttggacatgttgtgcatgtttctgaggttttgaatattttgcatcgactttacccaactttaaccattccagacaagtaagttatattatattaggatatttgcgtcgaaagccctttaacatttacaattattacacatatatatgatcctaataaaaaattaatgacgaaagtattttatattacgattttattgcagtcgtaccctgttttagttgttaagtgtcaattcaaaaatacgtgacaatatgtttctttagcttatttaataaatagtctaataataggtcgttacatgtttctgaattgacacttaatgaccaaaaaatgatacgtctacaataaaatcgtaagataaagtacttttatcgccacttcttttgattaggatcgcatgtatgataattataaacattaagggagttttgccacaaatatatcaattatattttaaaattttcttgtcttttaaagtgttgtgctatgaagtttattgttctttgtttattatttttaggtgtgaagatgataaaccttttccacctctctatcaaatatcaaaagagaaggcaagaaatttgggtattgaattcacttcattggaagtgattttgagagacactattgaatcccttaaggacaaggggttcctcaacatctaaagtcaaaagaaattggcatagaatctttgtcaaaataatattgtattgttacaaaataagaattgtgtttatttttatgcatgtcatatgtttatttttgttttgaactagtaatgttgtcattcttttgataaatatggagtaaggttgatctttaattcaacctaatgaattttatttttggataattacataaaatactatttttttgtaaatgttttatatttttaagttcatagatactattttatatttttacagtgttttataaaagtaacatgaaaataataagaaaactacataaaaataatatccaaacaacatcatatcaacaataaaaaataacaaaaaatcaacagcaaattaaataagattacaatataaaaatatactaaaatactatatcttctataaataaaatcataaaaattataaagatatttaaaattccatacaatttgtatttttgtattttttttttttttttttgaaataatcatttttgtgtttgggttcttagtgatgaaattatgataaattaaacaaataccaaaaaaaaaaaaatatatgtatatcttataaaaaaaaattggcctctattgacacatagataacacatacatttttttcttcaaaaaccaataaagacgaaaatcatgcaacccaatctatgtttaatcatataatttaggaggcgtttggttggaatgaatgaaaatataggaatgagaataagaataggaatggaataaaattt

SEQ ID NO: 14588 - DNA, 6963 bp, Cannabis sativa
gtgtacctgagaagtatggttcaccaaatcagatggttgacaacatcccaatataatttttttttttggatagtaaaatagtagttgcattatttatttcaatcttacgaattggagagttatgactgttgcattgttttttttttgcctcttcaatattatgtttaatattgttactttggtgtgtaacattatcattttgtgctcttgttataactttgttggcctgttaaaattgtcagggttagatatcatggcagcagaagaggaaaataacactttaccaactccaatggaatcatcttctccaattcttgatgatcagtctctaatatctgctgcaaataccattccatttcagccagtcctccctattattccaccaggaatcccacccccaattgtgcctccagttgttcttcccattgttcctgcaatggctccaattcctacggttccagctccctccattcttcgcccattagcacctttaccagcccgccctcctgttattaggcccccagtaccacaaaatggtgaggttgtaacgagtgactcagattcagatgatgaatcaggcccttcccgctctgcccctggttcaactctggagtatgagatatcggaggagagtagacaaataagagaacggcacgaaaaagcaatgcaagaactgatgatgaagcggcgtgcttctgcccttgcagttcctaccaatgatgcatctgttcgtgcacgtctacgtcggcttggcgagcccattacactttttggagaaagagaaatggaaagacgggataggctgagaatgataatggcaaagttagatgctgaagggcagctggagaagctgatgaaagctcacgaggaagaggaggctgcagcttcagctgcaacggaagatactgaagaagaaatgcttcagtaccctttttacactgaaggatccaaagcacttttgggtgctagaattgatattgcaaagtattctatagtaagagcagcctcacgtcttcaacgtgcacggaggagaagagaagatcctgatgaggacgtggatgcagagatggattgggttttaaatcaggcaaggaccttagctcttgattgcagtgagattggggatgaccgtccactttctggttgctccttctcacaagatggaaaactacttgccacctggtaaggatacactttgttaacaaaattagttttaactaccatccaattttattttaattgtttggtcaactcttagtcccatccatagtgtaaaatgattaaaactcttcactaattctgttgtcttttgctagtataacatgctatgttgcttggtcaaggaactgatcatgaaaaatctgtgttttaaggttataaatgctatttgtttaataagttgatagatgtcttttcttttaaatgcttgttgaaatggaaatttcggagaaaccttttcctagttgaactgttaactaagttttcggtttgatgggtgtgagatttgaatttactagtgtttggtgttcccaatttcattctttaaaagtatcttttttatttccatttgcttttaaatagtgctttaagtggagttgctaagctgtggagcatgcctcaagtgaaaaaggttgccaccttaaagggacacacagagcgactaaccgatgtcacattttctccaacggacaatattctagcaactgcttctgctgaccggactgcaaagctgtggaacactgacggaactctcttgaaaacattcaagggccatctagaccgtcttgcacgtatcaatttccatccatctggaaagtacttgggcacaactagctttgataagacgtggagattgtgggatgtcgatactggtgtggaattgcttcttcaagaaggccatagcagaagtgtctacggactagcctttaatcaagatggatcattagctgcttcttgtggtctggattctcttgcacgtgtttgggatctcagaactggccgaagtattcttgccttggaaggccatgttaagccagtgagattcggaacttaaacttttcatattctttttcttggtttaatagttacgataatagatttagtttatctaaatcgctggcctctcattttcattcttctcttatcatttcaggttcttgccttaagtttctcaggaaatggctattatttagcatcagggggagaagataacacatgtcgcatatgggatttaagaaagaaaaaatcattgtacaccattccagcccactcgaacctcatttctcaggtcaaattcgagcctcaagaaggatactttctggtaacggcctcatatgatacgacagccaaggtaccttttcctttctaagttacaaagattgaaaaattatgtggttttatttcatatattgtttcttctaaactattatatattgcatccacattttccagatttggtcagcacgagattttaagcctgtgaaaacactttctggacacgaagctaaggttacttcgttagatgtatcaggaggtaagttcattatcctggttaggagtgtaagtttatttgtctaaaccgtaatttattgcttagaacgatttcttcatactttccataatttcatttattttcttcgatttttttgtttacctatctttggttttgtttaaaaagctttcaagcttcttcaattgcttcgtatttagctgagttggttataataaaaggaatatatcttttgatggcagatggaaattgcattgctaccgtgtcacatgaccgaacaatcaagctttggtcgagcagtggcaccaaagaggaaaatcgccatgaaatggagcttgactagatatcgaatattttgaactcgttgatgtggaatttcgggttagtccaaatcattgaagagtgaagttttgactcaagaacagcattttagagacgtgaaaatcgattgtgcctggtaggacaattcttacctctatctgatgttgagttagtgagttactcttctcattttagctactaatacagaccaaatggatttaacaccaatttttcttactgttttgtaaaatccttggtgtcaaaaaagtacaagtagttcctctgttttagatcagagattgtgaagtaaaaaaaagctgtgcaatttgttggtatctcgtctttataaaattgaattttgtactgattattatgtgtatttctaattgatttcgtaatcaaaagaactaatgaaacatttctgatttaaatggaaataatttcctagtattttgctttatctactctaagtttatggtagtctagttttaaattttaatgcttctgaagatttatttggtatatttgcaataatgcttggacttttttttttactaaatttatttgttttttaagaagtgacagaaaatattcattaataattatcaattggacaaaggaagataacattgagaaaaatcaactaatagacttcctaaggtgtttcagtttttgcggttttcgttaactggtctaagaatattgtaaatgagcaagataaacccatagaaatattgacctaaataaactgatttgtagaaggaaaattaacaatggtaaacaactgatttttatagtgtttcacccttttttttttgcgataatgggtaaattcacctataattttattgatcttaatgcttaagtatagttttccagagttatgttgtctaaattttttattctcaagtgagtatttataatgaccgtataattagacatagaaatcaacaaacatagcagtttattagtaaattaattattactttacgattatatttgcattagtagaaaataagatttattgggagaaataagtattagtgagataatttctcaattatggaaattttattgaattctaagtgtatcgatattttcatattttatgctcggtaagagtggaattcgacgatttggctattatacgattgagtatctaagatttagtggggtaaaatctaaggacatttagaatgttggagttatgcgagataattagttatgaccattttactcctagttataagattacttaaaggtgaagtaaataggcattttggtagttagccataagtttgattttaattccacttagtggaatttctaggaaaaaggataagtttttatgctgaagtattattagaataacacaagataaacattacattttaagccaaaactgtttctctctccaaaccctctccttctctttcttgtttggccaaaaaaaaaaccaagaaaactataaacttcgagtcgaattcctccattttcaagcaaggtttcagctaggttttgaggaagaagtgttagctaatccatggtaaaacctagctctctattctctttgatttttgtaagaaaagcttggttttgatgcataagtttgagaattctgttctattaggatttgaggctgttagaattgagttttggggtatgagttatgattgttcgtgttggttttgagaaatttgtagtagttgtagcttgttttgagcaagcttgagttttagaactcaaagcttgctcaaccctggtgattttcatttcagtagatttttggtactactattagttgaagatgtttgttatgtcttaattaggtgttttggatggtttagtaaagtttggagtagaattgagagagaatactcaaagtttgtgttttttgctatgaagcggtccaccgtttccccaaacaagactccaggaaacagtgcaccgtttggggacttgagtaaccagttggggtgattttcgagtacctcgatttttatattttctcgatatttaggatattgccacgctatttatcgatagaaaaacttttagttttgaatttaagtccccgaaagtattttagcgagacacttaacagttttacgtaattgtgacttagagccactaatcgtcgagcgacaggttttactcagattaaccggcacacctgattgcgaagttgaggtaagattagtataatagatgcacatatgtacatgtgttaacatgcatgtttcagttgccatcagattaacatattagggtattggtaatgtgtacttaaagttgcactgagataccagcatatatatgctaggtttacaaaaagtacgaactaatgctactgacactagtacacctagagtactgagtggatgaggtattatggttagttgtacttagttaagaacgtccgagatttagttgtacgcgttggatgcgggtttttagactcatggtaattaggtatatggacgcctaattacaagtcagttttatgtttatgcgttatgcttttttttactgagtttgtcgtctcacaaatatattttccatatgtaggtaaaggcaaggcaaatgctgaccaacagtgaatctagagctcgatgaagattgtacagatctggatggttagacctagagtgtttagattttcaggatggcatgggctcaaattttgtatatgtattttcttgtatttaaaaaataaatttgagatcttaggatttgtaaactttcaataatatttatgtttatttagtgaagttaatattattttaaaaacttttaattaaacaagattttacactaaacctattagatagcaatgattatcacaataattaaaaaaaatattgtagtgcgtttaaacaagtagggtattacaatatttttcactgtgtatttcaaaaataaaaagtttaatgtatttcattttctatctgttttattttatgaattaatttcacaatttgtttcttcaaagaaagaaatgagaaaaaaaaatattcaatctaattaaagaaagaaaagaaagagacaatgtgatagaaagacttaacaagctaagaattgtgaagattaaaaaatgtgaactaaggaatcactacgctgtgataggagaagtgaatgttcgtgaatatgcgatttggagaaatggtgaagcatcgtataactacgtgataggcactagtttcttaaatgttagtttttagaatagaattacgcttgttttctttggtttcaggcttcaccacttgaaatgtacaaattgatcaattataaaaaatatggaggaattcggaaaggagtctcttcctccaaccactctaactagacttgaaatttggaattttaagagcttgaaaactcaaaatggcaatgcctttcgaaaactcacctcccttacttggtcatcttctcatattgcaaaaacttccaatgcttagtcatctatgaatgtcatttgctaaggcaacgctgtaagtaaagatgagaaaattggcctaagaaggctgcaatgatctgatctctataggtatgttttgttcttcttaatacacattctcttatattataatttcagcacatacaagtttgttagttcacattttcttatatttgacagtattaatacatttttgtaggcaaattattgaaactaaagaagctcatagattgaaagtgacaagaaaccacaacaatgttatgatgaactgaaatttctgcttatatttttaagtgtttgtttcctctgtttttctacagttcttgaatcgtttaccatctgttaaaaattaatattttaccgaaatattttgacttaattactcgtctcattaaaattgaccaaatataagtttgtatataatatattaaaaaacaaattgcacaaagaaaacctataaaagacactgttaaaaacccctttttaagattatatttggttggattttataagcaattgtagccaaaatgttccaaccaaattcaactccttaccaagcttgaaaaacaattattagtaagaaaaaaaaacaaaagacaccaataaagatggtacaagcaaaatcatctatataatcatttcataactacattgttcttaagagtagacaaagtacatg

SEQ ID NO: 14589 - DNA, 12188 bp, Cannabis sativa
  modified_base (463)..(471): a, c, t, g, unknown or other
aatagatagatttgacatttatagagttagaattaaaatatggtatctgtgaaagaaaaagataagttcttaaataaaatggtaaaattaaaaccttgtagggcccactaagggttcgaccatagggttgaattaagagccattattttatcttttttaattctatataattctaaacctaaccctagaagaaatcctataaatagaataagatgctgttaatttcttaacctattattagaatattttgtcagacaacttaaaaaataaagagagagcctctattttattttcgaatccttcctctgatatttttgaaacccctatagtgaattgaggaattgcccacacaattcaagtcaatactcaggcctttgtggaagattgtgtagaattccaacaattgaagaagatttaggttcagatcttgattatactctacgacagaaaggatcaagggttnnnnnnnnnaacggaaggagacattatattccactgccaccaatatgagatttttttatacctttatgtgtgttaaattcattgttttagaaaattcatatttaggatgttagattatagtcttataatcaacatacatgttaataaatctagatcttggtaaaataagttccaacatactagccctacctaattcaaactgcaacttacctcctaaaccaatctccttctgcattacttaaaggaagcaactctttcgagttgttacatagtaaacctcccaactatgatcatcttcgatcatttggatgtttgacatatggttctacgttagaatccaaaagacacaaattccctcccaggagttgtgcctctgtttttattggttatccctcgagcatgagggcatacacacttcttaatattgagaccaatcaaagatacatttcttatgatgttatattctatgaaaacatcttcccattctcttttactacttctccctcagagattgacaaatgcttttcccaagcaattcttccaaatcacaaaccagtgacacaggctccctgctcacaagaaccacacttggacatgcaacaaccctatgttgacctaaacaaccccctccggtacaagaatgggtcgcataattattaaaccagcacatatgacagattatgtgtgtcatgcagcttccaccacacatccaattagcctttttttatcatatattaaacttcatcctcattttagagttgttgttcttgcagcttatactcaaactgaaccacaaaattatgttgaagcttctcagctcaaacattggcttcaaagccatggacaatgaaactaaacctttagaaaaaaaaataacacttgaattataattaaattaccctcaggccataaagctattgactacaaatgggtgtacaaagtcaagtataactaagatggagaagtagaacgattcaaggctggacttgtcgccagaggttacaaccaaaggcaaggaattgatttctctcaaatatatgcacctgttgcaaaattcaataccttaaaaattttccttactttagttgctataaataattggaatatccaccaattagaaatcaataatgactttcttcatggggaccttcatgaggaagtatacatgaaaataccttcgcgatacaaggctcctccaaatattgtttgcaaattaaacaaaagcatctatgtcttgaaatgggcttcacaataaatgtatgccaaaattagtcacaccttatccacagatggctagaattaagttaacaaagaacaattatagggcaactcaaaccttggagtatatgtatatgttgatttgtagggtccaatagtcagcacaaaattgtgggtgttcttttttttattttgaaaataaagcgtttgatagagaagaaaattagacctcacagtcattacaaaggataatatcaggtattgaggagggctccacaaaacctgagatgttctgggcaaacgcccaattagccacattatgggcagtaaaattacaacaacgagaaataaatgaaaaattacaggaaaaaaagtttttagagagttgattacataaagaaacataattatcaatattccaaatagattaaagacctttcactgctttataaccaattctgaatcactgtccaccaaaatatagttgtggtttttgagtctagctgagtccaaagcaagatgacacgccgccgcctcaccaattagaggatctctgaagttgagcttggtagcagcagcccacacaacagttcgagagtgattcccctagccagagccgcaatgcacatggaatctccaccaatcttggcatcacagttgattttgacccaatcttcatgcggaggggtccaagccggagaagccaccggagacgccgaagggagtaagcaggaaacataatctgtataacaatgaaaaatagaatcaatggctattgcaatgttactcgggtgaaagttatgtaccttgtcattacggtttttccatattgtgtcaacgatgattgaagcataaaggaacagcttgtcagagtccaccccattcgacttcaagttccaaagaaatttaacccaatcccaaactcgacccctagagtcagggatcgggaacacccccaaggggaggacctccagagatggtaagcaaagttgtaatagaggaacatgtgttccatcgattctgcagtttccccacacaacgggcataagtcatcatcaatggggattctccttgccagtagaccacggacaggcagagcattcgaaaggataccccaccaaagaaatttatgtctttctaaaattttggagttccaaagtttgttccacaaggtcggcgcaaccacacaggcaggggctctctcgtaagcctgtatcaaataagcaaactttgttgtgaatttacctctcacttccttagtccagatccatctgtcattcccttggccacaaggctatcccccttttaggatgttagtaatagtatcagagtcaaacagggacttgagcatggcaatgtcccgatccccattattattaagcagatctgccaccttaaccaccctctcaggacaagaagtgatgggtctaggatagaactcattgccatgaacagcccaaggatcgaccaaacattcgtatcttccccattcgagacaagtttacaagcccctttcctgagaatcacttttgatttgaccacatttttccagaaccaagagtctgaatttgtataggttgcctccatgaacgtcttactctttagatatttagcccttaacaccctgcagtagagagactgttcatcagtaagaagggcccattcccattttgccagtatagcctggttcaattctatggacttacaaaaatcgagtccacctcttgatttgggaaggcataagtggtcccgagcctttaagcacaaaccacgattaccctgctcacaaccccaccaaaaatccctgatcataccatcaattctggaagtaagtttttttggagagcttggtagtttgcatagtgtaaactggcaaggccagtcccacaaatttgataagggtagcacggccagcttttgaaagtaatttcatctttcaaccatgtagcttcgagaccaggttgtcaaggatgaaattgaaatccgtattcaagttagaaaatattcatgtaaaactactcaatattcaagttactcacttatggtattttaaaaaattaaagaataggaatttagaaactctgcgcttaaattatgagaagtgaattggtgattgatgctcattaaacatttttaacaaaccagatgctttatttatttatctatttattttgtgttagaaaaatactcagaaaatactactctagagtaaaaagttcaaaagaaatcacgactatcattaattagacattagtggcatcaacaggattttaaataaaatcccaaaaacaaacatcaagaaaattgtacaattagaaacaatatctttaacaactaaccccccaaaaaatctgaaagcacattatggtttaaacttgagaatgatacttacttttgggtgcttacatagtgcacccataaaaaatgagtgtatcaaatcaatgcacttgatttgtgtttttaatttttactttttttatacatacaatgcacataatagtatttgaaaaattatgtaaaacttttaaaatttaaaaaaatttacaatataaaaataaggtaccaactattttataaatgtataaaataagaaaaacaggtgcaatagattgtttgaagcttatttttagttagtatcgtaagttcgtgcgtgtcgtgtttaaggacatatttttcgtggtatattttatcaatttggggtattgtatcgtgtcgtgctgaagcccgtattttttcgtgcctaatcgtgcttgtaccttccagactcgtgctggtttcatttcttgtcaaaaaactcgacctgtatttatagcactattttcagcggattaaaattttctgaatttctcaaaaatttacaaaacattttatataattagtagaaaaattaaaattaaagctttcttgatgtcaaaaacataaaggaaggctccttcatgggtcttcttgtcctcaaaatgataatagttattgtgaagcaaataatatgtccaaaaattgtggtccttctttaatttatattaggtgagattagtacctcaaaactcattttaaatattttccagcaaaaagatatatacgccatcaatatattcccggccaaaactgaaacgcgtctcctgtcctactcctttgttctagagagaaagtgagaatggtgacattggtgagaagcctatcgtgggtaggcgtgcaacagagtcgaatgatcaattcaagaaattgggtcatcaatcaaactcagcagccctgtaggaacactctcaaacgccttctccccctacgtgttcgagcttcttcaactgtcttcctccaaaccgattccactgtaatctttatgttttcaataatatatttccccacgtctatgtttgtatttacttgaaataagtttggttctatctaatctaccacaacaggatcctactcctactgctgtccaaaatgatgaagacattaataataaaaaaaggagcaacattttagcttgtccgatatgctacgaaccattggcgttgaccggcggcgaactgggcttatctgtgtatggttttttattttcttttttcatcataattaaaactacccatttggtatttctcttaaaagaagcttaaactgtgttgtgctcttttttattttagtgttgatttgtttacttttttgtcggttctttaatttggtacctcttgctcttttaactgttgtatgggattcattggttgcagggaatcagtctctgggtctagtttacaatgtggcacttgtaagaagacttactttggcaatgagactcatcttgagctcacggctgcaagtgggactaagaactatggtgaacccatgcccgcttccacagagattttcaggtaactatctaatggttgtcagtttcaacttattcggcagatttatctttagtggatttctatgtatcttgtgacttgttggatgcaaatttatctgtctaataatcaatcatgtgaagtgaaatacatatatatctcatatagtttactatgttttagaatgtcattttcagggctttgctcaataccacatgaatctacaactctatttataaatcttatgatatgttttaatcttatattatttgtttgttggtcgatcaggacacctttggtatcatttctttatgaaaggggttggcgtcaaagcttttccgtattaggtggtttccctggccctgaaaaagaggtgacattttgtcttccgtttcaactctccaaggatatacaaactctacatacattctttattcaatgatagtaaaccattgaatagggaagtatgtaccatgtagcgtaatattatgctgctaataataatgaactttcttgagactctaaacttatattatatatgttgaaattccatggtaagtgtggacattgacttgcgtttttctttgctaagaaagaaccatgtatgttataatgtttactgcagtttgatctggttcaaaaattcataaagccagtcctgggtggaaatattatagatgcgagttgtgggagcgggctattctcgagactatttgctaagagtaatcttttttctcttgttgttgcactcgactactcggagaacatgttgaagcagtgctatgaattcattcagcaggaggaaaactttcccaaagagtatgtatttgcagttctcattaaaaaatataatcctctgatcctctctaaatggtccatatgctactacttgcaactttttagtgaaagccttttaattgtgtcaaattttatgtttgacatgtatctgagttgttttatttttgttttaggaacatagttttggttagggcagatatctctaggctccctttcgcatcaagttctatagatgccgttcatgctggtgcagctctacactgttggccttcaccattatcagctgtaagtaagcagttgtaggggagtttcatactcactgttgtaatttcattgggttttaaacaatgaaagtgtcaccaagtaaacaaacgcttccatcaaaatggttttgactttataggttgctgaaattagtcgagttttacgacctggtggagtgtttgttgcatcaacctacatacttgatgggccttttagttttttcccattcttgaggaatatacgccaggttaactcttcaacttgaaatttacttgctgtcttcctaatgttataacatgtgaaagggaacttgaccttacccactttgctatcattgcctggaccagaattatctcagctcacatttctgcttctatttgctgtatttttcattatagtgactggaatctataagctaaaatattatgcttcttattccagaatacaaggcaaatatcaggaagttacattttcctatcccaacgcgaactagaagatctttgtagagcttctgggctagttggtttcacatgtgtaaggaatggcctttttgtgatgatctcagccaaaaaacccaactgagcatatgttgccgtttcatctgtctgcttcaaagccgcatttttagaaaatattgttttatggaatgtatatgctatataatagctaaactatgtccaaaatctgtacataagaaagttgaatattgaatatgatgcaatcatataaatctgtactatgttaaacacgagttgctatgttttacgaatatgcaatggaaaaaagaaaaaaaaggataatgcattggcatgttcactaaacattctcaaatttacttattgtaactggaaaaccccaaaagttgtatacaaaagaaatgttagtagatacacgaatgaagaaaacacttctcgctagttctttactgtccattgatttgtaagcaaaacctaaaatcttttctatataggactagaattttcaccacttaacaaaattgagggtaacatagattacattaccatcaagctttgaatttccatctcccctttttcttagttgggatcacagagactctgaagttggcatcttagctaacactgtcaacattttttgtatggttaccgcctgttactttctttagtaaggtttatacctgcaaaaagcagggtatgccttcacaagcttaagtttttccgatattgtagatttgtggaatttaagccaaggtctgcctgtagattatatttacagagcacttggattggcaaaggtcaactggcggtgcagcaaggtattctcatcaccatcactatcaacatcatcatcaaaatcaaaactagcatcttcttcatactccacttcaattactgttctttcctccacttctgacccagataacagaacttgatgacgatgttgcccatctacaggtaattctgatcttatctgcatcatctctgattctatcaaagcttccatttgagctcgctcccgatcccttggataggttaaatacaggaatgagtagataagacagcagagagccattggaactcctattgctgtgtacagagccttggccaaagatgcagcattttctctatctgcagcaatttcttcagatgcagaggaccctttagcaaccggtttataaccataaacatgttgagccaataaccccactacagggggagcaaatgatgagagcacagactcgaaagacctgtccaatgcataaacgctggttcgggatttctcaggaactatctctgcgaaaataggactgcaaggaaggaccataacatcttatatcaaaattcccctcaattcacttctaattttgatttaataagttttagcagccttatgactagaggggcatacttgctgaattgtcaagtaagaagattgaaagagaaaaaaaacaagagtagtactcacttgttcgtggcgggaccattccaagatatgaaaaatcccattacaaccaagatcaaaccatgaatggctgctgttgatggatcatcaggtaaagccagtagaagtatggctgcaagagggatagcagatgccgaacttatttgagctaggattatccttccagcattcggtagacgaacagaaaggacatcacccattttaccaccaaaaagtcctccaagggaaccagaaaccacaaacaagcctataagaaatgcagttttctcatgagagaatcctgtaagctccaaccacatgggtgcaaatgcaagagccgaccagggaaaagaaccagtaacaccctgcaacacaataatctgaaatgatgatattttaacaactgccttagcttcttttacaagcaccttgacttctgaacaaaatgaattccgagaaatctcattgctgggttttatttcatttgggaaatggggatcagtagcgtagacacgcactaacaccccaacaatcacactgattatcccaacaatatgaaacgagatcctccaaccagctattcccatgaaagttgttggagctatcaatatagaagagaggccaccgattatagagccaaggttcccagttaattggagccatccaaaagccataccacgattactctcatccgttgaatcagccacaagggactgaattgcaggagccactagagcaaggcctatcccatttaatgctcttgatacggccacctaaatttcaattcaatcagctcctattattatgaatgatacaatgataaaagatacttctttttctaagatgtcatccaatccaatcgggaaagtaatcaatccacaatgcttaattataattaatactaaaactgaaaaggtaccgaaatctttgtttgttctcctctatgtttggaattggaagtaacgtaatgtaagagtaaagtacctgaagaaaagtggaagagaaggcgacaaggaaagtggcagcggcccaaaggaaagcgccgagagcgataacgtgagctcggttatggcgtagggagaagtaaacggcgagtgggtagcacaaggactggaccatagacctgaagagagtgaggtaaccaagtccagttgggtcggtgtggagggcggcgccaacttctttgtacacacccggtaacagggactcgtcggctctctccatgatcccggccaggttgaccagaaccagagtcaccgtctcttgcttcattttcaaattcattttttttaaaaaaaataaattaattgaattgaattttacaagatatcttacaattattatagaaagatatcttacaataaaatggattaagccccccaactaacccaactaagtgtagacttttgtcctgaatttttttctattgtgaaatttcttttatgaactataattttttttttttttgtaaatatctctctatagttatattttgcttattttttaaactatttattgatacaacattaacataatattattgtgaataaatgaaaaatatatacatacaaaataatataataataaattatgaagatatgtgtgtacttttagagctaatgtttatatgtttaatatctattgtaattctctacaacacaaactcaacacacacaaacacacgaagcaatgcatacaaaccagatatcaaaccagaaaaataaaccaaaccagtaatgaacacaattaaagcataaaacagagaaaaagtaaaagaatgagacaaagaatttatcttggtttggatctcaatgtgagtcctactccaactctcccctaaggagttcttccactatgtaaggttatttacaaacaccaattcagagtaatacaaatttagaattatatagagataaattagctctcaaaacactatggttgagctgctcgagacaccatgaatgccatggttcttcatcttcaacaatcttcctctcatcactcaatctctctcatatttctctcttgctctcttaatctctattgtcttgtctcaattaagattacaattcactatttatataggttagttaagctcacaacccgagctaactaacacctaaaacaaagttcaactaactattgactaactttctaatcaactttctaagaatagaaagttaattccaaaactggttttctatggattactaactacaaattccaccttaattcatagaaaactagtaaaaaacataaacttggggagtgaacttgagattctaaacaaatccaaggttgagcaattccatggaatgactaaacttgctcactggcaacacttttgttcctgcatcagtagagttctcctctgtgggcactttttccaattcaatctctccagattctatcttgtccctgatccaaaacattcttatatcaatatgtttggatctttcatgataaacagggttcttgctcaaatgaattgttgattggctgtctgaaaacactaagactttcccttttaacatgctgatctcttatagaattcccttgatccatgttgcttctttgaaagcttctgtgattccatagtagataatacaaccacatgttgcaactgtgatttccagtttatgcagcaagaattcaactggaacaataacttgtaatcgattttctggtatccttgttggatgtaaatcagcatccttaaatccttccaatttcagtgtgttgccagtcttctcaaactttgaaccatagttggaagtggtctttaggtatcttagaagcccttttaatcttgtccaatgatcctcaccaggattggatataaatctactcaaagtgctaacagcataggtaatgtcacgccttgtgcttatcattgcatacattacacttccaatagcttttgcatatgggatttcttccatttttctctttgatttatcatcttttggggatcggtctgtagtgaacacaaaatgaccagctaatggcacttgagtctcttttccatctttcatattgaacctttttataaccttttcaatgtatgacctttgtgtaagtaacaacttcttctcttttttatttctttgaatttcaatgcctaggatctttcttgcaactcccatctctttcatttcaaactcactgtttagaacatatttcaatttgcttattttgttttgatcttttcccatgataagcagattgtgagtttaagtttgtgaaatacaaacatgtgtcaaactttgatctgatgtagccaaccattgtaaccacaaaatcattcttcttataccgttgccttggggattacttcagaccatgtggagacctcttcagcagacagactaattctccttctttggattccaccttgaatccttcaggttgttccatggatatagtttcttcaagttttccatttagaaaagttgtttttacatccatttgatgtatgtcccaatcaagttgaacaactatagcaatcatcattcttattgtcttcattttaaaaactagagagaagatttctaagtaatctatcccttcaacttgagtgaatccttttgcaactaatctggccttgtatatctttggttcatcttcagttaatccatctttgactctaaaaatccatttggatcctataaccttctgtcc

SEQ ID NO: 14590 - DNA, 8516 bp, Cannabis sativa
aaataatttcatatatgtggtaaaaaagaatcaactcccgaacttatttaccttttatgttatttttttttttgtttttttttttctttatcttgctttttctccctttcttacactagtacccctaataaggcctaagccccacgtccacccaaacatatttttatttttattttttaaataactctctattctttctctctcatatagcttctcaagtgtcattttctcacatatacttcacacaaaagatacaaccattcacttcataccttgtcatttctttctctttctctttatttttatttctttctctttttctcttctcttctctctcctctcaatctcaaaatttgcaactactctctcaaatttgatcaaatcccatctgaaaaagaaaacccagaaaatctcacctgaatttccaaaacccttatctcccaccctacacacaaatccaatttaccctaactacttcttcccacaaattcacttcaaacacacacacacacacagatatatatatacataagcatatatatatatataatctttgagaaagaacttcttcttctttcttctttttaattatcttttgtaatatataacttcccgaaaaagaaaagagaaaagagaaaagctcatctagtgttggttctccctctctttcttttttatttttagaagatggagctgtttcctgctcagcctgatttatctcttcaaatcagcccaccaaacgcaaaacccacacccagttggaggagaagtagcgccggcgccagtgcggccgccacctcaaccgatgaagaagttgatttggggttttggaaaagagctcttgactcccaaaacttctccatatcttcttcaatggctgccaaacccgataagtaccatcatcagaataataatagcaataataataacaatatcaccaacaataatcatagtagtaactcttcctcgtgctttttcgacctctctctttcaaacaaccatcgtctagtttcgaattcttcttccgaaaataacagtactactagtctttttcttcaccacaaccacaaccaaaaccaacatcatcatcatcatcatcatcatagcaataataaacatttctacaaccacggtaataataatattgggaacaatctcttccacagtaacagtgccagcactagtggtagtactactagtatgagtaataatacttatccccacaaccaaaatcaacttctgctccatcaaaacgcaccgtttcatcacaaccttgttcatcatcagcaacaaggaggtggtgttggtggtgggttgggtcaagagtttggattcttaagacccattagaggaattccggtgtaccaccaaaaccacccgcctgctccctcatcctcatttcccttctctcataccctagaaaccacagctaattccttgtcttcttcaatgaatggaatcaacaacacaacaagtactaattccaacccatttcagtctcatcatcatcaagccgccgccgcagcagcagctggcttgatgcgatccaggtttctttctcatcgtttccctgctaaacgcagcatgagagcccctcggatgcgctggacgacaactcttcacgctcgttttgttcatgctgttgagctattgggtggccatgaaagtaagcagctcctctatttcaatctctttatatattccatcttaattaattcacacccgtgaatgcatagttaaaacataccatcatttttcgaaccccccctcccaaaaaaaaaaaaaagaaaaaaaataccttcattcgctcgttcattatccatctctctctctctctcgctttttttttttttattattatatatttaataacaagtaatttggttaaatataattagatatcaaattgagtgatatttggggtactcagttttcctttttcttttattcttttttaggggctacgccgaagtcagttcttgagctaatggatgtgaaggatttgacccttgctcatgttaaatctcatttacaggtgagggaaaaacaaaaacgacactaaatactcaatggggtatttctgtgttatgttcagtatcttcgattttaatcacttactacaacttcagattaatatgttaatgcaaaatcctccaatggttttttatttttttttcggtacttaagttggaaaatccttagcacttctttttcaactagatctgatggttctgctaatcctgccaagctaataaacagctttttgcttggaagaaataaatcacatattagtaacagtgtgaagaaggaaaaaagaaataagaaaaaaaggtgagatagagagagagggagggtgatagagtagtatataaatataaatataaatgtactatattatatcgatttcagcaaacaaataagacaaagcccaaggaattcaaaagaatgagtcgtgtagccaagccgagacagagactacagtctataatgaataagaaatgattttcagattataggagagttttttttttatcttttcttttttctttctttaatgaaacaagtacagaacattatcatttctcaatgatatcttcatcagattggtttcctctgaccacacttgtattctatttaaccatggttaaatgcatgcagtatatatactagtctcccatgcccttatatgtatatgtatatacacatacatgctcatctattatgtatgtagatatacacatataaataattgccgacttgtgtataatgtagtcgcatctacagattgctttgtgttttctaaaataaaaacaactgtacggtaataagtaggcgaaaatcttttttattttttttttggctgggttaagtcggagaaagcttattattgcttttctttctatatgttatttgtctcttaatgaaaatatgaaataaatatcttattgttcaaatttctgtacttcggcaaatgatttctacaatgtatatgctttaatatcattaatatgttgtttcaaaaaaaaaaatatcattaatatgcctagctactcaaacatatttggtatttatattatttggcccaaatttatttcagatgtaccggacggtgaagacaacagatagagcagccgcttcttcaggtattattaaagttttctctcttctttatttgatcataaataatggggttagatatttttaaagtgtttatatacataattatgttcttatgtataattgtattcattatgacaatcagatgcgtacgagaatgggtcatctggagacacaactgaagatttaatgtttgacattcagaacacaagaaggtctgagcaatcgcctcaacagggaaggtcaagtggtcaagacaaggactataacaattctgccctatggagcaattcatcaaggtaataaaaatctaaatctgatgcttatataatttgaaataaaaccattttattatttcaaatggtcctatcatctactccatttattgtgcttaataatttaaatttgttttaaataaaggatagacaatgtatacattaatatcaccaactgcatttatatatatatttatgtacatatattactagacgatccaaacataattgaaacatagtaattatgtgtatgcatctatatgtacgttatattttattgaagtcttttgctttgatgagctttgtttaatatatatctataactacacattcaaaagggaactttgtctcagctataaagaaaaagagagtacaaaaagaaattaaagaagcaataataaggaatggtgttttaaatttgtgtacgttggagtatagagaatacctttagcaataattatatatgtatagataatatttaaagatcgagggtctgacttaatgaagtagtcatcttcactacaagtgtacatcaatgaaaaccttaattagaagtactatatatctatatatatatctctctcctagctactccacacatatagagacataattgtaagtaagaaattacaaaaagagagggaaaataaaactaaaacgtttattattgcttcggtctatctgtctgcaattactatgaactatataggatgctgaaaactccatgatgaggtaattataatctcctctagtgggtgaaaaggggagtaaaagaaacccaccacaaactcctagaattccaataaatgggaatccctattttgacaaaatctgcctaaaaaattgagatatctatctctttcctttggattttgtggggcacaaattttagggggtagggggtagggggtatttttttttttttttttaaatatgcgggccctacaatatgaatatatatgcacaaaaacttagtctcaaagctaaatacttctcatcccacctccaatatatatatatatatatatattaattatatctacatgatcctgatggtcccattagtggaaatctctttgtgccaaagatatatgcggtgtttgaaacttctttgtagtgtgtttttgggtaatgggaaaaaatgggaaatcacatgggagagatgagaaggtggaaattcaactttatatctcaatcaccacaaaatttaaaaacctataaaacttaattgaaagactataaacaaagacagtgtaaaagatagctttcttttctatgtttgcttttatctcttgcatggcttccactgattaaaattaatattctctcttcatcaatgtgcctttggtttttctagcagggaagcttggttgcatggcaaaacaaaggattctattggtggaaatattatgttagcatctcttgatgatgatcaggtacttaacgaattactcttttcgatttaacctttattatttatttcctaaaataaccccagttgttcccttcctctaaattatatattcttaggaatattacgtattatttgtcataaattataaagcatacatttattgcaagaaaagaagagaaaagtatcaatgagagtgtttcagaaacccaatgtgtacgtacatgttatatacatggatagataatttcttctgaaacttaaggtgaacattgtcattttcaaatttcctaggtgatgaaaagctgaagttcctgcatgtgaataaaaaagaaaaaaagaggaaatttctttgagcattatatatgtaagatggtccatggatatattattataatgaacatgcatatattgtaaatttatttttataaatagtctatgtaatgtatatgcatccatgttatacatgtagaaatatatattatatatgattgagaatatgatattgtaaatggaataatattttttgggggtgtagcatactactgtcatgcacactgtagcaggctttctaaacgtactcttccaaagtttctttaatattgataactattcttttattctcctgatgagtcaaatgcttctgattcccaagccccacagttcaaacacacacacacacacacttcttctttcatcatcaaaagctcttactatttttgtgctcattctttttataatacattttcttttctaaaataaatatatatggtttttttttcagaaagacatggatcccaaatgcttaagcgacgaaagaatatcatcatcagatggaagctcaccaacaaatagtcccaggaagccaaatttggagttcactttgggcagagcactttgattatatgattattatatatattatttccacattagtatagatccttcattctgcctctgatcattgttactatactagtacttctcttcttttgaattcgtgatttaaaatgtctatgaaagaagggtagtccagctagctaagctctccttgaatgagagttgtgagagagcttgagatagatgtgagaatcaggtacccatctgaaaaaatcagccaaaaaataacaaaagaaaagaaaaaaaaaagtaaaaggagagctaaagaaagacaaggagacaagaaagacagaaagcaacaaaagaagaaaagggtaggaaaaaaaaaaagcaagtccccccctatcaattgcagctgtgagatccaaatcaacttattatattcctacgtaaatatatgaaatctaattgattttgtatggttttggcaccaagcgatatagagagagatagagaaagagagagctttaactatcttattaaagtattggaagtgatccttattccttggtaattgtattggagcactttacattatatgcaaattattatattaattttattattacccttacctaaacacttgggggctctattttcattcctaggcactttcacatgctttttaacactttgtgacaaagggatttatttatttttttttttgaaaaaagaaacacaaagaaagaaagaaactgagaatataaactagaaaaaggcttggaaataaagatataggaaagatgggaggaaatacaaaagaacaaaaggggaactatgtaggaaaaggaaaatttgaacacactttttatacccattagtttgtttcaagaaaattcctatatggtagatgtagtgaagcatcaagtttttgtgatcaaaatgttattcattaataaatatagatctttatgcttttttaagtaattcctttgcggtctagtcaagtcccactactgattttgatttattttattttctcggtctttccaaataataatacaagctttattgtgacatatatagtgaactaaaatgcggataaaacttatacatacatattacaccggtttttacacaaaaaatattaaattttgggtaaatttttttaattttactgttacacggcagaaattacatttatattgtcctcctcttttttttcttttataatataaacgccaaaaaaaaaagatacgatgcctccatcgttcacacccacagcaacaccaagacagccgaaaaacaaccattaattccgacgaggttgagcaaaaatagtaacattgacgtcaaataaataatcatgacaaaataaccgtaaaacaacagtaatacaaatcaaagaaaaaataaaaggacaaaagaattaaaaaaataacaatcttctacacaatttcaacactagatgcaatagcggctagatttaaaagcccaatcctgaaaaaataaaataaaaaactactaaaacaaaactaaaacaacaccaaacaaatgtagaacaatgaaacaaatataaccacttaaaaaaatatagaagaaccatacacttcaaaactcttttgtcagtgagctcgtcaaatgtatttatgggagaaccagaataaaaaaaaatcacaaaaatagccaaagtgaacgaagaagaaatgtatttataacctccatcttcctcacctatggacaaaaccagcacaacaacacgagaacatatagaataaaaaaccattaattccaacgagatggagtaagagcagtgaaatcaacattaaataaataaagcatgacaaacaacactaaaataaataaaagaaataaaagaaaaaacgtaaaaaaaaaaattaaccatcttctgcacaacctcaatactagatgtaatagtattagaacgtttgagagggaaatctctctgttcgaaatgagaggaaaaagtctgaaaatgacttattattttattaagtgtattctgtacaaaataagggtatatatataaggtagacagcccaataaacaagtgggcttaagtcattgggcctaaatatctaatacccccccttcaagatgaactgtataagtttcttaggttcatcttggttacaagtgtatgaaaataagagggaaaaaggggttttgtaaaaatatccgctatgttgtttttggtagtgacgtgtattagcttcaatgtgccttcgtggaccttctctcggacaacatggcagtcaatttcgatgtgcttcgttctttcgtggaagacggggttctcagagatgtgaatggcggctgtattatcgcaataaggaatggcgggatctttgtggtaaatgccgaagtctcgaagaagagctaacaaccaagtgatctcgcaagtggcattggccattgcccgatattctgcttcagcggaagaacgagagacagtagactgcttttttgatttccaagagattagggagtcgccaaggaagacacagtagccagaagtggaccttcgagtgtcactgcatgaggcccaatcagcatctgaaaaaatcttaagatgaaaatctgaattggacatgttagtttcggcataagcagacaattttacagaagagaaagattgaaagaaaaggccttggccagaagtgcctttgagatatcgtaaaattctatgagctgcatcaagatgaggagctctcgtattagataaaaattgacttagtttgtttacagcaaaagagatgtcaggacgagtaatggttaggtaaatgagtttacctatgatgctgcgataggtttttgggttttctaatggttccccaatatcggatgagagc

SEQ ID NO: 14591 - DNA, 4762 bp, Cannabis sativa
gtagaacatggccgggtaagccattacattggccaatgcactcattttatagccaacttcaaaaatcaatattaagattacatatattttcgccatctccattgtaaactatttaactacgtaactgtttgttcttatcttttccctcaactttgttacagtccatcatattgtattgcaagttgcaattagcttttttatatataaaaaaaaaggtattgcaattagcttagtaacaaacaaaagagaaatgaatgtaacatatacaatgcactctatacaaactgtacagaatttagcctctccatcaagaaattgaaacatacctaaatccaatgacaatataagggactccagctaaaaatgattgaatctgttaccaaaaatacaaaatattaagttattgcatggtggaatgtctgaaaagttgtccacaaagcgcaaggattcatagcaccaaaaaagagaacatacccagactttcaaaagtttttctctctcatatctttcctcagtttgataatccaactgcaaagaaagtaagtgagcgattgcgacatggtcaagagattggagacgtaaatgagagagcaaaatgtggaacgaataagttaaacaaaatagaaatgtatcacaacctcacgatttgtctttagctccacataaaaccttcttccatcatcagttgaatcacagcaatccatttcagcacccatcaaaattcgatgagcccctaactttgttttaatcacagaacaatattcgacattggcatcgacatgatgaattccttctccatcggttcgtcttggatcttcagtggcaaggctctcaaaacaatatccccaataacatctgcagcgagaagacaaaattacaaagttcatcacttatctctaactagataccagtagaaatcttaaaagttcctaaaacttttgcttaataaaagctgcatctttaacatctagtacttagtgattttaagatatagcaatcaaaattcattcagctattacttttcttttcctttcaatcttttaacgggaacataactgattataagatacaatatttaatgggaactaaatactgaactatttagtttaaaggtttattaagtaacaaaagcataagatatagcaaccattcttgagaagatattaatgtttagtaccttcgacgttcaaaatcactttgtggcctttctggaagtttatgaacatcaagatatacaactccattccttttgtgcactcccatttcccaaggctcatgccgaatataggcagtagccattatctacagaaaagggagaagttgatgctcagtacgagctgttaactatatctgtaaagataaatggacagtctagttttaggtttggcagagaggaaagaaaataggacgtaaaaacttgagaagaaagaaaaaagtgttggatggaaaggaaatcatttttctttgtagtttatagtttatactagttctgtaaaatcgaatgagaacatgtttcctttcctatgttttggtggtggaaagaatgcactgatattataagtttactatttatccttatattagtaattttgaactatttatatgttatttattactacagctagttttgtaaattcaaaaagtgagagtttctccttattttctatccattttcaagtgaagtaaattttgcttggatccaccaaaaaagttccactcccttttcctttctttttcattttcttccttaccaaacgatctttccttttttctccacttctctctcattttccattcttcccattctcctctacaaaacagtgttaaggttttacaatagtcactcaaggaattgttctgagtatcatcttattagtgtctcattttcagagatttttataaagagaaaatctgctatatctgctttatttgtatttattttttactcctatagtcactaacttggcaaaacacgaacatgaaaaaatggctaaccattttaacaaataactcaagtaatatcgctaaccataaactaatcaaagatccattattgaactagatttagagttaaaagtaaattaaaagaaaaagaaataaaacttgcagtttaagttacattaatagcagaacagagaaattttagcagtaatatattcatgatttatccacaatatgctaaaaaaattacactgacaaaggaaccagcagttaccttattaaggttgttacggtatgtctgcagacaaacaacacagacagaaatttgaagtcactactaagcaataaaatgtatttaagtactaaaggaaggtagaaataaaagtttattggtttcccaccacaaaatgaatgttttggagtggtatacttttgtctcgtatgcagccaagaaggtcaccaaagccttgagatcccaaatctgttaaaaaaacagacctgtgactatcaatgcctcatgggtataactccaaagaaatgcatacatattgataaagagtaagtattcttctcagtattttttttaactgttacacatgggattcgaaccccagccctcaacacacacatcttgccacttgagctagactaaagtggtcagcaatctaattggtcattgtaatactctcagtcttttaccttttttctcaataaaagtatcaaaaccatcattaagatcagctccaatgtcttcggaaataagccgcttgaaaagcctctgaaatgaagaaaccaacaaccatggagaagggatcaaatcgacacagaatttcaggcccacagtaaatgtaaattaaataaatattcttttgctatctgttcctcatgaagaaccaaagaaagaataagcctaccaagctgcgatcatcaaagaaaacttctccaccttcaacccgactatagttggcaagttcacatggctatcggacaaaattagcattatcagcaaaggattcaggtaaataacgagggaacaatcctaagttcacaaggcaaatgttgaatttacaaaaatcgtgtccaaacagaaaatacaaatgtgggtgactatggtggtttgacaacgcaactttcatagaaagaaggtcctgaccaaaccatgtaaatacaacatagaactacccacacagaatactaatatactttgcatcagtcatcgatggccattgaattatagacaatagaatgtaaacatcagctataacatcgaattgtttaggcaaaactatatggagactaaatgagtaaatacttagtcatatatttctccataactagaaaagcaagttatatcaaactgtattaactaaaccaaagaaaataaaaaaattgatcaaagcaaaataaaatacggcaacatttgccttacttcttgaaaagtgatacattttcttgatagtgtttcttcactttttgaaagcttcagatccgaaacaaagcgttcatcgttacgaccattggagaatttgggaccgtaaccaaagttctgtctatgaggataaggcccaggtcggggcagtatgccagctcctctatcattatgatgtccagcttgccatcgaccgcgaccgaaaccccctctaccaccctggtggtggtggtggttgttgttgctgttgttgttattgtttgtgtttgtattacgtatcaaaggcggcagtactgcaagtatgcagaaaatgcatttgtcaatgtattgcaagtacccagaaacaaaataaaatcagctcaaatgggaatttgcaagcaatttcagagcagaatccatcaatatacaaacataacatttcaatcactaaggtcatctcaacaggaatagcccagtagttcatcttccttaattcagttaataagaatacatacatatatatatacatatatataccttcaattctataaaacccaagcaagcaaaccacaactatcatcatatattaacagatacattagctcaaaaagtaaatccggccaaaaacagaaagatgctaagtaaaacaaaacgtcaaatcccaccaagtaattcatcgatacagacataagatttttcaaaagcacaaactaaaatctattcaataaaacccaatattgaaaaaaaaaaaaaaaaaaaaaaaaaattaaacttgcgcatccgtaccaggaattgagaaagcactaatggcaggggttttgatatactcttcattatcagacccaaacagatccttatcttcatccccaaagtatgccctactactacggttatcagcctcttcgccattctcctcttcaccgtcacctcctccgccactgctggcgcttccgctagcggcgctactgctctcacctccgtcggtagcgttagaagacgaagaagccgctgaagatgaagaggaagaggaggatgacgatgacggtgaagaaggtgaagaggatcggttcccctggtgttgggtatctttgtcagggtcttcttcttctacgtcttctccgaagatttctaactcttgttctgagaaatccattagaggaggagtaatctgtaatcctcccctgagttttggttcgagttcttgggtttgtgatgattagcagtgaatgaggctacaaagtttaacacagaatatttatgttccttccatttccatgtgtttctcaagcttttgaaaccaagagcagcatatctgagagtatctttattctttaatcatcaggcccaacagagtttcttattcggcccaactcgcttctttctaatgggctttatgtatgacccaatggttat

SEQ ID NO: 14592 - DNA, 3453 bp, Cannabis sativa
aatatcatctttttagtttgaaaaatgttcattgtgaaacaaattgtttgaataaagttaataatatttaacaataatgtttttttagattcgtcgttagatttataagttcttcgagatatttattgtaatttgactctctttcgtaatgtgagttttttttcattgttctaggacaattaatgttgttacccacaatcttgctaagtatgtcaggtttgtagggattaataaaatttggtgattaggttctctaatgatattcctaattttcttcatctgttttgagagcccttgctctttagggttgaattttgggattttctactcaaaataagaaatttttttaagagggaaacaacactacttaaacttaagtaatttgtactatatatagggatacacattttctcttggcgttacaaccctacaggtacccgcccctaatgagtggagattccatgtctaaatagagaatggggggaccgagattattttttattcccgagtgttaaacgggatgaggacgtggacattagaaaagtcaagcttggctttatggggcggttcttagaggttggagaggcaacattattgcgggtcactccattcttgcaataggttgtgctaatccagctatggtcgaagctttaactttgagattgagcattaattggtgctataatatataaggattccacttttcattgttggatcagatttaaaattgttggtagataaagttcgatataagaaagaaaatttttcggctttatcggatgttattgatgacattaagcactctttgtctttattctctaaagtttgtattaaatatgttcttaaaaactcacactaataaggggaagggtattgctccacctgatgatgtttgtcttcccactcccaccgttcccaatccctcaaccaaagtcattactatacaggaacaggaacccacctatggctggagtgaaacggcctttcactcgataacatgctctagttagcaactctgtcagaaatatgcttaaaagggccagagtttctcaaggtgatgatgctgttgtctaaactctctctgcctataatgaaacgacgggtgtggcttcacaatcccaccgaggaaaatgaatatcattagctagaatgctcgaggattggggagtccttgagcattttgaaatctctccctattggtgaagcaacaccaacctattttgttttttgtgatggaaaccaagcaccttccaggccacagaatgcatattaataatagattatgtttcgataatgttttcaaagtaccttggagttgtttagggagaggtcttttgttgctttggaacaatattgtcaatgtcaatatcttaaattttttccttaatcatgtcgttgtattgttaatataaacgacgatataaaatagcattttattggtttttatggttccccttactttgcttctaaacattgtacttggacttttcttggtaggatttttgattctgctcctactctgccttagtgcataatatgcttcctctcactcacactggtagcaagtacacttggaagcatggtggcctccttgaacgtcttgattggtgtgtggttaataattcttggcaatcactcttcctttttgcctccctattccatttagggttctatggctttgatcatagagctattaaaactattttagaggaagacaccagagattctaggaccaacaacaaattcttttttaaaaatcattagctctctgataaaaaaaattcagaggggttcagtcttcttggcactcttccaaccaacagagaatcacaaagactctattgaacttcatttctaactaaaaaaaaaaactatgtggctaatataaaaaattggagcactagccaaaagtctctgaagcatgaaatctctaacactcagcatgctctggataaattatttcaaattgatgtctctagtgagcatgacctttcccaagtcaaaagtgttcaatctaaccttaacaatcttttgcataaaaatgaaatttattgaaaataatgatctcgtattgattggctaaaatttggggacaaacatacaaaatttttccatcacaaagcctcaaccagaaaaaaaaaaaaaacaacttcatctgagccattacctcggaggatgtttccattgctaaaggaaccctctctatcctaccactatttgttgatttctattcccatctctttacaactcaggggaggatcaagcatccatatctagcatcttaaatggtgtctctaataacctctcccccagctattcctctaacctggccaacccattcatagctgaagagatccaaaaggctattttttccttttatgtagacaaagcttctggctctgatggccttaatgctcatttctatcaaaaaaattagaatgtccttggcaaggacctctacattgcccttcttgatgttcttaacaactaccctggtcttaatccctaagaaaaagaatgcctccattctttgtgattttagaccaatcagcctctgttataactttacaaaattgtttccaaggttctagccaacaaacataaaattgtccttcaccctattatctctagtaaccaaagtgcttttctctctgatcgacttatttttgacaatattttcattgccaataaactcatcaatgctatcaactataaaaaaaaaaaaggcaaacaaggttgggctactcttaaacttgacatggaaaaggcttttgacaaggttgaatggagctttgtcaaggctgctctcctccatgtgggtttcccttgcgatttcatttctctcatcatgaaatgtatttccactatgcactatcgtatatctatcaataatactctctctgaggtcattactccaaccaggggaattagacaaggggaccctctctctccctacattttcctgttagttgctgaaggtctctcaactgccattcgtgttaaggagcatagtcatcacttcgttggtcttaggatttgtcgaaatgcccctatcatttctcatctcctctttgccgacgataacattttgtttagccctatctctgaaagctccagtgctgccattattgacattctcactatttatcacaaagccactaggcaaactattaaccttgccaagtcatttgttatgttttccccaaacaccacatctaaagctaaaaatagattcaaaaactcccttggcctaggctatgagagctttgtgagcaaatatcgtaagatgaatagtgagcacttccactatcttgttcaaaaggtttcctctaagatgatcactgttaattggtggagactgttgtggttgtgttgggctgtcagtagccttctctgatgttggtgtgggggttgacattggttgagctccgttctccttttctccgttcgcta

SEQ ID NO: 14593 - DNA, 5869 bp, Cannabis sativa
actaaaaaactttcttagatgtcaaaacgaattttttagctagaggtgcactataaattttttcaaataaaaattaatagttggcccccctagtaattaggtcctggctccgcctcgtaggcctagtgttttcgagccgtgctcaaattcatgtagtactttactcattctggcccgttttaatattcgagctcgaattcttcatttttatttttttttttcatatttattttcacaattaatgagctaattactaatatatatatatatatatattgcagagcttcaacaatattttcataaattattagtaaaatatttaaattatagtaattctaataaacttagaaggtaaaatgaatgtagaatgatagttaagaggttttttagtcgccaaaagttatatatattttttgatttatgatatgtttgcattttatttcatcaatattttagatccggccctcaacacggacttaaaaccaagccttgaccacggaccccacatttggactcggagtcagctctggcccaagtttcaggcctcggtctcgatcagtcttgaatcgggaccccagtgttaattttgtggtacttaattaattaggtgtacaaaggaaacatatcagtgattataattgtatcacactattgaatttcaacatttattaattaaaataaataacagtataaaaatgtccaaaatagagttcggagtcaaaattatggccaaagcaagtttcataaaattttggcattgctaaacgtattgggttgcggctcctaaattaaaaatccaataaatcagattttgagctccaaaaaagtaccaaactctacacccaaaatacaatatcaatctcactcaattaaatttgttatgcatagtttctaagcccaaaaaaagtataatgctcacataaaatatagtagttatcttcatgctccaataatcaaacttattagagcatgaagataactacacttattagcacacaaaaaaattaaagctttaaactatccaatcaaacttattacacaaatattatttttcatatttcaagagcttgaaacacaagcatcagctgttaacaagctcaaataatgctcaaaagaaaaagctaaatacttcaattcagatttcatgctttaaaacactactctaaattcaattcaccataaacatgatcataaaagctcaaattcaagaacaccatatatatatgagctcgaaccttaagactttaatttataaattaaaggtgaggaaaaacgactcataccttaatttgcttttataatccccaattattaaaacccaaccaaagatttgttctgtggtgatagaaatttttttctcccacactgttgtttcaacagatccccaagatctatgtgaattttgagcatttattccatgtaggactatgtccacaattgagaagaatgaaataaaattagatcaattattccataaaaaaaatgtatattgaacacatcaaattagtttactaatttactagtgacaataagtgcctaataataatatcttgttctcctaccccttctttctaaaatgttgttcaccatcttctcccaatatgactctgtatgtttattgaatttattttttctacagctttttgttcctattattcattcaccaaatataacattacgtgtttagtacttaatcccataatttaccaaaaacataacattgtttacaagtccaatcctctctgcataatccagtacaatcttgcttaccatataatttgcatacaactatactggaatttcatgttatattaactacagaaaatgaatatagcaaagaaaggagtgtgagaaaaaaaaaaaagttcacgggattacaaaaagacgaccgtcaagtttcattactatgtacttgaatctccattaaactgatctctatactacaccctatacaaaacccctaagtaataaccagatcaaagagcaaactcaattaatcttcatacagattttgaggtatctccccataaacaattctttactaaatattgttttcactgaaaagatgctccagtcttggaagatatgatcatatggaaacactgtttggcacacctctacatgttacaccaggttcagagctaggggcaagtagttcataaggtaacaccccagctccacacctatttctaaggcttggatcattgttccttctctcaatttccttttcaatatttttcacctgagctgagaactcgtaaaacgcctccacaatctcgggatcaccagaccaaatcgatggctgttgtcgctccccaatgtactcctcgtcaggcgaatgagtagagagagtgtcaaccacagccataaattttgtggattgtaacacagaaggcaatgctaaaaggaagtatttctgagggtcagcaacaaaagtggcatactctggatcattctcttcagggatcaatctcctcattagtggtgggcggttaggaacgtagccaccatatgggtactgcccaaaattaagggctgcatgttgggctgaggcaagccaaatgagggtagtgaggatagaagttagatcctcaggagtctctagcttgggccaccaactttcattcctaacatcggcgtggcccacattgatggactcactgtaccagttctgcaactccaagtcgttacaaaccacgcttgaatttgggtagtatcggttgacataggtgctgacccagttctcaattgcgccccatatcaagagtccgtcgttggcatatgggtaatcttctattacaaccttcacaccatgtggctgtgtggggtcaggaacagccattcctctgcaaaaagaaacaaaacagatcttaaattagattcattgtatgactattgtttggtctacaccttttacatcatcatagataagggtcccagttttgtttttcgaaaatgaccatgtttcaatatctctgttttagtactctgttccaacaaccacactaattacgtcctacgctttattaagaaaaatatacaagttttttgtgagaatgataaatatataccttcgaaccaaatcggcagggagattttcctggtcaaaacgccacatgcttttgtaagcagcagcactgatttccatgccgtagcgaccggctgtgaaacaagcctcaatgacgccatcggcgttgataagattctgtcgtgccaaagcattgatctccagagtatatctcatgtgaggatccaaaagcttgtatatgggatgcattgcgctcatttgcctatgtgcggacaatataaacggttcaaggctagcatgcgtacgtaacctgtaacataacataacacattgtcgtttataaattatcgatagctttgaccaaataaaaacaacacaagtgaaggtctgactatggaagtagtgctcaccaatggtttactagttgatggactccggcatcgttagtgcaaacgtgagccttggcaagctgccacacccaattggaggtggcatccacaggtggtgtcaccacacgcttagaccgggaacttggtccggtttgtgggaggctaagctctatggctacaggcttaagggtgccttggggtgataggaaataaatggttcgagtagcgtaggttcttcgaccatcgagtgagttgatcttgtcaaggaatggaaggaatatgtcatgataatccaccatgaatagcttcttttcatccaaggcctgtgtcgagaacaaaaatattaattagcaaaggaagaatataatgtaaaaggtgatattaattagaaaaaaaataaataaaatatattaatgtacctgctggactgtcatgccattgagatggccaagaatatgctcatctttaagagcagactcttggggtccataaatttcagggtcaagcttgctcactggtggaaaaacagtcattctctctatggagaccggattaacccccgcgatcgcttgacgagcaaattcatcgtccctcagccaagcaaatttatcctctgtaaatcaagaagaactagttagtacccatatgaacattttattcaacagtaatagtgctttggcttttgtttgttacactcacttgaaataattttaggagtgtcatatttgagtatgcctttattttgttggattcgggtaaccaaattcaaaggtagcttcttgagaagttcttcttgcacacccaatttgagtagtataccttcactataaaggttatcaatgtcagcaaaaccactgaattcttggttttcagctgaaaagctagcctttaaggaaggtattaaattatgcaacactgctttcagtctcccaaatgagaaactggcctgttttgactcctcaaattgttcatctcttggcacatacaaagggaatggcttctcgattctactctctgcttgcaaatctacaaggccaatgttataattataagtttcacattttggccaagactaaacaagtgaatatattaattcattcattatgaaaaatgaaaacatgtgttaatatggttaccagtatcagtagggagacgaccagtacgacaccgtctaggatatgggatttctttaccaccaagtttaggacgagctaattcagttgacttatctgggtttcccaaatcattgtacacatcaaagtcataaatcctgtctgataattttctaactcctttgccatttcctctcaagatctttagctctttttctctcaagactttaagccctgctggagtttcacttggtaaatatggctgcacaaaattacatatggcaaagttatgtcattgtattgatatctaaataatatcttaatgaaatatttaaagttgtaacttgtatcagttagatattcttatgatgggctcaaggaaaatatctcagtgcttggtgacccatttttgttcaaaaacaaatgagaacaatgaacaaaagggaccgacactgagattttctttattgttattattgtgttcaaaattattgaataatctctaaagtacccaatcattcatcagataactaatcatttcctttatctttaatttgactttcctttttttattttttgatcaaacaaagacacccaaagaaggaccatttagctgactaggggctttaactaacatggacttgaataatcttttctttacattaaacagcttgaaaaatatgtgcacgctcatagattgtaacgttcataagatagaaaattaagagagtagttgattttttcctctttataggaaattaagtatatttataatcaaatataattggcagctaaagtctttctttaagaaaaaaaaaatatccaaagagatcattccatccatttagacccatgcacatacctaaccgaagctacatgcacgaatttgtcacttgcaaatattcaaagacaaattaaaaagaacagctaataaatccggcggcatcagcctaaaaaatcctctcaagagggcttataaaatatttaataataaaaataataaacaacgacatctaacttatttgaagaaaatattaaattaagttacctaccttattagagaaaaatatcctcttggcaggatgatcttttttagattggacccaagaattgcaggggaaatgtacaggaccacatgctaatccttcaacagttatggcctctaagaaaaactccttttgatgcttgttagtcacagtaattgctccaggaataccaaagttagaatccacctcaaactcagctgtgtaattaaccctttctgctttgacattaactttctttgaccaatctctcagaacagcctctttgctcttctttggaccattagttcctaaaat

SEQ ID NO: 14594 - DNA, 3886 bp, Cannabis sativa
aagtaacttttgtaaaacagaaggggttcaaaatgatatttatcttttttttttaaagtatattcagattttataaatgtgattactggaattatagatgaagatgaatcagctagttagttatacgcttgtaattattggtcaattaatcgttgtaattaactaatcagtgttgagtcttgacaatcaattttagagctactttactaagttgtaatcatcttctataaatatacaaactatctcaaaactcataaaacacttggtttctccttggtcttctagggccgaatgtagcgagagaaaggtaaggtgtgtgtgttgagtgtatttttttttttttttttttctgaaataagagaataacttgaaatgttcttttaattaaatcctttccgcccaatataacttagataattatggaattaattccactaactaaataattacaataacaaaggaccaatatactatttacttctcggttgtaatttaataacttaggtgtaaaatagttaaaaacctaaataaatacgagattctaaatctaactattttaccagcaactacaccgtatttaagtgactttaatggctaaatcatcacattctattattaccgagtatagaatataaaaaatataaaatttcatatatagcataataatacacctaaatttaaatatatcaccatagttataaaaataataatttaaaacctatttctaataatatgctataattatctactaattcatgtaataaagttagcggtcattacacataggcactttgcgtcctcactagatttttctacttatatcatccaaccgtatttggatgaatggtccctggggtttgttcttccttcatacaattccatctgagacattctaaagtgctccaggagctgtgcatctatgattccgtgtcctcttctttcgagtcaaacacagtttcattttgttgtctaagatcttttctgtaagctttgttaactttttaattttacgctccaatcattgagttttagcatcggtccattctcttccgcaaatgcaatcattaatatggtttcttaggtcgtctctgtgaggtctggctttctcagtttagaccttttctatttatttggcatttagtctcctcgaaagatcatttgtggaaagattttcacttttatcgtctgatggcagatacacctcttcgacatcatcacttcaactaacaaaatcatcacatcaatttgtatccttttgggccgtaggcttcttggtttttgcatcaaatttatctttctgcgtagctctgcctctagaatcagtttgttcatcttgccttgaggcatgattttctttttttttttttcttttgaggttggctgatagatttgaatttcttttgctgttcagcttgggcagccttctttaaagttccacctactttcctttttcttttatctaggttccaagatttttaggatcaactttcttggtagtgttatattttgaagctgtatgattggttctgcctacagtggtcagtgctttgattacgacctccattgtttctattttctcgtgcgtgaacaaagaaaattactcttgcaacgataatttatcctcaactattttcaattttctggccatggtgaccatatgatttgactcgtttggatcaccttccttttcggcatcattatcagtaggcatatattgatgatcatcctcaagtgtatcctgatgatcatctccaagatcatcagaatcattctctcttgattcatcgtcttcaaccataggatctttagggataggttttttactggtttgatcctttttgtggcgactggtcgcctcagttggatcttcaacatctcttgtcttagcattgggatcagcatcaccctttttagggtcagtatagtgaagatcaaactgagtttgggtgagtaccataattgttgaatgtaatcttggatggtatcattactttcatcaactctcaatgaaagcactaaaatatttatcaagatttttagaaaatgaattatttaatttagagataaagaaaatgtgattaaaagaatcaaatatgaagacaacactcagaatttttacatgattggggcgctaataagtcttagtccatgagtctatattattatgagatagactggaatagcctaaaggattacaatgaatatgaacactctattctattctcaagtttgcgagtcaagaaattctaaccctttgcatgaagaatttaatgagtatttaaagagtaatagaggttgtactcagttacactttccctataatggggagtttacaaataatacatagatttaggcttatctgacgaagtccaattcatgaggcaatgtgtgtatgctgatttggcattttgatcacggtcataactattgttatcatgtcctataattttgggtaattaattatacattgattattgatctttaattatgtagttttctatgttaatttaatattattctctttttgagatttaaggaaaataatttccttattttttacaaaataataatgggaaactataactggcatccaggcacacgctagatgattcttctagatacagggagttaagatccttctagatatgaattagccttggcagaagctcgcccaagcgagaaatgtgtttgtttctcaaaagtccagattggtattcgacccaattcatatcatttaggcccactgaggggcttcaagctttaatttagaatctgcgtgcccctcggtggaaacatggataacaagtccaatgtgcttcatgtgattctaccttgattaattgcggccataaatatgatttatgtatggttttactttatgtgattataattaaggcttttatctagattgtgagatttataactcgagatgggaacttttaaacaatcaaatgtcgggtagatcaacttaggtggtgtgagatcgagagataagtattcacttaggtaaccgagataattctaaattgtgaaattgagaggttgaatatttagggttgtttctagagtgagacttaatgaaggtaaggtataatggttgtatagagatatagactattattcgcttacacattttttatgcaacactcgagagagggaataaagatacaatattgctctaagttcttgaaaatattaggataaactaggcacattaatgattaaaataatagttgtattagggtgaaatcgaaaccttgacaattatttttatctgtttattctcaattttattttgttatttttttatctttgttagttaattttaatttcttgaacctattcaaaatcgattgcttaaataaattaatattcactataattaattgctttaattatttttaatcttagtgggacgatatcagtgacttggccgctttattacttgtcgatctgtgcacttataagcatatacatataaaatttgcaacaagtttttatggctgttgtcagagattaagaaatttaaatttttaaattaatatagtgaagaaaatattgaattttaatctaagcttgctttttttcagttgtttacttatcttttattttctagttattgttgtttaaggggctacgagttagatcatgaaaaataaagtgtaagatggaagtaaatcaaattgtgtcactgatggtgcaaatgtctttgttaactaatcaaatcaatagtcttactgaaagcaaagggatttcaagttaatagttggtatatatgattgaaatttataactctaatacttttgtggatgaataatgtcaatatttcaatgagaactacaattttacgcccatccacaactttcttaactactatcatccagac

SEQ ID NO: 14595 - DNA, 9924 bp, Cannabis sativa
  modified_base (1826)..(1832): a, c, t, g, unknown or other
  modified_base (7915)..(7917): a, c, t, g, unknown or other
  modified_base (9700)..(9705): a, c, t, g, unknown or other
  modified_base (9799)..(9799): a, c, t, g, unknown or other
agcctcttgcatccttagttgtgttgttgaagctctcagcccagttgctcgtcattacattgtaacgtacccctggaaagttcgaccgaaccaatttctcaaatctaatttcttcaagatgttgtgcaaccgcaacattcattgcctaaatctttttaaattctctgtgaaacattatttttgaatacgtgtaggcacatgtgtaaatatgatttgtgaagacgtcagtcttgaacttgtggttgacattcatagaaatgtggtggtagcatccaccgtggtgtgcatcagggaacaagatctccaaaccatgaataatgttttgatgcctatccaacacaaaggctaacttctcaacatcaccaatcccttctttcaattttctaatgaaataggtccaagagttgtagttttcactgtcaactacaacgaaagctatcagaaaaatatggttccctacatctagtgccactgcacacaatattttcccaccatatcttgtcttcaagaaagacccatcaatgcatacaacaggtcggcaaaacctaaacccacacctacaaggacccagagagagaaaccatacttaaagcaaccatcctctaccacaaaatttgtgatggtacctagatttttcaactttagcatgtgcaagtaatcatgtaattttgagtatgaatcttcaggtgtaccccgaactaggtgtagtgccttctctctacacctccaagccttttcataactcatttggatcccaaaattcttgtacatatctctccttatatcagaggctaaattatccaagccgtcatttgcgaatttatccttaattaggtgggcaactatcaaaggtgatgcttggtggttatctttttctcgaagatcaaaggaacatgtatgtttatagaaagcctcgaggtgacacaaaatcgatcaatagtagcttgtataatttttagagagttctaattccctttgcaaaatatgactaaatcattcgtaaaacacgggttaacaagtttcagcgacttacacaaaggatgaaaaccaaaccccttagtattagaagtttaatgcaacaacctagtaaagtacttcataatcaaaacaaacaggaaatgagacatggagtccacttggcgaaggcttttttttccctttaaacaagccatgaagcttaccatttagcattaaaatataggacgtacctttcaagcaaaccaagatccagttgttaaactttgtaggaaaattaagaccattgaaaaattagaaacaaaccaccaatcaacaatgtcatagttaataaacttattaattactgaatattgtagtttcaaattgtcaagataacattgaaaatcataaaaacaaataaataaataaataaacatgtgtaattttaatattttcttttaacaatttatcattttagtatttttttttaacaatgtataatttaaatattagaagtgaaaagattaaaaaaaatatctgcatcactttttagagaaattttttttagtaaaagttattttcaaataaagaaaagtttttacaaagttgcttacaattatgtaaaaattatttacaaacttttaatctgtatttttgtaatatacactttttatatatatatatatatatattaatgtttttgggtatttttcaaaattctctaaataaaatataacaacacaacatttattaacaaatatgaccaggtttctagtagcttttttcctttctctctttgtcattgcctcattcagctggaattccactcataaatgtattagctttatttttttcataataataataannnnnnnaataataataataataaaatttgaaagaccaaaaaaataaacccaaaataagctatcaaaaacaaaagaaaaaagacaatctataattgcagtgcattctgatctgaaaaaagggaactgtgtgactccaaggacccaagtcctcttaacatgaaaatagcctccctagagggaaacatagtgggtttgatagggtcaaataacaataattgcataacaacaacccatatcctactaaaaataaataataaaaacttctaagaagaaatgggcaacttattttcattcaatcaatagagttattaatcatatcataatgcaatggttgtggactatcttttatgagttgataatttttgtcacccaatatgatttaaaaaattatgatgtttcacaatattatattaaatgatattgcatccattaattgttagaaccccatacaaaaattaatttttacaatatttatatgtaaaatgataattaaaaaaaaaaattgcagctaaacctcttaactattattccttttatatttaatttttcaagctcaaattttaatagtaaaactctcaaaactttaacaaatttaaggtgtcatctaatttttacctgccaacataaactgcgtatgtgtgcactcttatatatgtggcacattgatacacctaatattattatttaaaaattatataaattaatttatttcaaaatttataattttttttattttttaaattttttattttctatttttataattttgtttaattttaaaataataatagtatattccaatataaatgtatcacgtgtacaaaagtgtacacataaacagtctatagtgacagttaacaaggtaataccttaaatttgctaacagttcagtagttttgaaagttttactaccaaaatttgagtttgaaagattaagtataagtgaaacaataattgggagaatttaactgccaaaaattaaaaaaaaaattatacgccttttcagtagaagttctatacacaaatctagtccgcctaatctatgcggaatcaagtagtatgaattccaaatggtacctagttacccaaagacctaaaagctaaaaatgtgttgtaaatttcctcatttgttggttttcttaaaactaaccaactcttcctctctacctcttacattatagggtgtcctttgttatttgtctttttggtatggttacagctaaactaccacaaccctttacccccttctttctctctctcttggcttttgagtgaatctagtaaccttgttatagtagcatagtattatgtattaaataatgtctccaaataattatgcttagtttagcaactaatgacaagaacatcttattttcttttttcaagcattaattcccaattcacatattttgtgatgcttgtccatgactggtttccactacggttgtttgtttgttggcatatacccaaattagcatataagacttttagctcaaaaaacaaattatgcaactaatcttttgtctaaactactatatatgtagaatttttaggcacataatgcaactcatctaccaaattaaaattcccaaatggccctatttagtaattttgaacctaccaatacctataacattctacccacttgaattttggttgttaaataaatcaaccttagatacacaacctacttactccatgactttagggaatgaagtgaattttgaagacatacaatttcaaagtaattaagctatgtcttttacaacaaaaaccaatataaaccccatcaaaacctctatgctttttttcctccatttgtctttgtttatggaacatattatagatagtgggatatgttaccaataagaaaaataaataagcacaagtggcaaatagaaaaataaaaatgttcttatattattttagttatttacttggtgttgtgtggggatggagatcaattaatatattcctaattcatttgagtggacaattaagagaataaataataataagtgcacattgctatgcatggtgatagatgatatggtagaaagttgttttccttaaaccctttttaacaaaaaaagcatacttaactaagaggattacactaataaaaaaatgtcaaaatcaaagctcttttttttgttctaaccaccatagattaccctaattcttacgtaaactaaaacatgagaaaacacaacagttttaactccactttacaacaagaaaaaggtacaaaagacaagaaaacatgtcaatttcaattccattctttacatgtaaataaaacaagtgacaataaaaaaagaatcatttccaattacctatgcaccgaaaggtttccaatcacatttttcttttttctcaactcaaaaacaaaatttcaattaagatttagttagtgtcctaagaatgattctctcactaagtcttaacgtgaatattaaggcaagaaatagaagaacacaacaacacagtacaatatcttttgattttcaagtctatgatttattcttcgaagaacaagaactcatactccaagacacaataaattaaatcaaaagaatcagatccatggaataatcaatccaattagaataatatttttgcaatcactaagagatgaagtttttaataataataataaataaaggtatattaaaataccaaaagtaataaaattgaatgttacacatgaaagggaatcacaatatctctctatctccctcctttgtaaccccaaagtaaccagcacagttacatattatatttctaaaaaattacataaggaaaagatatttggagcaaaatcctttctaatccccaaaaatggactataagagaggataatgatataatgatgacaccctcctaaatgatttaaccaaaggagccaatgaatattaataataaaggggaaagaaaatgatggaacaagcatataacattttcagttttgacatcatagatgaaaaaaaatatgacaaatcatataattcctaaaagagacccttcttctttcttttttttttcacttctagagtatataacccagatgtgttcttacccttttctagttatgtggtaaacaataaatggtgaaaacgaatttcttcttaggaggagttttagtttctctcctccatttggtttcttcttcttgttgttacttactgtagttaccttttctccacacccaatcccgccaacaaaaatctgaaaaaaaggcattatgttatgtaccaaaacctttctgttgttgttaactacctctcagggctcttgctgaaacttttttcagttttgctgagccacgagatgatcgagctgcatttgttcaagccatgctcccagcacggcatgatcgactccctccgtttcgttggaggacgtgttattggccgaaacacttgaaattggagcctttgacttttctttcatttcggttggagattctttcactagtgattgaacccatgataggtccggttcttctccattgttccctagctcaaatgaggaggacctgcgatgcttgcctagctcatcggtgctaactgcccaatccggttttccattggaggatccccattttgaccaagaatttacaggggaaccaacagtggaagcagaattggagcccagttctcgtgagctgagactgcggaactgctgcttgtctcgctgagctaacatggaaacccgagagcccattggtgaaataggctccatatttcgtggagacatcctcccagatgagggggcaccaaatgaagactgatgcatgagagggtgatcatttttgggggagaaatttgtgttgattggagaaagcatagtctgctgctgctgaaattgattgataactgctgatttgtgagtcggtgagaaaacagccgatggcaagccttgatcagagtacctaggtgacgagctctcagccgagaagagatcatctagattcgagggtgttagtgtcttcatcctcccggaacgattcaaagaattagaactaaaagatggttgtgagagacaagataactcattaaggagttgatgttgctgctgcatatcgaaatctgacagtaaatcaaagctttctgttggaatgtctcttgcattaagggaagatctcaagcgactggactgaagattgctgcctgggagatgcaatgcaggtacatttggttggggccagccaccagaggcatgggacataccattaccagaaggcgatattggtggggtgaatggtgaaggagacatgacagacatagatgatggagagccaggtaacatgttcattgctgcagcaaaatccatggcagcagctccagaagtgcctgtgcgaggagaaggaacagcagaaccagtagagacgtacaatggtctgagttcttcaggagtatgggcaaagaagcagactctccttgcacagcttgttccatctttgcaaaggcgggttcgatactgagctgggtgtaaccagcactcaaacacgccatgagcatactcacacatgtccccacgtctgcaagctccttttcgaaattcaggacaaggaacacaactgtaatggaacttcctgggatcccttctccgtgcattttcacctggatggacaaaaggacattcagtccaatcatgagagtatgcacgagaacacggccggaccttgaatgagtacattcgaaactcgtccgttgaatagatgctgttcttgatatctggaagagacggatcaacaggatattctttcttctcggaaacaggaaaatcaataaacttagacctcgatggtgaagaattaaaatcttgacccaaaggagatccgttttctgaagatgaagaaagagtaggagaccttgaattcacagttctagttgaaactgttagagtgtgttccatagcagaaccattagtcttaaggagctcttcaagtgccaatttgacatcttgcagcttaggatgaacaactataacatcaagaggaaaatgaccattgccatcaaccaaattcggatcagcaccagctgctaaaagcagttttacaacatcaacagcatttttagccccaccagatgcagcacagtgaagtgcagtacttcgatcaagaccacagtgaaaattaacatcagcaacagacaacgaaagaatcaattggacaacgtcaatgctaccgtaagtggctgcaaccatcaaaggggttctctgttcattaaccatcacctttgagcccttttgacgaccataccagagaccaggctcatcaacactggaagggtcgcgctcaattgatcttttgaatccatcaatgtcattgttagcagctagctcaagcaaactggcaaaagtatcttcggtttgaatagtcaagtgattcatggctatgttggtgactctactttcaattatagaaataggagatggggttgaagatgatataggcttcagtttttctgatccacagcacatgcttttattggccgaaaagccagctggaatttgaaatcaaaaaagaagtattaaatcaccatttggaaagaggccaatatacatatggagtaaaaacagcttttatttctgaatgattgctcaaaatagaaacctccctagatcataatttaacagaaacaaagattcagagcatcaataagaaacaaataaaacagtcgaataaagatgatacgctatcaaatactagtttaatatacatagatatattatcgtgaactctcgaagactcaaaagaagcaaagttttccaagttttcgattaatttatacttagagccttcacttttattcaacttaacatgattttaaacaattcaaatgatttccctctttgttcgctatgttttttcaaaagaagaaaataatctaaaaaatgggtatggaacgttcaatgttatactgttatactatcacatgatcgttcggcggcgcacaatttctaggaagatcgaaaattaaaaaaaaaaaacaaaacaaaacaaaaaacaaagttctgaatacagcgattctaggaaaagtctcagcaacctcgccccccaattcaatttttttttttttttnnnaaaaaaaaaaaaagaacagaagaagacttgttgaaaatttgtcgaccataacaatagaaatggaacaaaccaaacgagatctaagaggcacaagaccaaagtagaaataacagaaggcaaaaaaagctaactctgtactttaaatatcttttttcagcaaaaacaaaatatataaaaacatacttcaatagttgatggagaagaaaacataatgatcgaaataacgatcattcacctaaaaaaaatcagaagtgaagtgctgatattaaaaatgaaaacggaaaaaaaaacagaagaatttttttctttttctttttttttttttttaaagaaatgatagcgtcaacaaagtttcaatcaagagtcaaacaacaagtaaagatttcacaaatatatacttataccaataccaaagcaagagaagagtgtaaggatcagacattagtataatccaactccaagccttatcgcatacctattttaggcaaaaccaattgcgatactaatatttttatccatttaatcaaaaccaaacaaacttctcacagagaagaatcgtgtcgaagatcaaaagtagacagaaagaaaggaagcgatctaagtgttcgtatatatatggctatatatatataagtatttgtatacatatatatatagggtttggttctgatcaaaacgaatcttaccaaatcctgcagctaagaaagcgaagcagtagcaagcgccattgaggcacactgtgatagtgacggacagatctaagaggtttcaagtgttgagcggagtgtttggattccgagaaaattttctttgtttgaatgagtaagagagagaaagagaaatagagagagagagactgtcgaaaaagaaagctttgggtttttgttcttcttctccttccatccccaattcctatgttctctctctcttttctaattcaaaataaataaataaataaaattaattaatttaatatttttgataaaataacaaagtaaaaataaaaacagataaacgcactgaatagaagggttctgaatattcttctacttatttacataataataccattcatatcatgccacgtcatacttttattggataatcttgtcattttgaaaaatgatcaggggtatatgtgtaaattcattttgtcggctactcaacgtgatgaaatctaattggttaacattacgaacaataaatagacaaataaattaaagcttttttcattgttatttttttttttatttcagtgtaataatttaacagtgtcctttggtcaaattttatagaaattcaacctaaattcgtcctacatgaaagttaaatttgggaagcgaaaatctagtgtggccaacgtgaaactcaatatctacaaccgaaatacatggcacctcgatactcgttaatactgagaacttatccataggtaaaactgatttcaccacgtggcaaactatgactaatcactatctttccttaaagagcttgctattaggcactaatagtgcctatacatgtcgcgttgcgattggctaacgatatttcctaaaaactattatattaaattatatgagatctcatacttatatgactaatagcgatattaacacataggaggggtcatcactgatgtcatttaacatttctcttccttaaatgggagttctatttacactctataaaatgataaatacactattttattaaaaaaaatagatataaactttaatagtttttaaaaattacccttaataattttttttctcacattattttnnnnnnatttcaatacttattttgatttcattttcataattctttccaactcatgtatatatttattttattttttttaagaaaatttcatataattttntattttaatttttttgttataatatttaaaatatactttgtttaataggtatatttcttaagaatgtgaattggaaggaaaaatttaaaaaaaaaaacttaatataattaaaaatataaatttta

SEQ ID NO: 14596 - DNA, 6769 bp, Cannabis sativa
tatatatatatacacacacaaatacacttactcatccacatctctataatcaaagagagagagtagtgttcttctaataatatggctccaacaacaatatcaaccaccacactaaccgatttatcagcagaaaaaactctccaaaccaagttcgttagagacgaagacgagagacccaaagtcccttacaacaaattcagcactgaaattcccataatatccctcgccggaatctcatcaccggatacagatcccacattcgtaacagaatcgttcaggcctgcgaagaatggggtatatttcaggtggttgatcacggcgtcgatgcctcactcatcggcgatatgactgatctttctcgccgattcttcgctcttccacctcaagataagctccgtttcgacatgtccgggggcaagaaaggcggtttcatcgtctctagccacttacaggtatattatattaattgcttcattcatccacttttttatggagaaaaaaaaatggtgataaacaacatgaaatcggttagatcatctgctgtcactctttgagagtgtcaaaaaactccatattatttgaaaatatattattttatttctttttcatattaatttttttttgcaccttttgttctaatataatagtggattaataaaaatatgggaattacctcgtatactattttttaaatttatggtttgagtttctagagtggttgcagttacaacaataaggatttttatacatttttttttgttgcaatttagattgcagcctaataggagtttctatataaaatttcgtaaaaatacaaaaaaaaaatgaaaaagccctagaaacatctctaaaaattattaaaatagtattatattcttatttattatatattaaataaacaaattttcttataataaaataatatcataataaaataagaaagggaagatataaagaatactatggtatgatatttttttgtggtattctttttcgttccaataataagtattaattaaaaaatactaaaaatatatccatgtcatcaaacatccttcttaagattgagacacatagcacgatataataaactattttttagagcatattgtgatttgtcacattatttatcaaataaaaatatcaaattagatattcaaatgtactaatgatagtatttatgtaccattacaaatgacacttcttagtgtttgacatcttataataccacctaatatttttttaagccgaaataggatctttatgctcatacataatatgtacattttttcggtattgattaaaaaaaaaaagcttaattctttcttttttaataaaatgtaacaataaacaatatatattggtaattaattttgattattatgtgtaataatagggagaagcagtacaagattggcgtgagatagtcacatatttctcgcaaccgcggcggttgagagactacacgcggtggcctaacaagccggagggatggattggtgtgacggagcaatacagtgataagttaatggagctgagttgcaagcttttggagttgttatcagaagggatggggttagagaaagaatccttgagcaaagcttgtgtggaaatggaccaaaaagttgtggtcaattactatcccaaatgccctcaaccggaccttactcttgggcttaagcgccacacggaccctgggaccataacccttcttttacaagaccaggttggcggtctccaggccactcgcgatggcggtaagacctggatcaccgttcaacctgttcaaggagcttttgttgtcaatcttggcgatcatggtcatgtgagtattttcagtttcactaccctcattacttaattttcttctaaattgatccccatttgaaatgatcaaacattttattcaatgcagtatttaagcaatggaaggttcaagaatgcagatcatcaggcggttgtgaactcgaattgtagtcgattatcgatagcgacatttcaaaaccctgcaccggaagcggtggtgtatccgttgaaagtgagagaaggagagaagtcggtgttggaagaaccgatgacgttcatggagatgtataggaagaagatgagtaaggatgttgagcttgctaagctcaaaaagttggttaaggagaagcagtctcaacacttggctaatcttaataataaaaatatttcccaacttgaatccaaccctattgataagttacttgcttaattaaaaaaattatacatataaaaatatatgcatttgctttaaataaattgttcgagttgatcctgaattttacatgttaatgtttttgccttttgaagatgtaatgagttttatgttttgaagcttataaagttctcttattagaatatcataaattaatctatattaaaataataaatttctaaaagagctctttactattatgtcttacatagctaaaatgtaccataaattaaagttatttaaattgaaaaccaatcaaacctgcaatttttgaagtgatttgtaaaactggttactaatcttttatttcaattccaaacttgttactaaaattactactaacaatacaatggcatcattctttctattttcattttattttcaggtacaaagctaaaagtatccaaaaacaaaatctcaaaaaattaatcaatagggcattaaattcagatacaactcaaagagacttacaaataactaatcatgatccttaattagaacaacatcccttaatgtcgtccttgtcgtggtggtggtgatcttcatattcttgatcactgtcgtcttcatcgaaaggcttctgtttatggaaaatacaacattttttcgaacttttcttctgcataaactcgttgtccacagtcccttctttccaggttacttgctttttctttcggttaaggcgaatcgttagagtatttgacttctgcggctgactagacgacgatgaagaagatgttccctccggattctccaatgtaatggtggcagtcgatgaacctacagctgctctggtggcagagctcacaggtctagccatggtgtatgattatcttctgttaatcggttgaaaatgagaataaaaatgacaattttgtgatttcaacacagcttctgactcaatcgaatatttatgtaatctgcaatttcaacactcatatgagaatctattttatagcaaaatcaattaacatataatgataaaacagaacttcaaaaagtctcatataaataatgataataaacttcaaaatcaattaagtaccagatacaccataacctgatattaatgatttcttcctaatatttcatatgaattaataatgataatgatattgtactaccttgctacttactcctatagatacaaaactatggaagtattaatcaaagcaccaattgaagagatattgagtagctaataaaatttagactctggttagcaagaaaacataaattagaagataataatgcaatttttaggtatggaactcatttaagaaacaatttgctgtgaaatctacagtaatttcccagttctttctttaacaggttgtcattttttcaccccggccccggaacaaatgaacagtaaatttgtctaaatttgttggatgtttgatgtgatctggagactaaactgtgatttggtaagtatcaatgaatcaaaagtgaataaattacaccgaatgaatcaagagccgataaattacctctatcggtaggggcaaaaacacatgcccccatataagaattttcctctataaaagtaaaattaagatccctttcgagaataaatcatcatcgataagaaagagtaaaaattcttgttaaaagaccagagcaggtcttcaatagttttggggccataagtgtcacccaatgaagcaactctagcacctcgagagtgagccttaactgaaggtagctgacacgcatcttcaatctggacaacataacttttattgaaaaatcagattcaaaattgagcttcggagaaagaccatgtaatgcaaatttggcgtaggcaagtaacctgacccgctgtgaagcacccaacttctttattacagatctcagtagaccgtctgtgcgtagtattctaaggaaatcaggtggcaaagattccataaatgaagatatgtcttccatctttagtgaagtcagctcctttttcaagttacttttctccacagctgacattctcccatcaagaactcgtttactgtcaattgttgtccccgtaaagatgactggaaagtatctaaagtactttgcaacaccgaattgttcccccaatagcttaattttattcgagtccccaacaagcagagctctccaaagttcacaatattttgacctgaatccttcatctaactgtttatatattccatgatctaatagaaccagggaaaacccatgtggacctactggacaaactaatatgttaccagggtgaggatcaccatgcacaaaaccatggacgaaaatcatctcagcaaatatttccaccaatgcttttgctaccttggttggatcaattccatgctctttcatatataccacgtcatcaaccttctgtcctctacagaattgcatagtcagaacctgatcggttgtcaaatcccaaaacacacgaggaatcttgagcgtgttgttgtttttgaaattaagggcggttctctcagaatttctagcctcttgaatgaaatccaattcaacaattatgtctttcacaaattctgaaaccaaccaatcaaacctgtaatcagggaaaaaccacgaaacagatgttgaaaggaacgacatggttgttatatctatattcaactgctgcaacaacccagggtactgaaccttgattgctaattcttgaccatccttcaaaacagcacggtgcacttgagcaatagatgcagcagcaattgggttttcatcaaacgatgaaaatatttctgacaaatcctgtctcaggttgtaaattagtacctttttgatagcttcaaaagggtaaggtactgcctgatcttgtaacacagatagagtcaatgagtattcttttggaacgtttcgcaaagcagcaacaagttgaccagcctttacatagaagcctttattggcttcacatagtttcaaaattctctcagccgagcgcaagtgaacctcagataatttacgccgataatcatcagagtccattggtaatctacgcaaagaaaacttgtaatcgatggcagtaagagtgatagcaaagattgcacgagaggagcgaagaatcccatgaattgtggcacggattttctcggggaagatagaggactcgggagaaaatgaagaataatgagaattgaagtaggtttggaaagtaaggccagtggatgtagcagtgaataagcaaagagtgattttggacttcagcattttgtacaaacggttggctggtttcttcggcttagaagggtggcgtaaatcgagagttttctacaactatgtggggggcttataattgtacattggtattgagtgttggatatgtattttctctatgtttcttctgaaataaatttcaaacagaatacagagatcagagagaagccttaggtaataagtttgttttgaatttggctaaatgagttagtttacgacatttacctaataaactctacaaattaagtcctaaaaaaccagaactaaatccaccaaacaagaacaccagattttcttccaagttcaatcttcaatttagagatttacaatccagtgtctgttaaaggccaaattataacaatccataacgcatcacacaatccttggaaattcatcaatatctaatttaaacaataaaaccaaagaaaacccagacatcaaactataagatcaaagctataacagcaaaaaccagatccacaaaattaaaaataatcagataaaatcattaagaatcccaaaccaaaaattaaaacccttgaacagaaattaaaaaggcccaaaatctagggtttgggttcattaaaatcacacacgataaatatgcaaattacagcaataattcaagaaaatatatttatataaatatatgcataacgcattggaatggagttcaaaatcatgataaacaattagatgttagaatgagaagaagagatgattaccgtgagaatcaaactgatcggagaagcgaaatggtttgtcgaaaagtgggtaagtttttataaattattaagtaattaacatagttgcgattttaaatattacttttcgatgtttaaacattttaatttattttaattatttattaatttattattaagtaattacgaaaatttaaaatgataaaataaaaacataaattttaaaatatctaaattaaatcatcacttttaatgatgaatacatttaaagtcgtttattatcaccgtatcttatttatatagtcatcaatatatttaaagtcgatgttaacataatatttcacttatagttactattatattaaaaattattattatcaccgctcactactatatataaatttattgattaaaatgttaattattttttcttttagtttctttactgaaattgtttaaaagaacgaatggatatttttgttctttttaatttcaccttatttataaaagaaaatacttcttagtttcactagttaatcaatctcatcctatgaataaggacctagttaaggaagacaatgagtttttgataacctagtggtttcacaagagtctcaag

SEQ ID NO: 14597 - DNA, 5531 bp, Cannabis sativa
  modified_base (522)..(541): a, c, t, g, unknown or other
  modified_base (3179)..(3183): a, c, t, g, unknown or other
  modified_base (3209)..(3213): a, c, t, g, unknown or other
  modified_base (3241)..(3245): a, c, t, g, unknown or other
ttcctatcactaggatcactagggtacactagggtattcccttattcccttagaaggacttaggcaactgctagtaacttatcatagacctttaactttcattaatatgcaaactaaatttttagggaggtaagtttggatacaattaaaaaatttaacttaatgatctttgaactgcatatcgaaatatttctccacccttatcaatttgcaagatcttttaaccacttaccttaatatttttcaacattgctagaaattcatgaaatttctcaaatattccaattttttttgcataaggtaaaatctagagtgatcgtctaagaacataacaaaaacgcatatccacccatgaatgtacatccatattcgaatatagatgatcctactttcaagtggatataggcatattgactctttgcaaagaatgatcttgtcaaaaccacaatgaacaagatgcaaatgccatagatatattattgtggtttaatgtagaatcctaggtctagttacaataaagannnnnnnnnnnnnnnnnnnnggatcctggtcacagaatacaaaactcataaaatccatacattgacaacatacagtttcggatccattgacagaaaatggacattaataacttgtaaaagtcattctgtattgtccaatgtattctaggaaactgaaatttaaaaatttctatttggaatttaaatttaaagtcaaacacttaaatttataccaagtatttattgagttattattatagcttggaccaccactactaatctaactctaaatttggattgccttaagtaagcatataaaagtaggagatttctaagatcgaggttttatcttatttcgggatagaatgtcaggaatatagtcatctgcgcaattcaatttcataagagaaattagagtgacatcataggcagatgatttataaaccattcatctaatgaaatactatctaagcaaattctaaatgataaagctaatagaaaaaattaaaggataattttgatttaaaataagaatccaacgatgtctcggtaggcgagagtcaaagttaatcttattttataaacttcttcattgtttcatattgcaaacactagtctaagttgtcatctttggtttttcattgtcgatgatgaagaagaggattcaaatgtcatggagaaaaatgatgagtgcttagaattagaaagtgacagtaataataatgttgtatcaattattgatgatgataaattataattgtactaatattataatatcaaataataattagcctatattttgtgatctaatatgttatgaatatgagtaattatttaaatctaaaatatgttctctatgtatagtatatccgcagaaggtgaaagctaataaaaagaagagttaagagataaatataagggtgccaatattgaggaagcaatttccaaagagttggagcccaaattacacattacacttcatgaggagatggatactcgcagaaaaaatggtaaaaagttcaacaacatgataaaacattttatccccacatcatccccatgaataagttcaagtaaatacatgtgtcaaagctgaaattaatgcagtgtgggatagacttgaggtatttattatattattctttaatttataatgaattatttgcttctagaccacctaaacattatttgctataacaactaaccacccaaactcaacttatgtttgcaaatttggttttccatccaataacttctgttaactctctacgtgactctatataaattgtccaagttattttttagtgttgtgtcacctaaatccgatgatgtgtctataatttttttttttaaaaaaataaataaatctaatttaaaaattagttttaatttaaaattttattattattattattattttcctttctctttcttcttcacgttttaactttctcccccgactctctacacaaccaccaccagccactacacaaacctcattctcatataagttttgaaatcttaaaagagggctttgcaaaaaaaaaagagcaaaagtggtcttttcaaaccagggaccgccataactaacgacaggaaagaaagcatgagcatgaatagcgaaagaaagagacatgagggttggggatagaaaaatcccaaagtgagggagaaagaggtttggggtgcaaagatcctgagattttgaggggttggagcctcatttcagggttcttttgggttgacgttggctaaaaatagtcgatatgagaagagaaccagatggagagagagtgggggagatagagaaaaaatagttttcttttaagtttcttattattatttttttggttgaaattttttatgtataaatcagttgtgtattattgatggtttcagatctgggtttgtttattttggtttgatttttgttcaaattttttcgggtgtggtttggatgtaaaaaatatattatggtggtgtgggtagtgatggtgggtggtggtgaatgaagattaataaaatccgaaaaagaaaaaaatcaaaagaaaaacatcgatatagtggaataaaaggaaaaaaaagaatttatttttgcttattttttagttcatgaccttttttttaatttgaaaatattttttaaaataaatattatagggagcaatgtaagtgtgacatgtgtatataaaggtacacataagcattctaacttagcacataagcagagttgtttggatggaaaactaaatttgcaaatagaaattgagtttgggaggtatgtgcagaaagtcatccgatccaattgcaaccgatcgatccaatcctaaacgatctaatagaattggatgtctaatcataataggatcggatcggatcggaatggtcatccaattatatttatatatttttaaaatacatttataattttatgaattttattttaaaaaaatatattaattgatttaatatatatttaacacatgagattaaagaaaataaaatcttatatccaaaatattgattctcatcttcctagacgctagtgaaattgtcaatgcgtattgaataagttttatttttggcggttttagtatggtatcatgagaattaggttgaactaaactaatgtttattatatatgttggagtattagattttaaattatgtttttttttnnnnnattttaaattatgttttttttttatnnnnnaaattatgttttttttttatatatattnnnnnttttaatgaaatcaacttaaatagtagttaaaatagattggatggatccaatccaatccaatctaatagaaaactaattaatgcatccaatggttggaatcgattcaatccaatacatccgttggatcagatcggattggatgactcaattcgattagattagattagataaaaaaaatccaatatccaataaataattagattggatcagttgggtacaaattcattagatgtgatccaataaacacccctaattgagcctctaataaaaaagtttagggggattaattgttataggaatgaaagtttagagggtttaaccaaaaataactcatttataattaatgtatcaattttaatgtgtaatttttttacagacaattttactacccacgagataattctgtttttgtagactatgctgagtacgaaatatcaaaaggtttgcgtgactggtgggccgaagctaagaaagagtggattgaaaataagtagtcacttggagagttgatggtgaataggacacctccagaaagagtaactcaaaaagtgtagagtgattgcattaaatattagagcataaagaaagaacatgcacctaacaaaattaattttaataatactttacgttatagtcaacaataaataattaattgcaattcaaacatgttaatttcaggcaaggtaagataaaagcaaaaaaaaattgggataagatgaaaattcaagatcgataggaattaaagacaacacttggcataatgaatacactgtaataatcttatgtatgtttacatttttatttatcaaattctgtacatttctttcaatttcttttgcattcagattaatttttttttaggagaaaatagttgatctggctgaaaatcaatcaacgcccactgatgatcagccttctcagaatgatatcaattaaaagtgttcgcggtgcgggtggtgcgagttgtaattttttttcaaaccaaattaatgtattttttgtaatttctcaaaccgtaattgcaccgcgagatcttaaaacagcaaaaatcacactgtgaaaatttagtgtggggcgttgcagtttgagcggtttatactattatcattatcaaacattataataaaaattgaaaaatgaatctaataaagttttaacaataaaaatcttattaaagttttaacatcataacatatatactaatcattaagtcattatattaaattgtttctaagaaaatacaatatacatgtattatatatatttgttattatattaaaaaaataaataaaaattatattgtaaaaattaataactttgtaatatatagtgcggtgaagtttgaaccgcaaatcacatcgcaccacactgtttgaaaacaaatgcaaactacaaccgcattacaaaggatttcaaaccacttttatgcagtgcgggcggtttgtacagtgtgggcagtttgatgaacacccctaatctcaaccccacttagggctagtttggcatagctgtgatgaaaaagcagttatagctgtgttatgagaaaaagcacctgcagcagaattgtaaaaaaaactgtgcagagtgtttggtaaattataaatttcaaagtactgtaagttattaagatatattataatgataatgataatgttataatctagtttactataatcacaaatatgtaaaaatttattttatatgatattttattttttaaatattttttaatttttttttcaaatataaatttatatggatttgataaaaataatttatagtatttttatattatgttttatcaaatgttaaaaaaattagaaactcaagtatataagaaaattctagattgatgttgttttgttaatattgaaaaaaatataaattattttttttaaataacaaatttaataattatttattttattataactaatttattttaaatattttatttttttaatatataatcaataagtaaatatggttttagtacaaaaaaaatattagtcttttaatcaaaataatttttttctaaaaattagattagagctgctttagcgtttaactgtaccttctccaaaaatccttaaaaaagttattttttgactgcttaccaaaccaaacacatttttatcacaattttttcaaaaaataagttttagcttttctaaaaattatgccaaactgacccttagtatccacgatacctacatgtgatgacactttttttttttttatttaagcgtttatatattacaacatattttacctgggactcgaac

SEQ ID NO: 14598 - DNA, 11213 bp, Cannabis sativa
  modified_base (9334)..(9335): a, c, t, g, unknown or other
  modified_base (9456)..(9468): a, c, t, g, unknown or other
atttcgatccttaaattataagtgcatatatgatttattaattctgcacttcattcttaatcatatatgtttcagtttatacatataaaatgtctaacatgctatactattggagtgattttaaaagtaaaagtgttaaaaataatataaaagagaaataaaataaaatattatattttttgaatgaagtaaatttttttaatatatttaaaagatgttatcattaaagatgcttttactattcattgaacggtagaggtagcagccttgtttcggccgagaaagtcaaaaagaaagagatgaaaccctataattaggatattgggaaagagtatgtaccgtctataattgtttttaacaaagtaataaattgtttaataaaatctcaatgatcacaactttttatattaaataatggtatataatatcaattaatacattggttcataattaattatgacaatatttttatcgtaccaatgatatttttatccagtcattttagttttattttagacatacataattatttcatcattttgaagcgacaaatttgttgatgatcatactcaattaaaaaaggaaaattttccgatcttaattacaagtcagctcaataattaaataatgcgtgagtgagctagctttcttgcattaatattaattaatctacatacatttatttatgtcaagtggttagataaattagagagataataaaaggaaaaaaaagagagaaagatggccgttatgaaggaacaatctaccttactttagctggataaattatgactctttgtctaccaaacaaccatctcaacagggacattactgggtccattatatattattattatttttatttttgtgctttgaatatttcttcttatatttaaccaatattaattattgacatgaattgctaaccacaaccaccagtacagtagacaaaccataacgttcaaatctccttcattttaattaaacctcattatataacatgggacactctacttcattgctcaatttaattattaaactaatttcttggccatttgtagaactagcagcatatgcttgaatgtgtataattgagctatattttagcaatataaataaatatatatttcatttttcttcgacagaaaatatatattatatcatttagtactatacgtaaactaaataaataaataagaaataccaaaaatgtagaatattggctaaattaatgtcacagaaatttaacggttgaccaaaatgtacatgtgagagcgtgacccttatgagtatttatcaattgaatagtagttgttctataaataaaatatccggttataatatatagccattagttatgttcaaaaaaaaaaaaaaatacatagccattagtcactagcttgtatatgctacgtcatcctcttcaaaaaataaaagataaaagatatattgctatgccacatacataatatgtgtagtgttgtgtacagtacgtacttaattacgtgataatatttttctttgaatctaaaccaaatttgatgttgactatacaaccaattgatgtaagctcagtttcatctgtgaatgtgatcatattaatttcaaagttaacaaattatattaccctaaaaaaaaaaaaaaagttaatcaattatcaaatcattcaaattaattaattatcaaatctaaacgcctctatctttgacgatccatctgccacctcttgttttgatatttacattagtcaaaaggatatatagtgtattagggccgactctaagataagttattgggcctgaaacgaattattaggtttagaatgtgatatttgggaaaattactaaaatttatgattaagttttaaaacgaacttttttgggatatttacaaaaatatgaagaaaaaaaaaagaaaagttttgatacgtatgacatacaaatttaatagcaccaagtatggtatatttaaaaaaaaaaaacttcaaaatataggataaatcatcataaatgagaaggaatatcataaaaaactaaactcatataaattttacttttatacaatcaaaacctgttttttttttttatcaaaatatttgtttcttgtaaaaacagagtaaagaagaggaagaagaatattgttgttgtattgaatgaataagaaaggattacaagaacagtatttatagaataagctcagtagagcaccaaccgatttaactgtaaaactaactaacagataattagttatgacatcaacaataactataacagattcatactttgttccaagaccagcaagaatgtaaagtatgagttgttcctctgtaatctgattaccagcagcacgaagaccatctggaagattcttcatcttgagaaggtatttattaatggctaaggaacctttcttggtggattgaagttgattcatgagatggatctgtcgagctcttgatgctgtcctaaaaatttgctcaagtgtgctccagatttcagaggcggtagcacaattaaccacatgtccaatcatggattcagaaatagttgacattggccatgaaatgagaaagtgatctaagcgcatccatctattgaattcaggattgcttaccattgttgttgattctggaggttgatagatgcgtggctgggggcgattctgattgagcagtatgccttcaagatcaagggcacgaatggcaggaagaacttgagacctcaagaaaaaatatttgtttcgatttagacgaaggggtgggacaaacatggtggtgggaacaacagattgatgagctgcagcatcggcagaggaagacgccattagagtaccgtaagctctgataccaagttgatcttgtaaaaatagagtaaagaagaggaagaagaatgctgttttgttgtattgaatgaataagaaaggattacaagaacagtatttacagaacaagctcagtagagcaccaaccgacttaactgtaaaactaactaacagataattagtagttatgacatcagcaataactaccaaacctaactaaccattttgatttacattatcagcaatgaagaaactagttttttgataaaattattatagataagaaaaaatattataaaaaccttaaaaactcatataaattttacttctatataatcaaaattagtttcttgatgaaaaacctagtttatagaatacgatatatttgacttctttggtttatggctttaaacaaagggaaaggaactttaaaacattaaatattggatttagaaagatatttacaataatataacaaatctaagctcataaaaaagctccaaaaagaaaaaaataaaacaaaaaaccataaaacatgaacaaagttaaatctggcatatttaaataaaaaacttttaaaatcttttattaagtgtaatttctttctttgcaaaagaatatgtgcccaaataacccatcactggtcggtcctaactacaaggcatatccctcgcgattctaatttaattatgaaaaattatctaaaatgattcaataacatttttatttatttgtgtatgtttaaatacccttacttatatatattttttttctctctctatttctccattttttccttccttatactttctttctctcatccttctttctttttttcttatttttttctcttctcttaaactttaaaaataatttctgatcacgtcgttactcggatgagcctataaaaaatataattgcaatatactcttcaatttgaacatttcaagatgtgggaagtgtatttttttttttgctatttttagaaaaaaaaaaatccatttagttgctaatatagtgattaattagttactgatttttaattttttttttaaaaaaatcttgttaattgaatttggttatgagttacaacacaggtgaaaaaagaaagaacttggccgaaatttgtttttttttttttagaacattcatacttaaaaaattcataaatttgagagaattgttaaggagtaccttaaaattaaataccacaagaaatgtcatactgttactttttatacattttactttaataaataatataaaaaattactaatcactcacaacacacctgctaaaaaaaaaagtacttatatattggtttcctttattatattccaaatgctctctcggtccctgaatgttatattttttttttcttcttctattttcttttgttctgttgtctggtttaattagaactagttgtaatatcctttattttcaatgaatttcgtgttcttagctagttatattatatataaaagaaatcaaagtttctttttatatttagcttaaaataaacgctatatttatttttttgactatatattttattttttggaaatttctcatcgattcaaaataagaaaagaaaaatcatataatgatcatgagcacaagtactgactactccatttctactttattatacgatccatttcatttcatctacgactagaatattctcattagattctaacacaaaaaaatattcttaataatagcattgctataaacaaagcactattggtgtctaacctgcagtgttcatttgcaattgattagcaatattctttaacaattattgaattaaattatgcgaacgatacttaattatatactaatagcaatataaaacacctacataatactaaacactactggtgtcttttaacattttatctatcaataaatacatttatattaagtactacgtacctagatccagaagcagtgtactcaatgtatatatatatatataattatataaaatgtgaaatttattaaattaacaatctaaaatactaaaatttataaaaataatttcacttaatttattctatgcaattatgataatcgcacaacgtaatatataatggtttctgcgaccatacaagtttattttactcataatttttttttaaaaaaaattattttactaataaacagtttcataaaacccatttttacacaacactctatatatttaattattaatgctacttatttaaaaaaaaaaaattaatgtctatatatacgtacatatcatgtgtaattttctttgtatttacctgtttcttaaaatctatatattatatttatatatatggatcggttaaataatgatcaatcgatctgtctttattaatgtatttacgaggaaataaattctttccccgagtaattaagaaaagcatgtatagtacttaaagttttcaatgtatactattttaatttttaaaccaagaatacatggatcttatttggcaaataatataagcctctagcttaatctttgaatagtattgtcgagtggcaattgggctgtctttcatactatgtataaatagattaatccacaaggaaagtacatagaacttttggttaactaaaaaatatataattatatatattatttataggcagtcaggcagagctaatatattagttatttgacatgattcatatgcacttatatagttttccacaaagcacatatttcacggccacgtacgtacgcgtcgtgcatgaggctgtaaaaacgttggaataaatatatatgatatttttttataggtaacaataaatataatttatagtatggttgattgaattataaaatacaacataagattatgtaatatttcattattttatcattgtacttcagcaaaaatttacatcccattcattcagttaatatcaatatacaatactaaatatattaatatatataaacctgctagagttttaattttttagtacagtaatttttagtacacttgaaattaataataatacattactaattaatacacgctaaaaaattactgtactacaaagtgagtaaaaacacttaattaggtgagaaacgatatatgattatttaaaaaaaacaattaagttaattaaaataataatatatatgttttagttttaaaaaattaaaattagaataaatgtcattttgcccattcttaatattatattttgtaaaatcgaccaaagtagtactagtaccacgatccgagcggagaagagaaaccaaggagggaagaatgaaaattatttttaaattaaaattgataaaactgagcttaagatatagtataaatttgaatttattttgcaaaatacgagatttaaaatatatgtaataaataaaagtaaaattatttcatatactatttttttattttttttttaaaatttacggttttagtttctaaagtagttgcagcgctagttgcaataagggtttatgtacgattttttgttacaatttaagttacagcgctagttgcaatagggaatcctatgtagaattccgtaaaaatacaaaaaaaaaattatcttaaaatataaaaatgaaaaagaccctaaacaaaacgtacatgaattgtccaaatgcgtatttggctataacacaaataatattaaatgtgatatttccatccctattaactttcagattcttttaaagcattttattaattattatttagttaatataaaatattaaaaatgtgtttttttttttgaaaaagaacaggtcttcagattaaaattgtgatgaagaaagttatttgtactggttaagagcattgcaggcgacaagagagctagatttgttggtaaattgatcattttattattgacatgatagtttattgaattataattatattttgataagccaagggaaagtgaaagcaaaccatagagagagagagaggacatatataagaccaacgtgtttgaagggttttctctccgtacttgtgcactcatctaagaacgggtcaaatagcttcatttttttcttttttaggaatatgctagggcaccttaagctcctaatcaccacaagagttgagatattgttttttgtgcattttattatccacatattttcatttgtgtctatttatttcctaccctatattttatctaaatacaagttttctactatttatttttaataatatttaatatattgtattttaaaatcatacatatctataccttaaatttaaatttgtttatcaatacaattaagttgtttaaaattttatgaattttgaattcaaattttgttatttgattagatatataattgatgtactctttagttaattgattaaattttactttagaatactaaatacgcataattttaaaatataatatatcaaataagtgttattgaaaacacatcgtacaaatatgcttgtcgactaaatatagtatactaaatgagtatatttctattttttttttttgaataatataaaaaatcactagtcacttataggttccacatcaattttggtgtttgatatttaaggtgttaaataataatgcttattttttttagcattgctaatagattttaatggctaaaaattattatattaaattatatataacttaatattaaactatatgataatgccagcaccactagtatattaataaattaattgatagagattgatgaatgtgcaacatttctcttattttattaatgaaattctaagtatagatgtcacatcaaacacgtacaattagtacccgacaattaattttgccttgtagccttttagtctctcttcaaaaactttgaaacgagaaataaaatataataataaaaaaaaagggttccattgaaattcaaacattcttccatgttaaaaaaaagacaatgcaagactataatgtttaattctttatttgagtacacaagaagcaacggagaataaacaatgaagacctcttttctctatctatatatagtccgttaaatagaggtagttttagaaattaaaaagaaaaacacaataaaaacaaaagacataattaatacatacagatcaagagagaattaattatcttttatatttgaaaagaatgaatagtagtgttgtaaaagcacgagcccttgagaggttagctaagagagttatgaagccaaagtgtgaagttttcataaaccacaggggagttgacacgaagagaagcatagctactttgctttacgaccagttgtcatggctgaacattccttcttttttagacaacaagacaatgaaaccaggtgataaactgtttgacaaaatcgatagtgctatcatgggttgcaaggtgggggttgcagtgttctcccctcgttactgcgactcttacttttgcctacacgagctggctcttttcgcccagacaaagaagaaggtcattcccatcttctgcgatgtcaagccatctcagcttcacgtctccctagacaacaaccaatattcccaggaggacctcaccagatttgcttgggctattgaacaggctaaaaacaccgttggtctcacatttgattcctccaaagggtaaaattattattaattaattccttatttacattatatataataacttatatattcttacaaataatataaattaatccatttgtaggaacttggctgatgtggtaagaaaggcttccaatatagtgatacgcacattgatagagatggagatcaaggagaaacaaacaaaacggcgtcgtgatcagatgtttccagtccccacataataaataattaaaaccatatatatgctcgcagcaggcattggttaacattacattctaataaatctcatatccattatttaagttggttcttattgtgaagagtatgaaatttattttacaccttctgatcatcgctctctcatcttattgatttggttctgcttcaattatttatatttttatttgttaattaattaataaattgaaactaattaatatcgtttgttttctttctctctatattgttaatttgatttcttgtaagaattttttttccaatttttaagtattccttgtattaattcagattgatcgaaacaaaatggcagatctaatctctttttgtttaaacaaatgtacaatttttttctgttattgtaataaatatctttgtattgaggttatatgtattaatatgtaatgtatctctctgttgtttcttcttttcatatattaatttataatttaatcatatatatcaacctataattaactgtacaacatatgacaagctaacaagctagtattattatatatacactataaaaaattgttacttttagtgataattttttaatcacaatataaattttttacgatttttagtcacaataaaaaatcatttgtgactaaaacatatcatttagacacaagttttcattaattagtattagtcacaacaagtattgtgactaaaaatanntttagtcacaacaaattgtaatatttgtgactaactaatatttttagccacgaatcttttagtcacaacacaagaataataataatttataattagtcacaacttttttacttttaatcannnnnnnnnnnnngactaaaagtaaatttttttgtagtgatataataataaatgaatataatgataattaagaaaataaaaaatactgcattaatatatatatatttatatgaaaacttagtagtagtatagtatatgtgtacgtttcttttacctcgtatatgtggtccacgatgatataaatatataccaatgtacatcattaattatattatacatagtcgatacaatatttcttctctttttttctctttaaatatttgattgatttttaattaatattgcaaaatatataatcttcttctttttcaaagaagttgccggaaaaaaataaagttattagtcataagactatatagaaaaattctataatatatgcatcgatccccttaaaattatgtataaagtgaaaatatactttactaaaggagtaacaataattattttcactattaattcagttatcgtaatcgatgtcgatcgatcggcaacagtttttatatatatggaaaaataatcttatataattaaacgtaaaaacagtttaattaatttacataataattaatttttttttatgtatatatatttgctaacataacccctcttcgcccggctaaaaggcacctgcctagcagtgtcaatatcgttgttggttaactaactattaggtcccatatgatttaatagcaatgctatttttttagtatgataataaacaaataatcttaatatatagtaatagtaaaattaagattattaaatgacaaaatggactctatatttactaaaattgtacatataagaccatgaactgattttttgtcaaaacttaataataatttaatatagagatgttatgacaaaatttgttatattttttatatctgttcgtgttaaaaattgtcttaaaatgtgttatattaataaataaaattattgaaaattgaacttaaggtcatatttttaccattttgaaaaatataaggttcattttgttatttaacaatataggagtccaattaataatttttataagagtaatttgcggtaaaaatacttaagttttatcccgagtagcagataaatacttaagtcgtacgcggtaaaaataccttccgtcacacttttggaacttccgtaagtacctctccgttttcatttagggaagtgtccatgtgtcacccttttattagtccacgtcataaatttttatttttcattttaaaattcattaaaacttatttaaaaatcattttaaaattaaaatgatatattcataatgtataaaaaataaaaataaaaattattttttaaattaaaaaaattacaaaattaaaatatcacataaacttccaactcctccaaaacatggcgaggctgaggacggccatggattcggcgttctgggatttggacgtggctatgcttgagtccttgaaggctccgctaaggctgtaccaagtgagccattccccatggacgctacttgagcaagtcaaattattagaatacagcaagtctccttcttgggaaatgggtttgttcttggcattatcccttcttactttcttactctatccaaggattctggttctttgagttttcaattcctctttctaaaacctgccacctccaactggtaagtaataagcccacatacacatactacacttttgtttctctttcgttttctctagctttgtttgctttctcactatcaacagtcctatttcactttttctcaaaaaaaaaaaa

SEQ ID NO: 14599 - DNA, 5514 bp, Cannabis sativa
ataataacttttaaaaaatatcactaactaattgtaaagtaacatacctaaaaataaatgttaaacaccaccactacactagtactcaataacatttttttttgattaatagtactcaataacatgattctaaaatactacgcgcccttaagcatcgtggcttctcattctccgattattgtatacattattcaatttacaaaattggtcagcatacagatatgcgagtaaaagctttcatagatataggaaggtgcatccagccataactagtagtaaagtaaataaataaaactagaatttttttcttattcacactaaataaaggggacagagcagaaatggtgacattaagccagaatttgtaggcgggtacccaagtttcatatattagtacaaaagtaaaatcacaacatgtagtagacagaaggcttttgtagaaagataactaattgccaacaatagaatttaatacacaatgccaatttcccgccaccactgcacgaaggtgttcttcatgattcgagggttcacaaatattccgacagatctgcttggttttccaaatcccaaataaccactctgccatccattcctgtgatatcatggcattagaggagtacgaaaaaataaattttgaatctttttcttttttctctttttttcattttacttacctgaggtgctgaagcgcttcgttgaagatatccccggctgtccaagagacacgatacaactatagtaaccagaacacagtatcattagttttcaattcacaccagttagaggtagatgaagatcaccctaaccatttgatatgcatgtggcatgaaaggtagtataataaataaacaatgtatagcagaacaggaaccgcccattaaggagcatgtaaagagatgtcaaataaactggtaacagattacggcaaaggaagcttaaagatagtaagaaataaaagcttactttatgcagttctcgtgaacgccgccaccacgtgatcgtgactgttcaactccgtcgttgtttatattgtgcttgggttgtccatagagcttaccaaatgcttcagaaaactacaagaggggaggaataaatgtaaaagaggcctatcaggctagcacaagtagaaaaaggctgaatagttgaagatcaaagaaatacaaaataaaaaatatatttagtagcaatagcacattatgacacaaaaagtcatgattagttagtatttcattcaattaaatgaaagacccgtgttcccatattcaaaacttcaaaatctattgtagctcatgaggcagcctattattctgatccagctcacaaaaggttacccactctataaacatttagtgaagtgaatgatgatcctatattataaataggtaaaaggtttcatcctgatcatataaacgagcaatgctgcaacaagatttaatacaaataaatactgctattactgaaataaccatttatttacctgagaaccatattttggacctgaagatgctttcctttcacccaagaatctgacaaaactcctacaaagaaaagaacagacaattatataattgtttcctttggaagaataggagccaaaatatataaaaatattttgtacagttggggatggagtgggggcaaaagatgatgggataaaagaaatcaatatttgtgtacacatcaacttctaatacacaacaattttggtattagaaaaaaaaacggaatatatcattttactctgatttgcgtaaatacatagttacacctgtgtgttttaattaatatcagaacacccttatggtctacagcttagtataaactgatcccttaccaattaggaaagtgttttggtcaaaatcgagaattaatggataattttatgttgattagtaaaacaggcgagtgttttggtattaacaaaaaacaaaagtgtgaaactaagtatttaagcaaatcactagagagtagtcttttggtcccgtccccatccccaccatataaaaacagagaacgaaaaagaaacaagagagtaacatttacacaccaaaatccactatcatcagctgcaaataccattggattacagtcaaatccaacccctataaccaatctttcagatacaaatataacctgaaaatacatgttcaccaattgtaacagaaaaacaaatcagttgaacatgtgaaaaatattaagagtctaaatgtaagcaagagtggatgctgacccacatcacggagaggcaaatcacgaaatgcaacattttgggccgatggagatggtccaacatcatcaacgaagtaaatcatggaattatggcctgcacattagcagaaaacatacatacataagaaattaaattgatcaattctaataaatgaatggtcaaaacgtgcatcctctcaaagttcacattagcggaaaacatagtgagtgtgactaacaccacctggatcaagtgtcaattaaaacattaagccagacagcaaaatacttgtgcgcaaattaaaaaaaatgagaagttctccactaaatgaagaataatcaactacggtagatggggaaatcatggcatgcagaggaaataatatgaaaaagcacggtatatgacatgcaaaggacatatttctgacctgcgtacgctaaagtattgccacttggtgaccatttcacaccgaaagcccaagaaattgagagatcaagctgaatgatttgctgtctcatgaaaagagagaaacatgagatcatataaactcaaccagtaaaatgtgaagatgaaagaaaaatgtgtcacccgctcccataaaatattgatatgacaggaaagtaaaagtatgcttgctaccaataatcaaggaaagataatgaacctctccaaatttcgaatctgaagaagggcccgttcttgaatccctggcacaattacattgagcaatcttaagatatgggacaaatagcataaagaagagaggtctaaaatgaagaaagtacttagctgaaaatattaataatataatgctttaaacatactttgcatcaacacctttaatgaaagtggaaaatactctgcattttccatccgtagatgtcgttgcaagaagtatctggtaatcatacaatcaattacacagtaatggtcagttcaaagacattgagtgcatgtacaaaacaaaacagacacattatatttggtaagtcacaaaatataaaatgcacaggtccgtgtaactacactataaacataggaaaacacagaataagcaaccgaataggaagatactaacattatttggatgccaagcaatgcctgtcacagaagaatcatgttttttcctgataagtttactaacccacctgtagaaacatacagaataaaaaaaaaacaaattaaaattatttactcaaatactaaagcagatgaaaagaaacatgcctttttcctacaagtataagctgcaagtacttaccaattgttctcttgctcataatagcatatacagacagttttagccccacttccaacagcaaacttgttttctgaagtacaaaaatattgaatttgttaaagttgcatgacattgcaacatttcacagcaaattttcagtactaggcactacagacccagttcaaaagattgggaaatcagaaagattaaaaaaaaaaaacagaagatgcatctacatcacatcaaaaagaaaaatattaattacctcttggactccaccgaacacaaagtgcagcacgatttagcctaagaataacaagggtgggtacccactctgctccttcaaaattccatacatacctagcaaagaaaagtgtaagaaaaaaaaaaaagcaaaattaacacacattaaaaaatataagaggtgtaacatctatgcgctttcctaatatagatatatacatatgtattgaataagatttatatataatgagagaaaacccaagtaattccaacattgaagcaatatgtaattctgttcaatgagtaaagtgaaggtattttccaggtcactttaatatatcaaatcgctaggtacttacgaatttcgatcatgagatgcagtaacaattctgtttgaccttgcactccagtctatcccagaaacaatttgatcatgctgtgacaaatcaagggaaaaactgctaacattatttctcagtgtctttttttttaacgttatccttgccacatgatatgttcagaataaaattcgtttgggctatgaaagtaaaaactatcagaatactggttgcacacaaacaaaatacgaagtaccttccattgagattaagtgcatcttagttttactatgttttaagagaaaaaaaaaagttttatcatcataattatgaaggtttcgctggctaaaaagtttcaaaattatcatttggttattagatggaaggcctgattccagctaatcttcttttgtttattctttgttagcttttgtttacagaatccggaggatacattatcctctcgttattgttctttttttttttcaaacaaaatctatttcttataaagatttattagcgtttaattatgtttctttagatagaaagttatgaatggtatatattccaaatttcttattaccataaaatgctatgaatgtctataatgcaataaaaaactacagaggtctacattcctagtcatataattttaagccaaaacaataaacattttttaaataattccaagctattgcatagcggtgacatgacatgcttcaacaatttcttcctctcttcaacattagctgaataaaaaacttacaaataaattggaaaagaaaatgtcatttcagaaaattaaacttgtggaccaattattaactttcttcccattgagtccatatcgaagaaataaaacagtatataaaagggtcagaatccaacaactttcctcaataattagaagatcaaagattttttttttttacttttgagaaactaatccaaactaaataccttctgaaggacatgcaacctctcccatttatcgtccaccagtctatagatatgcacttcattattgttgggacataaagcaatcactgcataagaaagaaaaaaaaacaatttaacaacagctcaaacataatgcaagtttttaataagacatacattgttgcagctaaggccatcaaaatggtagggaaaagaaatgacagttagaataatataaataacttaaatatgacttaaataagaaaatgataaaactaatagactacaaagaaacaccttaagtaagaaaatgattaaactagtaggttacaaaaaaacataaagctatgcttcaaaatagaatacaattcccctaatgtctcataaacatgaataccttatacgggtggaaacttcaaaattcgcctaactgtgtgagcagcagataaataaaagataggggaattacccatatactttttttttaacttttttttcaaatttacgatttgagtttctaaagtggttgcaacgttagttgc

SEQ ID NO: 14600 - DNA, 16950 bp, Cannabis sativa
  modified_base (224)..(232): a, c, t, g, unknown or other
aaaaagaggtatgtttcaaataaacataaaattagaggtaaatttgattaattgatgaataaaagaggcattttttaacttaccccgctaatcaatggtacgaggaggaatgaaagagttggaaaagctgttttgggctggactctttccatagtgggccctttcattgctacacctaagcccactttagtacctctttttactttatttattattattattannnnnnnnnttattattattattttgataaatttaactttgaaatttgatattcaaacacattagattagatacataatatgtaattaaaatatttttttattattattaaaattgaaaataattgcgatacatcataaacaacaagaaaactttgtaaagaaataaaagttaaatgatgtaaaatcaatttgataagataatattttgttaaattatgtgaatgttgatatataattaaattaaaggtagttgtgataaaaaaaatgtaactgtacagtaaaagaaaattacatgtttaatgagcatgagttaatgtctcaattttttttttaactagtaatataaatatgattaatatttcttttttgtgtacttcattgtttttttttttcattgggcaaaaaagaaaaataacttcattactaaaaaaaatcaacaaactaattatagaaggaaatcacattttttttaaatggaagaaaattttttaaaatagggatttttttattttatatttcaaagtagtttttattttatatttttacaaaagttaaggtaacaaccacatagcaatcggagcaacttaaataataattcaaatttacataaaaacgaaagaaaaaaattaaaaaataatttatgaagaaatttcccttcaaaatatataacaattccatttctcattattttttaaaaaaattaagaaattgcatataaaaaaatcataaaattgtctgaatttacaaaaacaggcgccaccagcattactcaatcagtataaaaacgatgtcgttttactgtttaataacgcgaaaaacgacgttgtttaactgttacataacattaaaaacgacatcgtttaactgcgtttaagacaagtctgatattgaagatttattattaattattaatattgactgtaaaaaataataataataataatctaaattgaaatttcagttcgagtacaaaaaaaaaaaaaaaaaaacatcaacggcaaagcaactcacaggatccgatcagatccgttaaaactctctctctctatcatcgttctctctctctctctctctctctctctctctctctgtatgtatatatctgcgtgtgtatatgtaataatatatatattgtagtcaattttgcgatttttaacaatttccccatttgatttttgacatttttgaattctagggttttggttgtttgtattcagaaagattgttcatttctgatatgttgtcatcgcaaaattagggttttgatttcggagttgttgggagggattcgagatgtgtccgatcgagagagagcttagctagctagggtttgggtgaaaaagtttgagtcttttaccctagagtgtatgaagatttggtgttgcctatgcttcagcgaagaagaagaggaagaagaagaagaagagttaggtggagaagaagaagattgttattattattattataagaaggaagccatggatgaggttgatttcgaaaatgagggtaatttcgaggtcattgttggaaatgacggtgagaatggtgagaatggtgatggtgatgagctcgaccctactgaagaacgtgagacagagcaagatgagcatttgaaattgtttgaagggatggttcaagctgtgcgtgttggtgctggtgctcattgggatgattctgttagtgttggtgctcttgcttctttgaaagcttcgatgagaacctcaagacgttctaaaggggagagtagctcgacttcttcttcttctgctgctgctgctgcttctgaagattgtgatcatgattcacatcataagagagccaaagttcactctgattttcagtgagtttctttttactatgataatctttagtgttgattttgaattgatagtatttggggttcaaaaaaagttcaaatgaataaatgaattaaagtaatgtgcattgtattgtagaatcttgaaattaggataatttcagttaggtatcatgtgaagatcatattgtttaattttgaattattaaccaaagggttttgtcatcatatggtaatgcagttagatattataatcaaatatgttcaaggaagttgtttttattttaggaaaataatgtatgagcaacagattgattttctctgttaatgattttttatttgatattgttgcaagcaagccgaaaactatagctaagaagctttgccaagaagttaagaatgtttgttgctttgcaatgatataacttgctctaatttcttgcagcgagtgctgttattcaactgcaatttcttcagttgctggaaattctagttcatctggagacaagcattacgatattactcatggctcttatgttgcatctaaaaatgagatcttttatcacacctttatgctgaataatgttggtgaagagaatcaatttgatcttattggtgggaatgacaatgaaggagatactagtggcccttcaaaaacagaagatttggaaatccggatggatcttactgatgatttattgcatatggtatgtgttgccttggaattctaccctctgatgggaggtatttgtcgtcgctgcttataagtttgtattttttatttacctttttcttcttttttgatcaggttttttcattcttggaccatttaaatctttgccgagctgctatagtttgtaggcagtggagatctgctagtgcacatgaggatttttggaggtgtttgaattttgagaaccggaacatatctgttgaacaatgtgagtgcatttttatttactttattatagtattattctattgcatttgttagacatccctgttccggtttcttaacattttttttaattaaaaaaatgtcttaaagatgtgatctttcctgagaaaaagtactagagaatagaaaatcagtggctggagtccatgtgcttttgttacgtttgaaaagaggatttatgtattggggacatggacattaatgcatgcagagtttagacacatcatgttaggcaattgcaaaaccacatacaaatttaaatatagacacagttgacttctgatttgtatgcaattactgtcacatttgaagactaacacatgatacatataatacagcaatagatcttgaattggctatgatgatgtaacttcagctttaatttttttaaaaatacaatagatcttagtttctatcagacataaagaatctttatgggattccctttaacaatctccaagcaaaaaaagatatcatgatattagtttttaaaagggtaccatggacactacaagtacaaattgatagtagatattcttttcttttgtggaattaatcatttaccaccaatatttcatagagagaccaagttagagtaggagaaagtaggaaagaaatgaaaaatagggttatttggttggaaagaaatggggacgtaaagggagggaaaatttgtgggtgggggggttaagctctcttgatgagtttggagatctacttgctgttcctagtttattagcttattttcatgatgcaaaaatgagaccatgtgttttgttatgctaaaaagctgcacatggtttagactcataataactgtatttcattgaaggatattccacctccacttcactctaaagttgcattagattcctttacagtttttataaataccacttaatttttaaagcaggataatatatttcaatttcataaattaaatctcctacaatcctcattttctttccttcctacaaaaataggtttatttccaaatggatgactcactaacctgaacagtatttagaacacggtctcaggagtagtttatatatgtctaatgtggtgttttatttgtgatatctgaactttttttttttgatgaaaatttggtactaaaacggatggaaatttacaactacagttgaggatatgtgtcgtcgatatcctaatgcgacagaagtgaatgtctctggtactcctgctatccagttgcttgttatgaaggcagtttattcattgaggtagattccgataactcttggtattatggttacatagttctctcactgctcctcatatattctcttctgctttattcttagaaatcttgaggttttatctcttgggaaaggagtactaggggaagtctttttccattccttggcagactgtcatgtgctgaggagattgaatgtcaatgatgctacactcggtaatggtattcaggagatatccgtgaaccatgacagattgcgtcatcttcaactaacaaaatgtcggatgatgcggatatcaataaggtaattagtgatttagttctcactagttatcccgtgacttcatgttgtcgaactttcaatctaaattctttctcttgcaggtgtccacaacttgaaacattgtccttgaagcggagtacaatggcacaagcagcgctcaattgccctcttttgcatgaactcgatataggtgcttgccacaagctttcagatgctgcaattcgttcggcagctatttcttgtacccaattagagtctttagacatgtcaaattgttcatgcgtgagtgatgaaacactacgtgaaatagctggtcattgtggcaatctccgtgctcttgatgcttcctattgtccaaatatatctttggaggttagattttagagattttttttaactattgtttcagttcagcaaccattcgaaggatctttagctgatgtacttgttttttctttctttctattttgaagtctgtgagtctaccaatgttgacagttctcaaacttgacaactgtgagggaatcacttcagcttcaatggctgcaatagctctcagtacaatgttggaggtttgacttatctatcttccgatgtggatgatctatggacgactgggaatggtttcgatgtgtttaatctaacatagacttttgcaggttttggagctagacaattgtggcttgttgacgtctgtgtccttggaacttccacggttgcagaatataagactagtacattgtcggaagtatgtttttttatggtccctcttttacgcaaataaaatgatttattatttgttattattcttcccttttgtttaatgtttatttcctccagatttgtggagcttaatttacggagtattgtgctgtcatctatcatggtctccaattgccctcttctccagcgcatcaacctaacttcaagttcacttcaagtatgttttgataagatttatatccaaaacggattttaaggacatccattcgagaaataaaattcttaaggagcggtttttttgtattgcagaaactatcattacagaagcaagagagcttaaatcaattagcattgcaatgccaatcgttgcaagaagtggaccttacagattgtgaatctctgacaaattctatatgtgatgtctttaatgatggtggtggatgtcctatgcttaaatctttaattcttgctaattgtgaggtttgtgaatgtttcttctttacatttgacgaattaatttctttgaaactcgcgaatttgatgccttgggccttattatgtttgtatgcatatgttgatctttcgggctcataatggtccatgaaagatatacaacttttagagggattaaagtataatccacatgatattaattctatttatatgaggaaagaagtgactgttgttatctttttgtttcttaaatgacattttttttggcttggctaggatttcatgttccgttgttcggtattgctaataattatgctgattgttgatagttccgttttaatgtgatgatttcgttaccccttttccagagcttgacagcagtgcaattctctagtacttccttaaccagtctttcgctagatggttgccgggcaattacttctctcgatctcaactgtcctaatctcgagaaagtttctttggatggttgtgatcaccttgaaagagccgaatttttccctgtaagttatcagttagtttgctatgtagactgtttgattttattattgtgttaaaataaatacattaatatttacattgaaaacagaaataagaacattggaagacctaagtatcttcctattgccttttaacgattttgagtaaaatgcttcgtactttcttcaggttggtcttcggtcactcaatcttggaatatgtcctaaactgaatgtactcggcattgaagcacctaatatggagttgctcgagttaaaaggatgcggtgtgttgtctgaagcctccattaattgtccactcttaacatctttggacgcatcgttttgcaggttattttatagtattctgtttcctttatactccccaattctcccttgcaacttaagctaatacttcttctgttttctttttcgggtcagccaactcaaggatgactgtttgtctgctacaactgcttcttgttccaagattgtctcattaatattgatgtcatgcccgtctgtcggttctgacgggctctactcattaagttctcttcagcatttgactgtgcttgatttatcctacaccttcttaacaaatttacaaccggtttatgactcgtgtgtaaaactcaaggtaaggttcttaaacacttagtttgactattatttcggttgcaaaaacttaatttcttcttttgcgtctcattttaggtgttgaaattacaagcgtgcaagtatttgaacgattcatcattggaacctctttacaaggaaggcgctctaccggctctcgaagaactcgatttgtcttatggaaccctctgtcaatccgctatagaggagcttctctcttgctgcacacaccttactcatgtgagcttgaatggctgtgtaaatatgcatgacctgatctgggattgcagtactggcacttccgttacatccaccatgctttcactcgagattgagggtcccgaagctgttgagctgcctaatcgtttacttcagaacctcaactgtgttggctgtcaaagtattaaaaaagttcatattcccccagcggctcggtgttgccatttgtcatcactaaacctatctctctcttattatctaaaggaagttgatcttgcttgtctcaatctttgctttcttaatttgaggttggcatctattcttgaaatctattgtacaacaacttttgatgacttttttcttgttattaacttttgttctcgatttttcagcaactgcaactctttggaggtgttgaagctcgattgtcctaggttaactagtctgtttcttcaggtatgcattataccttcatcattcatttcatcatgccggtttacatggactcgaaaaatctgttgtttgcccattgaattctagcatctgttattgtttttcacacaatcggtttaggcatattttatttacctctatacagccctttctgattacctgttcttttctaaatgttgttctttttagaactgcaatattgatgaagcagcagtcgaggtggccatatcgaaatgcagcatgttggagacgctcgatgttcgcttttgtccaaaggtcagaacaaaacaccctctccccctctctctctgtcattagtaaaaatatagaaagagcaattttttgacttgtggggtttgtatgtcgaaaaacgtatatcagatatgcgcgatgagcatgggaagattacggggtgcatgtttgagtttgaagagaattttcagcagcttgtcgcatgcgtaaatttactgaaacttgtctcaatttttctcttttctttgttttgttgttgtttttcttcttcttttaatctttaaaatgcggcgaagcggcttggctaatttattcatgatgatgggatgggatggggtctcttgtatttgtatttgtatttgtatactgtaaatgtaatgtattttgttatttgtttttgagtatatataagggtatttgatgattattattattattataatgatgatgttgttgtagtagtttttctctattatatgtaatatgttacaataaaaatcagtttgtttgtctctcttttctttttgtttttctttttggtattttggacatattatttcataacattccatacaatgacaatctaatgcatattttctttgggtgtttttgttatatatatattatatgtaattatcaaaatgtggaaaaaaatcatgtacctatatgagaatatggttgttatcattatgttattttatacataaaattcatccatttaataaatataatacaagatcccatgtgggaaaacgtctacataatataagatcccatgagtaagatattattggcaaaatggcctcatttataatgtaattttacacttttggtttatctaaaagattgaatttgaattgtcttttttttgtacctttccctttaagataaaaggttgtctttcatgtacatgataataatagttgaattgtcacttacaatatcacaaaattgattggagctgcttcagttgggggtctaagacctgactaccagcttcttcttcttcttcttcttctgtgttcctatatgaatcagcaatggctttccctttatcgagcacgtccggaggcaccgttttgaggagcctgtagtagtgtttgttgtaattcttattaattaaagaactaatctttttttgttcacacatgattgattgattaaagacgataattaacatacacaacaatgcagggattatattacccttctagtgaatcaagagcaacaacaatctgtgccttcatcgacttaactgaagctcctggatcttttcttgatgcatgcaaaagtaaggagtcaagttcctccaatgcccttcattcaattcaaacacactgattttaaaatctttatttagatataaagttgtaatttttgttttataaatatatagaaccttattactaaaatgtaccaatagtgatatgacatgttctagagtgttggcacacaccctaaagtgacttatagcgatggagctgataacggatacctgagacattgatcgacgtcatcggaagcggatttaccatttccattttctgaagcatattgtgccacctaaacctccgaagaaaattgccaaacatattaggaactttctcaatcaaatataaaacaaaaactgtcatcaagctgatttaatgagcataaagaatgaatcatatgatttcaatttcaatagtgcacccagatgatcacatcacatgatgacaactgaagagaatgttggcttgtgttttaaaatattgccataaatgattgcaaatgtataatgtcacagtccacacacataaattaaacatatgcatgtgtcttgggagtaacttagcttccaagcaatgcataaaaaagaacaaaaggaaaatcttcatggacaaagaagcttacaaacattagattgaatgtcatcaatattgttactaaattttaaagatgaagataagcacaagaactagttaccgcacgaatatttatgcgaagagatgcagcagggccagaacgaagaagagatcgacaagaatcatactgaggttcatcagcttccaatgtcttttctgcagtttttcgttgttttatgttagattttaagaacaatgatgtatgttttgttaagagcaaatgattataactaagcaaacaaattagttttcttttcatgggaaaattggaaaatcaaaaacttaaattagttaattacccaagtccttgatttgaaactggctcaatataacagctggtacataagcctccaaaggatcaagctttttcctgatttataatataaaatttgtcacaaatatgaatgctttaaaaacagaaaatactaaaaaaaaaatcattcaatttcagtcctttaccttttcacatatttatccatgaagttagctgcaatggcatctgtaacaaatatgaacacaacacaaaactcataaaacaattattctttactttacttgcttaattaatagatgggcagtctaataaatactaattacacaacatggtaattacattattttaatgtacaatattattttaatcacatggcaaaatatcataatacatttcgtaattacatccaactctcataatgattcatgagaattagatattataattgaaacccccaattatctctaattacatgattaaataaatacaccaaacttactaatttctaactctccaaacatacccttaagatgagacaatttaagactaaccaaacagaccataccaaatatattaaattgctttaattcttcttcataagctcatattaaattttatcaaacaccataaattacatttataaataaagtaatttatagcataaatactaatttaatatttaatacataaattatattactgattgttaggtgtgaagtctacatcattttcttattagtatttaaattaatttttaaataaaaaataaattaataatctaagaccagcaaattaaatacattaatttttgattaaattaatttatcagattttttattacggattttagaaaagaattattaaacttttattttttatttatcttaatttaatttacataaactataaaattcaatctgattatatcgaaattactcatacataaatcgtaatcgagtttggtgaactccctcgttaaaaaatttcaataagctatttcagtttccctgtcattatccttagtaaagtaaaattttctcgctaaccaaacaaaatgaagagaaagagtgagagaagcgtacgattagggataagaagcaagtgagagagaagtatggagatggagaccgatcttctactcagaggtggcgcgatcgacgagcatcttaccggcggcggattactccggttccggttaggttgttttatggggaaagctgtggaagggaagagagtggtggctacgcgcgccatcgccattatcacactgaaacgaagctcctttttctctatttcccaaattagttaaagagattattacagttaagataaaatcttgatattatattttagtccttatagtcttttttatcaattaaagccctcaacttttcttttcttgacaattaagtcctttgccttactaattgaattagataatacatgaaaactcattctttaaccataactttgtttagcaaaattatttaggtttttcttatattggaattttattaatggtaatcaattaaaataatatcttacaatttaattaggatattacgattaggattaaacttaaaaaaacgagtaaaataattaaccgtttaattcccaaattatttagtaaaaaattaaaataaaattagatgagaaagattgcaatattacaattaaccttaagaatatttatatttgatttcatccacaacacagaagacacaacattagaaattattgcagcaggttcattcaacctcgtaatttgagcactcaactattgtgtaatgtgcgtaactgcattactaacaatcccttcagttgtagagaacttgttattcctaatcactaataatgatttgatagcgagtcatcaaagaacaaagaagaaccaacaacgaaataaaacaaaacaaaatcacgtcatacaaataagactaaaacactcaaaatatgacatagaaataagactaaaatacccaaaattatatcacagtgataagactaatcacagtagcgaaaatcacattgcagtagtaaaatacaattccgaccaagccgtatatcagcccaacaaaggtcgacaagcatggtcagagaaaaaaaaaacctctgatagctatagatttaaaaacgaaaaactctaatttaaaactaaattattttaaaaataaaataaataaccattaagttcttaccaattacaaacttaaaatattatgtaattatggtgtaaatatttctaaagcaattgataaataaagagtattgtgtggtgtatatatttatgtttaatttttagttgtagataaatatttaagctatatttctgaaattttcataagtatttatccgttaagtgtcacatgttattttttattggcatatttaaattatttaaataaaaataaaaacttaattatatagaacaatcatgtgccattaacttgacacttaatgatcagataattaaactaaatatttatctgcaacttgagttaaatttagatatttataccgcaaattattctgaataaaaaataataaatttcaattggttaaaattaaagctttaagggaccaaattataatatgtaatgtagtggaaggactaatacttgcaaaataaaagatcttatccgtttgttgtttgtaatcgcgtcatcgcatcgtaattacgaatttacccttacaaaaaactaacacaaagagaaagatacaaaatccgttgtcgtttttctggtccgaaatccgactcatattaccggattcaagtcgggtcgacccggtctactctaccatataaaaacacagctgttgtttgattgaactgcactaaccactgaactctgaaactctgatctaaaatcatcaatggcgaaaacggcgtcgtttcttttgcttccgctcttttactacctcttcttcttcttcttcgctactactactgctgctgatactattattaatacacaaagtacgtatttttctgttctcttctctttaatggtttaatttatattcttgtttggggaaatgtgttaaaagtattggatttggattggaacccataatgtactactactactaataataatgaatagatctgtttgatatttttgcttatatatatagaattatgttgatctatttgattaagatctctatgtatgagtttacatgtaattataggtgtataactacaaaattacttaaatgagaattttatttgcaatttggttgaaaagatttgttctttcttgtaagaaaagtcttttttttttagttttgaaattgaaagtatatggcttttatttgactcttattgttgtaatttatgtttgtttttttttgtatgtaagtagtttccccattacaaaaataactctttggtagatatctatatgtgtataggaaatcatattgtttaactatcaaagcagtatgtatgaatttgtattctataatatttatttaagggtaaataccagcacaagtacacaaagttttgaatttgtaagcggtataaatctaatgtttttttaatggtataagtactcaatatttgtaaaattgtaatttttttctatttttattaagctccgtttaaatttattaaaagaagatttagaagtaaccaatactacatatttccgtccagatcaaataatttaaaatccgggtattatatgtgccctgtttgagagtactgatgaaactgaaaaaatattacaattttataaatattgagtatttatatcgttaaaaaaaattattaaatttatgctatttaccctttatataaatctttgttctctcaacaagtaatgccatcaagatcaaatatattctttgcactatatcatttagtttaattcgtctactttggattaagctcttatatatatacatatatgctcacaaactggttgttgtatgttccaacagacaattaatcttctggggttttcgaagtcatgcatttatgtacagattatctcataatgcataagatttgatgagtttcttttttataaacattgcagtgaaagtaactgataaccctgcggatgagttggtagaagtgattaacactaacagaacagcacacaaatcttcatccctttacagtaaccaaggtctggcctgcattgctcttcagtacataaaagcctatcaaggtgattgtaaagcagtaggaggaccaaaagccaagaagccattcgactccgaattcgcagaaacttttgcaccagcctgtggtgttcaagtctcaaccctttcaccaattacaggtcgtttacttggttgccagtccaagtatgcaaaaccacccaaagcgttttcggaaattcttatggaaaaccaaaagagcttagacattttgtatagtaagaaccatactgaagtgggtgctgctgtgtctggttcagatggtgggggtccttatttctggtgtgtgttgtttagcagtgggaagaagaatagtagctttgttttggatggaggtgttgctaaggtaacgaaacccggctgctttagtggcgccaacgacgtttgtaatggcgccgatgatcgcttcagtagcaatcgtttgttaacatttgttgctacaattttggtggcagtgggctgtgtctttggattgtgatcaatgattcaatgagttgtattgataggcttgatcttgttttatttgttgttttttgttattggatgtagagagctattcattctttacatttttccttcacggtgtaaaatttatgagactttgtttcattaaggttgatgagttcttggttaaaattgttaacatcaacaatgctatatactcacacaccttctgtgaaaactatgtaaaaagaaaaaacctgatagctaacactttttttgtttttcttttaatactcgggtctctgactaatcttacaatatttgagagccaggtgtttgggatggcgaccattttgtctcagctattgtagcaagtgtgtcgcccaagacatgagaggcatgatgacttgaagtcatcctcacctttctccaacagtctgtttaggattccaaacttaatggtggcaactaaatacgagagttacgctcgttgcaagacttagtccaataggtattttacaactagaatttctcttcttttcaagccaattccttcaccatcgcgagctccagttaaattcatttatgatacactttttagttatggaggcaaaactacataaccatttgaggtaacccaatacaagattttaaaatcagaatcctaattatgttttctattcatatatgttactcgataaatatatataaacaaaaagcaaaagcaagattaataaacatttaagttaataatattaactacttactattctctaataagagatattagaagaactatgagatatgtaaaactgagaagtgagaagcatatatcaacaagccatagagaaaaagacttaaaagggttctttcctcatcttaagtctcaaacctctttagtttccgaaagacgctttacacttcaaaaccaaagccagaatcaagagaataaccagaatcccaccagaagaaccaccaaccctatgaatccagtaaggatcaaacttggttaagcctttatccaagaacaaagacaaagcaatggctaagatcaagattaagagcaaaagaggcaaccaagattcgaaatctatgctagtctcttcttcctctggatcgatgacctctcttcggtcgatatagagaggagaaatcacagcaagaagacccatgactataactgccaatctctcacaagatgaagacctatttctcctccatgtcgctccaagatccattcagaccacacctcctggagaaaccgaaaataaacctagactcttcttgttgtttaactttgttccaccaaaaacaataaaatgtgggaactcagtttcaccatgatgccccaccacccatcaagaatatgaaacagtactcattcacataatgtaaccaaatcaaactgaacaaagtgataaggcttattttactttatactatcaaaggaatcattccagaaatgaagagataatgttatttgacaattggggtaagactattcaagcttaaatttgaagtttcgtagtgacataataaacataaactagttttttctctaaatagatagaatcagactattctccattaagcaagaatatataggtttttaatgttttatactggccactgttaaataactgtttggaatcagatgctgtgcatgattttatcaaaattcttacatatccatataaagtaatgccatatacatatttatataaatacaataatgtaacaggaaaggtagtgaatagtgatgctcttgcataatttaaaggaagagaagccattaatatctcatctcattaccagaacaaattaggcaaagatttaacagaaatcaatgaaaaaagcaaaccccattaaaggactttgtaagctaatgagaatcactagaactcttagttctgattccattcccatgaccctgaactctcctcaaccatttcttgtgcgatgaagtagtagtagtggcatgagaaaatctcaccggagaagtctctgaagctggtagctcagccggaagagcagcggctgagcttgtaaaggcgttcaaaacaaggaatgctagaatgggagacaggtccagtgtgcccccaagtggaggaatgattccccggaatatgttcaagtaaggatcacatatggtgctgaaatttaatcaataaagactgattagaataaagatttcttaagattatagctccaataatcctaatttaattagcaataagttgagtgatttatgtattaatccaatattagaatttgataaataacatgtaaaaattcaatttttttttttttttttttgtctttttttcaactcaaaattaaacttaaccatagtgttgatattagtatcaatagagattgattagaattagaatatagatttcttaagattatagctcca

SEQ ID NO: 14601 - DNA, 4451 bp, Cannabis sativa
gaaaggtgcaaaaataaagcatatatatatatacatgagtaacaatatatataataactttatataaagattgtattataacagatatgtgtgtgtctttcttgatatcatatatatcctacaacatataatttgtagtgcatatatatatctatatatacttgtgatttattatgctctctcctttaattccatgaagaaaccctaatatatatttatatatatatatatatatgtatttacagataacaaagttctcatgtggaggaatttgcattggttttggaggaagccactccttgtttgatggatttggagccttcaatttcttagcctcatgggctcaaatttcaagagccaaacatcatgatcatgatgatgatgacctaatcaataacaatattaatcttccaaaccattcaagacaaaagctttttaatgtcataaataatattaataataatagtcatcttactatatcttcttcttcatcatcatcaatatatgaacaacaacatattggggccatccaagacctttatggaatccccatgagagctatggcggccaatgacacgtgctgggagtcagagctcgccaagctcagccaatcagctgaaagccgaggcattcagcttcttactctgtctatagagaaagaagctgttgagaggttgaaaggtgtggttgttcaaagtggaaaactcttcaagtgctctacctttgatcttctttgtgctcatgtttggaaggtatgaatatatatatatatatataatattgtttctttggttataagtaaattaacattaatgttttttttacaaagtataaaataatgttagataaacattatatcttatcttaattaaacttctaaattaagtaacataatttttacaactacataatttctccataggtgaaaattttcttaaacacctttttgttgaatccatttggagatctctgaaattacaataggcataagtggtatcaaaaactctattattatttatggtcataaacataacataatagtattatatatttttttaatttacaaaataggaagtctcaagttttataattttttcccaatattaacaaaaatgtgtcgtactgtgttaattatattagtgtataattaattaatatatgaaatctcaaatatttaaatcttatataattaatacaaaattttgttaattgttaatagagaaaaatactaaaaaaatactagtaaagcacacttttcttgttgttatattgttattattgtaattaagtattatgtttcatataatttaattaatataaaaacttttaaagaataccgttagctgatattaaccaatcataaggcgctacttttagaaagtgttaggtaccagtactagtatccgataacaatactcttattaatgtagtggtggtgcatgtaggctagagtgaaggctctttccctagaaccaaacacaaaaatatgcctacaattcccagtaaactgccgaaaccggctccaaccgcctctaggctccgatttcacaggcaacgccttcgtcctggcctcggtctcctcgaccgccaaacaactgaccgaagagccattggaagaaaccatcgggaaaatccaaggtgcaaaagaagtactgaacaatgattacattaaggagtacgtgaaagccctagaaaactcatcagacaagttcttgccttcaatgagagaattaaccatagtcagtgattggctcaagttcccttttggggctttggatttcggttggagaaataatgagatgatcctgtgtggtgcagccttggtagggactcctgttcctgaagcttgttttctcatgcctgaccttgaccaagatcgacctggtgatttcttggttaggattgggattaatggagaggacaacattattgctgattttatcaccaactttaaaacttatttcaattagtatatatatatatacttctcatgattttatgatgatatattgtgtacgtgtgtaataattaataatattaatatatatatttgtacgtgtgtacttatatatatgtactatatatatctattatatatgatgagtgatgtgtgtgtgtgtgtgaatgtaatatatagtgtgtgaattactcgatcaaaactttgtttgtgattgtttggcttaaatatatatatgaaataatgaaagtataatctagctggggttgtgtattttttatacatgtattttgacaaataattaatgtgtgtatatatgttgagtagataattaattctataattaagtgactctttactaggataatgtttacatgattaatcatgtagaaaatgataagggaaagtgtatgagaagaagatgtatgaaatttttatttcaaaattaataatttatgcatcttattatgctattaagtttttataatatatgtattattagtgtgagattttctaaaaattagacaaaatgggtgactactcaatgattatatttttattgtaaatatgatgattacatttttattaacctgtaatagcaggttactaacatgtaaaaattctttttttagaattaaattaactatcattaactatttcttgaaataatattaatttttaatttaaatatataagaccctttttagtaattaattttaataattttatttttatatttaaatttttattataatttttttaactgttaagccatttaattataatatttacaataaaactctattattttataaaaattaaatttacaccattttaaaatatatttttaaataattaatctctaagtctgagaatagtgcgaaatactagaatatgagaattcatgatttatacatcatatctaaactccaatttcatctgtatatcttcaagttgcatgttttagacataattgaaaacaaccaacaacttcatagatcaataaccaataaatgatgtactaactttgttgacaatacataatcaaaatcaataattaataataatcaataacatcggttgctaagtttatcaaaaacgcatgttcataatccataaccaataacaattaataacttttaaatcttcaataatacatattcaagatcaataatcaataacaattattaacttttaatttttttcaataacgtacatattcaagatcaataaccgataacagttagtaattttcaaacctttcaataatatatattcaagatcaataatcaataatgatcaataatttttaaacttttgtaattttttccttttttatgattctacatcgatcaatatatatatatatatacaatatattaatttagaattgcaaagaaggaaggataaagtgactttctctctgggaaagaagaactacatgacagagggtggaatgaagtaaatatgtgtcgagtacagcaaaaaaaattatctttaattatataattgctattagattttaatttttttaaaaccaatcttagactgacacacttatttggcacttaaagtattgaaaataaaatcgactgcataattacatttaattagatcttatccttatcattttttattaattaaggttatataggtctaatacttttaaattataagaaattttattataaatattttaataatttaagtccaaaaaattaaatttctaaaagattcttatttagtaagaaattgtagaaaattaattaataattattagtaataatttaattttaaatataattaattttaattaaaattttataaggaaataaatttttatgttactatcaagttacaagttatttatttatttatttattttaatttctaaattaatcacaaacatttaatagtaatccaatgactaaaaagaaatgtaaccacataatggttacatatttgaagtaaccattgaaatctcttccaatttatgttatatatctttcattatttaaaaattgcacaaataatcttgacaaaaaaatgtaagaataatacttgctcgtaaatatttcactattaatgaatttattaactaaatatatatttatttaacaaaatgtctataatttccattctcttatacattttagagtgatttatataacaccaaaaaaatcgaagaacatgtgtttacatacataatctaacaccatcttcaatccaattttcaaaaaggaaaaaaaaggaaactttattattattatgtcaaattcaccacaattttaaatatgatatatttgaaataactttaatctgtgtcaaatttaacacaaaattaagaaattttactttttaaaacataacgacgtcctcttcaaatttttgttttcatttattaatatactattattagtttaatttcaattaatgtttttatggggttagaattataaggagttcatttatcgtatttatgtgttgaaactaa

SEQ ID NO: 14602 - DNA, 5964 bp, Cannabis sativa
aaaaaaaaaacaaattaatataaaagggtgtttattattaaattctcttagattataaaaataggcataacttggcatttaatttgaattattgattatgataatgccacttaattccaacaattaattgctgtgtaaaattaaataatatttagacttcattgtatatatactttcattgaagagccgtagtaaatagcaggagtgaattatagtaataatatgttaataaaaaaattaatattaacgtataatattataaagtaaaaactagactcttgtttgtacttgctttttttttttaaatagaggataattttgtagacatgtattgagacaaattccatgtttatatttattttaaattaatgtataaactatttgatgctaaaaaaaacatccaaatggatataaagtagaaactaggaccaagttccaaacagtatacattgaatttatccacacttctcctaatcaattattcgaatacatgactttatttttcgcaaagtttcgaatatatattacattgaaaacagtagttatttaaaaaaaaaaaaaatgttatattaaatgagcttcattgtgaaaatttaaaattttctctcttttttcttaatattattattgatgacaccaaattatatggcctttctttcagcctaaaaatgatttatgtgctatttattaatgagttttattttttatataaaaaacattaataagttccaaaaattgaataaaatatcagttcaccataccatgcatgtaccgggcctattgggcccgtaggcccataattccgaaatttacgccaggtaatcatggcgacgttcggagcgaccaagccttaattattagcccacgaaatgattatgaactgcattttatcttcaatatatcgcgatatatgtcgtgtagacagctggtgcataaataacagtgggcttttattttctcttttgttttttcttttcatttttttttttttttgaaaaggatttttcttttcatttttcgatcagtaatattatggcaggatggttagttgtagggccataaaagtgattacacttattatatatatatatattatttttaaacaaattatataaaattaatataaaaataataattaaataacatcaaaataacaaaataacatcaaaataacaaaaaaaatatatatatataataaaaatcaataataaattaataaaaatacaacataaaaaaattcgtaaaaatatttaaaattctgtaaaactgtattttataatttttttattatttttgtgtatttgtgaaataatctttatagatttttttttgttgaatctttattaccactatttaaaattattattttactcttattttatatttttttattaaagtaaaaataattttatcaatttactacttattgcaatattttttttaaaagaagaattaaatcaatatttattctaacaaacaaactaaatataataattaatttctattaacattatattatattatcattacaattaccatttgattctttaattactcacttatctctctcgctttgtcggtacatgatctatacttttttttggctacctattatttcattttactctctcaccttttcatttttcattcatccattctctctgacttaattatccttaatataaatatgaaaaaaaaatactaatatggctttgttgttttactaactattaatttagagaagaaaaaaaataattagtggaaattcttctcaagaaatttgcagttgttttccatgactatgaacataagcatgtgtgagtgtgacccataaaaaagatgtccaattgttatgaaattttatttgtgtaacaaccaccactaactctcttttttatttaatttaagatgttgagctttttgggtatttagaaaatgaccaaaacctacacaagattgcatagacacagtgaatattgttttcttgcttgattataaatacaagaaagaaagaaaattgcacatgattgaaaaagaaaagagtagttaaacatatagaatacaacttttatttatttattatatttaagtagttttacacttaatattatattattctaaggctagctcttttgtgtttcggcattattataatctttacttttatacaagtttgaggatgacagaagaaaatttggaattgtttacacattaagggtcctcaaaggcaatgcttccaagcaagactgtcttaacaaagttggagtatttataaagtaaattaaagaaggatcctaatgggctttactttaaattaagattattataattataagattaaactgatcagatgtcaaaagtgtgtggacggtggacctacttagctctattaatggtcaatataattaatatttactaataagaacttgagaagaaaccatatactagatggtattcttaatagcatttttatatttaatttttaaaacttgaaatcctttctgtagtagaaagtgaaatttgtagcaattgggtcaggccactcgatcaaaattctagttatatagtataatatttataatgtaattgtttattaagaattttggaaactaattataaaataaataagcttaagaaagaaataaatttaagaaggagatactaagatttttacatggtttgggtattaatgaatcttagtctacaagtcaatattattaagctagaaaagtgttgaagtattttcatacaagagtgttcttgctaaatttaagaaccctaattcttagcccttaatttgagaaataattttccaactatttacatgaagggataatgttctatttataggctacagtcgagtatggttgaactcaaacctggtagggtttaaaagtgtcaactaggcccactaatagggtaaaatacaatatctattgactttgagttggttaggtaaggcccagtttacgagataatagtcgtccgtactgtgggtactgtttggtggtggtaggtgtcgtgcgcaaccaagctagtactgagaatatcagagaatatgatgttagaccaaaatgtgttatccttttggtgatacacgcactcctcatgcctgacgtaaggaacaaacctctgacttggtggaccttgtgtctggagaatgtcacgtaggatggtatcttaatgcttccagatgcctctttagttgcaattccagattaccccctgagggtatccaaatacgtccggatggacccttcatgttctgggcaggatagtctttcccggaccaaagtggtctagccttgtcaggccttatcgtgcctgtcaattggattttcgtatggacctggagtggtatccaacctccattgtgggctgatttattaacttgattaggctcagggatgggcccgtcttggctaatgttaggccttggaagtacacatgtcattaatctaaaaatgtagatatttacccccaagccttcggggctcaagtgtcgtggaggcttgcagcctacttctgaattcatccttgaatgcgaaatcttgaacagaggtgaacttttggaattccaaggccaaaactggcagatgctcgtgatcctttcatcttcctagaaaggacacatgtgtcataaaacccttgctttgtgcatattaagcacctcgagaaagcacgtaaatcctggggaaacgagacgacggctagtttatgttagtgagatttttgaggcgaatgtcatcattaaatgacctcaatctcatacacaacattaaatgggaacctttcgtattcccaaactattagatctctttgtgtttcttgcgatttgatctgggtcgttggattgaaaacacgcagatcgccaattcatgtataaatagggtgaagatcaaatggttatcattttttccattttgaccctttgggcttgaatttcccgagagagaaaattgttcaaaagaaaacccctaaaaattttccagtgaatgtcctacattgcaacttagattctccaccttcttctctgagtacgatcgaggctacatccagacgcacccctaaccctcgtcatttatcctctagagccatcaaggccatcgaatttccaggcagaatacaacgaactattaaggtgtgtcttagaattccaggagaggcttagaattcttaatcaaatacccccaactgtaattttcatacgtaagtatccctaactttaagtttgcgatttaatagtttttaaggtcactacattctgagtgaaaatggtaggaggctagccatgcgttttagggttttgctagatttcagtcacgtgcttcgccgtgtagggcaacgtttaggacatttgcttgtcagtgaagcttttaggttgatcatagtaaacacatttagtaacttagctctcttgtagaagtatataggctttgtggacactgtattttcttgcttgatgttgttgatgagtttgtaaattcggcaaaacgtatagcaaaattatcgtgacaaatacctctgtctaggacccttatggttccagatgagccattatgcgagcctttatttcatattcttgagttaccaatctcctcatcctcaagtaaagttccttagagaacatgcttctggatgctgggtacgatacgtgtaataccccaataagcctaatggtaagtaattaggatttataattatattatgagttaatcaggtaattagttggattatgatcatactaatttagttcaatataaattttaaatttgctataagtgagtaaataaacgtaatttataaattacggagatttatacagcatgtgtgaatgtaatatgagctatatgtagaataaaaatatttttagatttggcgaccttagaaactcgatcgggagccagaaatgtcataacaggtttaattagtaaatttgacgagaatattatgataagttgataatataggtactgaggtaattatgagtatgtataatttgacttagcgccctaaaagtataaatttcttagtggctaaaaataataagataattataaataataaattttatattattataataatattactttttctttttataaaacttatcaatttactaataagtttatattatatattatatgttatacgtttataaacagaaaacttacaaacgaaacccttgtcctctcttttttgatgaaacccttacctttctatatccaacctttttttttttccgattttcaacatgaaacctagcgattcaagcttcggtagtagcaagatagcgaatcattgaagagggagagcttaaggtaagaattgatttcgttttaagtcgaataaaattggttttatataatagttttgtgaattagaataattatggaggttctgaccctataggattgttctctggtagtaataggactaattctgatatttccttgctgaacttgaggtaattttgggttagaaaataagtttggaactttttatagattaaatttgaacactagtggagtttgccaattaagggttcgattttaatttttattatgtaaatatggtagtatgtatggtatatgtgtgccctatgaagttttgggtagtttggacaggttccagtagcatttcggtgagtgggtaaacttggaaagtcacattttttgcccctgaccaaccagtcaatcggttggaaaccgatcaactggttctggccaaccggtttaccgtctggggcatcctcgagaactcaagaattgtatttttgccataacttttcactcgggtgtctgttttggatgttttatataccattttgaagcttacgacgagctatacaatatggtgtatgttttagagctaaaatataagttttattttaatgtatttgaactacgggatttggtagaaaaccttaggttgtcctttgtaattgttaagcaacgtttt

SEQ ID NO: 14603 - DNA, 6718 bp, Cannabis sativa
tactccatatttcagtaaaggcgtcaccttcatcgtcaactttgcgattgcaaaaggaagcgcctttagtttacccagaaataaatttaagaatatttaaaaaatattgaacaaaaacctaccctgattttctttggtactcaaagatgagctttgatttgatcttttgggtactctgttttttctttgatttggctctcctctcctccaatttctatcaggtaaatcttctcgtttgatttttctcttttttttttttcactgatatattctgtttggttgccgagaaaatactcaggagtatgacgtgagtgtgtatttcgttcatttatgtttgatgtatcgtgttgtttcatcaatgttggagtgaaaaggttatactgaagtcagtgatgtgtttttggtgaccttaatcgagaatttctatattagaactgaaaattttgttcattgttgttaattatgaaatcttgagtgaaaataaggggaaaaaaatcacgagatacaatagaaatatggtaatgtttacagaagaaattttttatttttaaaattgtaaatattaatcacaatcccagatactcatatatactgggaatttatatgaattcttgatcaatatcaaacaaaacatttaaaaaagagaataaatatcagttaataatgaatgtaaagccttatttttaagtatgatgttattctcgaagctttaggttttaaaagcattagacacagcatataggtttatacatgaatatttagaaatgggtagcttcaaaaatttgtacttactgcgtatctactacttttgtttttggtagctggtgatcttatcagatttggaggcagactatttaaatccttttgaatcatcttctcgaattaacttcttgattgtccctgaattcattgtccatggactactctgtgctattttcctcttgacatggcactggctcttgtttctcattaccctcccccttgcttgctatagtgcaatgctgtaagtcttttttccttctcaacaatgttggttatggatagatgatagagtgcaatgttgtactttcatgtttgtgtttggaaactttaaaatccttctacatctgccaaaatatggtttattagttttaacccttttcgttttgaacagtatattaatgaatttagccaattgctttaaagggaaaatttaaatcctatgttgcctgggagcttgcttgggagaaaaatattccataaatcaataactaaatggatttaaaattttgattgacagcaattctgatcttcaaattaaatgcaatgctttttaataaattacttgctatatatgaggttataatcttatgcagatggaattgattgatttgaatttctgtctatgtttgcaattgcttgtctttttcctctattttttttttagttttctctttactatcataaccaattgattatttattcaggtttgtaaacaaaaggcatctcattgatgttactgaagtgtttagggctttaagtggtgagaagaagtttagacttatcaagctcggtttttatctgttccttctatttataatcatcttcaggtttgttctttcttctgcattaaatattttatctgctgagcatttttagtaggatttgtgtttacttcttgttctcactgtctctctcttgattacagtctgtttcttctaatgataattattattatttgttttcactagagttttcaatgctggaaaaatgtcactctacagaactgagtttggagacttagatattcgatcttcttatctagaattttagtgtcttaactttgtaacttattgtttgtctttttatttgatttagaattggtttgcttgacatgatgaactagttttcaattttgtatctcttaaagcaagtaatttaagcatgcttgtactcatagaaatgcactttgttctccattagtgaaaaaaaaataaataaatgaaatttgaatttcttttagcttagaaaagcatataccttatctatgagacataaagttggccaatttctctattttatggaatgtgtatactttatactctgattttttttttctaacatggcactaaatgaatgttagctgatcttctataaaatctaacccaacaaggaaatagaagattagaacaaaaaaaagaaaaaacagagactaccctttcattgtagaccattaccaataaggaactaggtgtaattaaaatgcaccctgctttgtggttgaccaaatgaaaggtgtcaaacttcttcatgacatcaatttgtgtttcgtcaagaaaaataatttctgtttgtagggtctaatcgaattgtttggtgtgaattgtattgaagaaacaatctttttatttctacagtgagtactactcgtaattgttcacttggttagttgattgtaattctctagtgatatcacatatcttgggaatcttagatagtaaacaatggaggtcagagatgcatttgcatccgtctcgtatatcaatataaaagcaatgtcgttttctgctgagagcaaatagccagatattaagagggtagagaaaaagaaaagaaaggggggcaagaccgatgaataattattttgtgcaaattttcttgaattatatcgcaaattttgttctgaacaaaagatcaaagcatatgacataagatgttataagttacttcactatttgaaactgacagtgtaaattggaccatatggattgagtctatttttgttgctacaaatttcatatattagagttgggcatgtgttttggaacaagataaatacaataagaaaaaccaaactttaagtagctgtttagaggcatttaaggccaccaaggccgtctggagtaatagtgaaatgttaggcagagtgcttcttctctttcttgccagttactatttctttgctttttgtatttttctacaattcctggtttcgaatctcttttttttaccttttcaataaccaatttccaaatctcttaaaatcacattaagctttctcacctgtcttttccttctactggttccaattttcttatatgaccttccttacaagattaactttacattagaagcactttctgggtgatagaaactatatttactgatgataacgaatctcaaatctgcaggcttatcttatctgcgttcaactccttaattagtgacgaacattacgtggatctattttgattaaccactgctcgaaccacttgatagcaactcattgtaagttagagatctttttttttaattattatttttcaatgtgtttaaattctagctcatgggaatactttcattacagctcaaattagaaaaagttttttaagtttaatcaaagggttgggcaagtagatatttttcaatagcaaaagtgttcccattgatgacaaagtagatatttatatgtattctaaactcaagagtgaaaattgaatatgattttttgtttccattagattcatattgatggaaccttgatggcttgattagtggtttgtgaacacttattcggtatacattgttaattttgaatttatatatttataaataaatatttgaagatcaatagccattttggatctgaattttgaaaagatgatggtgtgtgaaaggtcgtggtttaaacatcagctaggctaatttgattgaaaagaaagttaaaaaatgataaaactatgttgagaactgttacctcttattggtcttggttaaattaaataatatgtatatactattttaaattaaatgtatttattgggttttggcttgttttcttcaaactagattgtgtttccattttttgttaattcccaaactgtgactgcattgcgagacttgaaaacttcagaaaccacgccacaaaaatgcagtgtggtgtagtgcgatgtgttgtgttggttttacactatcaccaaataattcaattatggtgataatttccggtgagttatcgctatgctgtgattagaggtcagcgtgtggtggatgagctagggttgacatagaaatgttgggcactaatggtttccaacacttacaatatgtcatatttttactattagtgtaattaagtattggtgaaacatattttagtttaatactaaggggacttatatttacactacaaaaaaaaatataagtacaccccatttatatgtttaccctattttattcttaaaattattattttttatttttataaaaacacttcattttattacaaaattaggtctcatttaaatttagaaggacacccacattgttttaagaaagccatgtaattatttttctttctccatttcccttttactctctctctctctctctctcgaaaaatccttaatcatcttctaatcttagtcaccactttatggtcttccacagtcttgtttaaattgagagtttctaatgctgaaaggattcttttaccacggaagagacttcaatgtctttaattctagactcagggagagaaaaaaaaacaaataaaaacaaattagattaatggtatatcttatttgtattctgatttattttaatgaaatatagtcaccatattttatatataaaagaaaattgtatatataaatttactttttgtattgaatgattcattggtggatggagtactatggtgttgcttcattgatgaaatataatttctttttacggtttaaagttacttaattttagtaagggagtgtacttattaaaaataaataattttaaaaaagaaattaaacttaaattgtctatttttctcatttcacaaaaggataagaatatattcaaaattttggggtgcacttaataattacagggatgtaaatataattcccctaatactaattaggtttatttgtactaaatgtctcaaaactaaataggttttgacaagttagtccttaaaccttttgtttttacaatttaatccacaaatatataagtttgggcaagttagtagtcaaatgttattcttttttaacaaagtggtccccaaattttaagtttttggcaacattaacttcctactcttaaatgatgatagttttgttgaatttatttatttactttgtggattatttgtactgcatgttcttaaattatacgagtttttggaagttggtctccattttgtttttgaattaaaggataactttcattaataagaaaagtctcccattacaataatacgtaatacaggcaataaatcagtagcgtgaaaaacacgacttagagagaaacaagtgctatgtgccaactaatgggttgctttatttgtagatcgttcaacaaaatgtaaagaaacattactaaaataattcatgagactcttacagttaaaaaccaacaaactaaattttgaaggcatatgcaaattattctcaatagcttggacacaaactaaactgcttgcaaagtttcatcattacttcttccaaaactccattaccaagcctatttgcaaactccatgaaccaaacaccaaaattaatgtcggtccaattatgaacacccacgaccgaacggttccaacaagctcgagccacaggacattcaacaagcggatggaaaatagtttcatcatgtgtatggcaaatttgacaaacattattcacaacatatctcttggatagttgaacacaagttggcaatacaacaccagaaattgcactctaaactagattactaactttggggggaatttttaaatttcataatttcctccaatagccagtagcattgttttccgtccatccacctttaagctcttataaataaagatgagcaatttttacagtgtaaagactccatttctcaaacttccaagaccactaatcattcaccaaagaagaactcaattgtattgataatataagcttttgatcttttggaacaaaaagatttgaaacaatatccaagttccaatcacgtgtatatgttctcataaggctactaacagagttgtttatcagagcaggatggttaggactcacaaaggcattatcttcacaaggcaattaaggacactgcaaaatactagtagtagacccatcaccaatagttctcctagcactagcaagagctagatgttttgcttttatcacactgtgccaaataaaacttagaatgaaccccacagaagcttcaagaaacgaaccattaggataataacacgccttgaaaactctacgcaccaaagaagattttgaatgagtaatctccaaccctacttacccaacaagacaagattaaaattttgaagattacgaaatcccaagttgcacatatgcttatatcagcacatacagggccaactcatccaactagtacttctcctttgagaagaaccaattttccacctaaacattgccataagttgttccaactccttacatgtaacaagaggtaaaagaaagacacgcatagtgtagttaggaataatctgagcaacaatttttaactaaacctccttgcctgcacgagaaagcaatcgaccttcccacccttctttttttcagcttatcctttaagaaaccaaggataaatattttctttctccccatatcgtttggcaaacccagatgagttgtactatcatccacttcaaaaatatccatttggccacaaagttcatccatcattcccacatttgtgtcagagctgaaaaata

SEQ ID NO: 14604 - DNA, 9093 bp, Cannabis sativa
gtatttgtgaaataatcccattatgaaatgcaaaccatcttgaaaaataaaaaagaccattaaggctatcaaaaaagcacaaactagtaaagctttcttttaattaataaaaacatttttttatgttttatttatttataattaattttacatcctaaaatttttaattacaaaaatacacgttgttcagtaaaaaataaaaaataactctataaataaataaacagcaaaaaataattagaaaaaaaaattcatgaaaactgtaatataactataaaaataaattataaaataattaaaaaaataattgaacttttataaacctaataagtccgctccgaggccgcaccaccacctccggccatccacggtccaaatctctttctcattcgcttccagccgcggcaactccgtcagcgtccaagggcgtccaatcgtaatattacagtggggtttcatctttcgcttcagcccagccgcctagacgatctgctgatgacggtgcctccccatttgcagacgacagcggtgtaagctcttccccgtttgcagacgctggcggtgcacgtcaacgacgacgatctccctctcgcaaacgtcaatgacgtcggtgtgaaggttcctgcgatttcagccattgttccttgtcgttgattaaagagagtaaaagattggttcaagctgtttccgtgagttacagtcaacaattgattggttttagtttctgtttccgtgtgttattagtttttttttttttttgggatttagttcttttgttcttttattgaacaattggatttaagtttatttgtttcgttgaacagtcaacaattggttgctgtacagtgaacaattggttgatcttttattttttactattattaggttaattcctattaatattttaatggggttagaatttttagtttcatgtgttgaaactaattaggttttcccattagtcttgtcttttgacatggttctatagtttctctcattgggtttggtttattggtttctggcgttagttactggttcttggttttaggttcattcgggtgtccatggcgtcgagtagttattagcgaatggaggcggcggagaacatggcagttatttttatgctgaaatggcaggtgcaacctgaaatagatgaatttgttggcataaaagaagctttaaactggatggaccgtcatttgtggggacaattgattttagaaattgatagccaaattactttgtcatcctcttttggtctattagttcatgatgttcgtactcttctcttatcttttttgtttttttttgaaatgaaataaaacttcattgaaatttagcattcagaatacaaaaggtcctgaagatcaggaggtaagttctgagcatgaatgctacaaccagaaaagaatcgagagtgcctagccacatagtgagcaactcgattaactgatcgtttaataaaattaacaaaaacatgtggaagataggaaagtaaatgtttacaatcattgacaaccaacccaaaaacagaggacatgcgatgagaggtacgaatggcctgaacggtgagcatactgtcggtttcaatctcaactttatcccaacccttagttttgatccaactaagagcttccttgacacctatggcttcaacaacttcaggtgaaaacgacccccgattgcatacggcttgagcaccaaaaaaaggcctaaggagttccgtgcaacaatgccgtagccataagagccttccccttcaaagagagcatcgtcaacattaatcttgattgtattagatgctagtttagtccattgctcaaccttagagttattggtttcaagcgccaatgacaataagttttttttatcttgagctttacgccattgatcaagaataactaatgctgatgtagaaacttgttggggagaagatgtttttttattccaaactaggttgttgcgtgctttccaaattgcccaacacaacatagcaattcggcatttaaattcagtatcagaagtttggaatatgttgcagagccacatacctgctgttgtattgggagcagtatctaccgtgggatgtgcataatcccagcaagaacgggcaaaggggcagctgattatggcatgggagaccgattctgggtgatttttgcatacagggcagcttgaagaaatgtctacatgcttggtagtcagctgtaaacaggtggggagaacattcgaagcaaccctccacaagaaattcttgactttcagtggaatttttagctgccaaagtgagcgccagaacccagaattgtctgcaccagcttgctagtttttcggtttctgcagcaaaaagtaagcactttaaactgagaaagtgccattactttccccaatccaagaccggcagtcctctccagcagaggcacttagaggcagcccaaaaatgagagatgcatccctcaaattaaaaatatcagtaataacctcacggtcccaggaagagttatcaacttcaaggagggaatggaccattctatgatgcaagctcgggtgagaggttgtgacatatgggttagagttatcgggtaaccaagggtgagagagaatactggtggtagtccctgaaccgatagtgcatctggcaccaagtttaacaatgtcttttgcttgccatatacttctccagaaaaagctggggttgttaccaagttcagcatcaagaaaattagagcggggaaagtatcgtgccttataaacttggctaacaagagaatttggtgaaataagaagccgccagcctttctttgctaacatcgcaagattaaaatcatgtaggcgacgaaaaccaagtcctccaaagtctttgtgaaccgccattcgatcccatgacatccaaatgataccattacccttactagatgttgtcttccaccaaaagttagccatcaatgtttcaatctcattacaaatcttgaggggaatgagaaagacactcattgcatacgttgggagggattgaattaccgtcttgagaagtatctccttaccagcacgagatagaaatcgaccactccagctgtttatgcggttcaccactttatttttcaaaaagccaaggattgtagtcttcttcctacccatggtattaggtaggccaaggtacatgctatggtcatcagcttcagtcatctccaatgttgaacatatttgattctttagcatttgatcaatcttgggactaaagaaaatagaagacttattaacattcaccttttggccagacgccacttcaaaagtatgaaacagagtacgaacattcagggctgcagcattggtagcttgacaaaacagataactatcgtccgcaaacagcatatgtgaaatcgcaggggccccattagcaacacgacaaccttgaataagttgattggcttcaaattttttgatgattgaagagaacccctcagcacagataatgaagagatatgtcgaaagcggatcaccttgacggatacctcgagttggaatgataggtcccatggtgtgattgttgtgaacaatagtatatgtgaccatagtaacacattccataacaagtttcacccatctctcagcaaatcccatacgaagcatgacagcatgaaaatagtcccattcaacacggtcgtaagctttactcatatcaagctttaaggccatgaacccttttttccctcttcgtttccgcttcagatagtgcattagttcaaaagccaccatcatattatctgaaatgagacgactaggtataaatgcactctgagtttctgaaataacatcatcaatcaaagaacacatatggttggcaagaactttagcaccaattttgtagacaacattacatagagcaatagggcgcaagtctcccatagtagagaaattcttctttatgggaataagaaccagattggtagtattgtattcactaggaaaagtaccagtatcaaagaaatcagagactaatttaatcaaatcagtaccaacaatatccgagtgatgttgatagaaacccggtcccataccgtctggtccaggagctttatcaggatgcatttggaagagggcatgcttgacttcctcagcagtaatcggactaagaagctcatcattgtgttcacgcgttacagaacatcgaatgttctcaaccacactgttacaagaagtcccagcagcagtaaaaagattagaaaaataatcagcaataatcacattcagactagaatcccaatccttctaaacaccattcgggtcttgtaatctcagaatttggttacctcgtttcctagtgctggctgaggcatggaagtatttgctgtttttgtctcccgaatgaagccaatgttgcttggatctttgcttctagtaaagttcttgttgtgccaaaatctcaaaataattttttttttcttcatcaaattcagcagtagcaggatggattgttgaacttttcatggcagccattcgagttttgcttgtattcagcctgtgtttgaaattcccagtgagttcgaacccccaagctctcaaagtgttactgcaatgatgaattttaacagctagagtagaattagcattaacctcccagcagtttttcacaattttcttacaatatgactcacgactccatgcgttttcatatttaaaaaattgaatgtggttgcctcggttacttacagcaggttgcagaaaaatgggagtatggtcacttgaagaaaaatcacagttggataaaatggcattggggaaaagatcaagccaatgttgggttacaagagctttatctaaccttatttcaacatgatgagtagtccctctccctcgttcccatgtgaaggcataaccgtgaagcttcaaatcgacaaggcagcaatggcgaatgacatcttgaaagccattaatcaagtatgaggggtagggtcggcctccttgtttttcttcttgagaagcaatgctattaaaatcgcctatgatacaccaaggcaaagtcgagcaaggggcaatggtcttgagcaattgccaggtacggtcacgaagtgttcgatttggttcaccatagaagcccgtgagtctccattgtgcagaaccaggagagtgaatttcaatgtcaatgtggttgtccaaatatccaagcagatgggcatcatcagtatttttccaaagaagagcaaggccacctttcctcccttgggcttcaacaacaaagcaactatcaaagcccaacttagtttttatacgatccatagcatcttttttacacaaagtctcacataggaaaagaaaattgggtttcttttggacacaaatgtctgttaggaattgaatagcccgtgggttcccaagcccacgacaattccaactaagagtattcatgatgagcggtgggcctgaacaccagagcccaccacaaaatcgttttttggcatctcctcagtatttgcaggaataccaatatttatctcattaacttgttctatatcaaccatatttgccacatgtgaattcagtatggaccccttctccccacgttttcttttaaggtccaatatggtaagttcatcattagacataaaggtagaatcattatcattaattacaattgatggaattgtttctccattacccccattgactgaattgatatcaatatccctaacatcatgcatatagtcagctgacactgtattatcaaaataggcaaatttaccatgattggatactgaattgaatgccgccttgaattgtggagaagtattaactccacgatcactgtcttcaccgtcaacgacactaggctgagcagcttgttttgcagaacgaagccatggagatgcaaccaagaagttctggcgtctggagggagctttcatgtcgatgctatacggtttctcaatgcgatccgggtggagttcatacagttttttgcaaaaacgttcaaaatgtcccattataccacatataaagcagaaagtgggtactctttcatacttaaaattggcatagaatgtttcccctcttaatcttttaaacttcattcgtcttttcaaagggagatatatattcatcctaacacgaacccgtagaaactctcgccatacacctttgaagttattgggatcggattcaagaaaagacccaatatattttccagcctgacgaacaacatgttctgttttgaacccaggttgcagatcgtgtatctggacccataagtcaagatggttaatcggtttggttcgaggattatcacctggctttaatctctcaagaagcaactgtttgtgatcgtaagtccaaggactaccagtgatgaccctgtcaatatcaatttcatggcagaattggaatagaaatcggttttgctcaagtatttttacatacatacctttccctggtttccacaaatcagcaatgatattttgaaacacttgatagtctgagattttcccagaaaggagtctcccaataagacatcatccgtcatcgtactcaacctcatcagattcagcttcttctaactcagtaacaaactcttcttcttcttctaaacagatattggctcattgtttctcaacatcattcataattctactgcttgaggccatagtaataagacaaacactccaataagacaaacacaacactcaggaacaaagcttacagataaaaattctcataaacatacaaaactcccaatcacagagagacaacacacatgtcaaaagacatgacttatttcaaccacactcgtactcttctcttatctttaaataatattgagttgtgttttgtcaaacgatttgcaaataagctggctcatgttttagccagggattcttgtttctcttcaggtcgtgtgcttcaattggagaattgttccaacgaagtgcgttctattgttattaacgattgctagttaataaagttgctaagtttattcaaaaaaaaaatttaatttttaattgcagagatatttttataataaaaaatttaaagagtaaaaataaaaaaaatataattatattacgtatttttgtaattttatttttttaatttttggtcaatgtaaatttttctttagtaaatactataacaaaggattaagtacagttattacatattgatataacaaaaatacaagtattacatctaatttgcaatttgttttccttacgaaagaaaaaacatgtagtttctttctgaacaaaactacgcgttttagttggtggtcgctttcatacaaatattaatcgatgttgagctacttacaattacatctcaacaacaaactaaaaagaaaaaccattagtgggtgaccccttccaccacaacctttgtctaaggttctttataaatttcttattttgttcttccttatgttcctttttttgttttaattgtttacactggaaacttatctaagaatatattttgaaaagaattatatctttggtttgaagtttcttccaccatcattttgaacagtttcaattctattatagagctataaagttgagagtcttttatagttgcttagtgtgcattataattgtttgagtaattattttataacgattaattctgtaaaataattatatgtataaaaaaaggttattttattttatgaatattaagtcaacaataagttaataacattttaaaaataaaccttcatttagtaaaagtcttggaaatggtccaaatccgattgttggtagagtcataattcaaactgaatggttcaaaccaatataaaaggatttgggtagtttttttcgtttaaaggtatgtcatagaatacattttgatatacttttgggtccatcactctaaatgatgattttattaatttatccttacattttttgggaaacacgcttgtctgactgagcataactaataacataaaagccaatttattatcagtgatctgtgccacctgtttggaaaaagtcctctgtgtgagaatataacaaagctttttcagcccagcaaatttactttctgtgattgtctttcttcttcttcttcttctaattcacagacaaagttcatcagaaaaccaatatttctggtccttgaagaagctatgacaaaaagcaaaattttaaatcacttcactttgttgttgatccttataatctacacctggtttctaaagggagtaacctcagaagattacatagttggtgatggtgatgaatggaacagccaaggcaactttttaacttggtcaacaaagtacaacttcactgttggtgatgtgcttggtatgatctttttgttttaaccctttaaatgttttattccttaaaaattatgtctgctatcatcttctaaaaacaagagtaaaagcagaagtcaatattgctttgacagagaaagtaaaatctaaccaaaccaattgctcctgaaaaaaacaactttgcttggattggaaatcaaatgttttttttttcttgttccacctaagatattacatgttatgtagttttcaagtacgtaaagggacaacacaatgcatatgaggtagatgagaaaacgtttcgatcatgtgatgcgagcagcggcgtgttgacaaagtatgagagtggaaatgataaagtcaaactcactgaagccaagaagtattggtttatatgtaatgtatcaggccattgctttggtgggatgagatttagcattgatgttaaacaaggtaataatccctcttctgatgataccaatccaaccacagatggttctccaacttctcaacctgatgagctgccagcagttccaccttccagctctagtagaagcactttgtccagtgacacttggaaaaatgggatttacactttggtatttgtgatcttattcaaattgttttattaatgaaatcagcaagttttttttttcttgtaattgttgtgcatatatagtaacattctttcagttcataaaacaaccactgatctttagcttcccaagatttgtagacagtatggtgttggggaagttagtgtatgatggctgaaagctatgtatttggtacatttatacatacacaacgcacat

SEQ ID NO: 14605 - DNA, 7097 bp, Cannabis sativa
aacatggtattagagctacttgtgatccattgtgagcctaagttgccaccggtccaaaaagtcgtttgtgatccgttgtgagccaaagtgctgctggtccaaatagatacttcttctgtctcccatttaacctccattgtgtgccaatttctagtgttgaggtatttgacctgtttcaaaatccataaattttccgacatgtacacccacaaatttcctaatatttggccttgtggaattctttcaaatgtcacgttcgggcctgtagtctcttaaaggtcgttcgttatacccacactttccaggcccaaacgtgaggagggtgtatagagttagtcacacattattaatgtgttgaaataaattgtgatatataagatgaatggactactcctcctattgccaattagttttggaatagaacctcattcatcttatccctaaattctaacacaaggtgatatattattgatcaatatcatattggaacacataaaacagttctttatcatatagaagggtcttcttaatttgcataaatcaattgctaaaaaccttattaataataaccaatttaatctctgtatgatgccacagaatcaccacatttatttttccctacataattttttataactaattagtcggaaaaattgatgtatcaaattttaattttctataattaatgtgcgaaaacgtgattttttttgcttttattgcattaactaaaaatttgaaatggaaaaaatgatgaaggctttcaattgttcggagtattttatacagttaatcatggtatgtattcacactcttagatttagtctgatgattaatgggaaaatatatgattattttttaagctcgaacatgtctcgagcaaagagacccaatgtctccattaattgttatttgttcttgtatggagtgcttgtcactaatcatgatgaaagttgggagctgagaagggtttaaattccatgaaggatgtcgaggcttgcaattaaatcatttgtattttgcagatgatgccctgctattttgtaatgaagacttcaaatcgatctatctaatgctatagggattgaaattattctctcaatatcattaggtctctttctaagtgaagctaatacgtcagtaatttattgttgtaggatggaatagagggagatatagagagtcctgaatgcatttagatttatgttaagtagcatgccatttaggtattttgggatctcgatttatgttaaaagactttcagctaataattgtgcaggtctggttgagaaaatggtggtcaggatttcaacttgagttctaggaatattttctatatgtaagaagaaattataatcaatctgtgctagttttgattcattcatattgggcccaaattatgctccttcctaagagaattttgaagcaaataaaaaatatatgcagagcttttctttggaagggagtgacagattattgggggtcaggagttgtttcttagtcaaaattgtgcaagccaaagaaagaagggggattaggattttgaaaggttcttcattattagaaccaagcaactttgggaaagtatgtatgggcggtagcaaataaataagacaatctatgggttagatgtaagcataatgcttacttgaaatgaagaagtcggtggattatgagtctaccaatcaagaaagttggtattggaggcaaacagtgtgagtaaaaaataaaacgaagcgatacatgactgaacagtaactgaagcaatggaagtactctattagtcgtgtttatgatgttgaacctagtaacaaaaaatgttaagtaatatgcactagtgtgggatagatttaatacccccaaagcattgttttattctttagttagtgttgcttgatcgtttacagacaagggaaagacttcattgtttcaatatttgtcaagaggaagtttgtttagcttgtggactgaatactgaaaatatagatcatttgtttatttttgaatgtatctagctagtagaagatgtctatatgagattagaggttggttggcgtagttctcatttaagattaacactacaaaaaatattatttttaatcacaacaaaatttgtgattaaaagtgaaaaaattatgactaattataaataattatgctcatgttgtgactaaaagatccgtggctaaagatgttagttacaaaaattataattcgttgggactaaatatatttttaatcacaatagttattgtgactaaaactaaattagtaacaacttgtatctaaatattgtactatgttttaatcacaagtaacatttttttacgactaaaagtcacatttagtcacgaaaaaaattatgttatgcctaaaaaattgttactaaaggtagcagtattttgtagtgtaagcttgggtcgctgctgaagtggacttcccgaagatgcctatctccattcaagaaatttttttttccatggctattgctacaatgttgtatcatgtatggctgaatcgaaacaatgctttgtcgtagcagaaagtgtctacaatacctgttcttatacattgtctacaatacatagcgataataatgtcatcaccatatgtgtaattcttttgggattatttcacaaatacacaaaaacaacaaaaaaagattacaaaaatatagttgtacggaattttaaatatttttatgatttttatgattttatttacaaaaaatacaatcttttgatgtatttttatgttgtactcttgttaattgtctttttttttttttttggtggttacttgtatattattttttgttgttatttggatattattttcctattacttttatgtagttttcttgttgttttcgtgttgttattatagaactccgtaaaattgtaaaaaaaaaaaaagaaaaagatttgaatgtaaaaattttacaaaaaatatagtgcttgtaattatctatttcttttttagggtataataagcgttaaaatttacgataacttatgattctaatttaataccttataacaacaaaatatttttgatgtttgcccaacaacgacaaggcttactgcaacaacattgtagtgacgacatatcatcgcaatagcttatagtgaccaacttttgtcctacaacgcgcgactttccctctttaatttcctaatttctgaaagtgtaaaatataagaagagtagtttgtcaaagtgtcccacaatcataattacatggtgactcttttgttaaatatgtattatacaattagcatcttctcttattatgactgaatagtaaattgaattgtgtttctccttatctagttcatcttctatgttatttcttgcctaatttctttcttttttttcatttttctagtggatagtatcacttggtagtctttactcatcatataacgattttttttctttctaaattcatgttttcatttttggaatcattatagaatatagcatatatgaatgtatgtcatgtaaaattcgtatatctcttatatatatttctatatatatatataaccacttattttatagtcttgattcaattctaattataatattatattccaaaaccactagagcaagaatttgatacatgcagaatctgtctgatttgttttttatactttttcccagattattggtggttcccaacttcaattaagggaatctacttttgttaattatcataccaaacgtatgtgagataatggaatttattcagattctaagcagcaatataatttcaaactggtatggcataaagaatttgtacctatataagattgttaggttagtgcttactcgaaaattgttcatgatgatgtggacatcaatatttagcaagtgacaagaaagaaaatatttacagagttaactttctcaagtcatagcagtcactttgggaagggtccctagtcctgcgcccaagttcacttcgagagatccataatgggtatttgaatcttgtcaagttgttttcaagtcaccatcctttagtattctgaaccaacaagtcaagaagactttaagttgtaagcctaggagctgaaagatgtcaatttggcatcccgaaagcaaacttgggcacccatggtttcactcgatgctaggggcagagctggccaagacttaattattagcagggccaactattaatttttatttgaaaaaatctagtgtaccctagctaaaaaattctttcaataaattttttttatctattttgacatctaagaaggtattttagtccattttttttatgaccgcgtactttgtaattttctcatactacctgtaattttttaaaaaattctgaataatttatagtgccgaaaataaagtttaaacaattacttaccacacatattagaaaaaatagtcacgtgtgtaacaaaatttttgaatcttattttcggcactgtaaataaattaagatttttcaaaaaatttacagatgattctaaataaatacaacctacataatcatgaaaattatttgaactaaaaaaaatttctaaatgcaaaaatagattaagggtgtactgaaacagtcattttagaagatgtaatatagaattacccagaaataaaattttctctcaagctctctctcttgcagctctctctcgagctggtgctatggcgaaaacaagagctaaagttcaggggaagattcaagtgtctgcgaagaagaagaaaaaaggtcctaactctacagctgatgctaagaaaaataaatctatggaagaaatcctgggggtggaaccaatggaattcactgatgatgaagaagaaggagcaggtgtttatgatgtagcagagtctgcttctcggcgagaggtcatgccagatcctttgtctccgagatcatctctgaaagcaatactttagcaagatattcgatctgatttttctcatttcatggaggcaaataagaattgctctgtccagaggagatacaatgacgcccccaattcttagatctgggaacgtggtgagaaacctagaaaatacttttgagaagtctgagaaagagaaggcagtcaagattactatggaagatgagatagcttactggaagtcatctattgtttgttatgtgctaggagccaatccgccattatcagttttggatggttttgttagacgcatatggagtggaaagatcgacaaggtcggactactgtcatatggggtgttcttaatcagatttgatacaatggagcatcgtgatgaagtgctgaatggtggctacatattctttaataagagacttgtcatcatgaaggcgtgggatccaaatactaacttcaaaaatgaggatattcgtactattccaatttgggttcagcttacagatttggagttgaagtattgggggcaaagagctttgttcaaaatcattggccaagtaggagaacctattatggtggatgatgctaccaaagagagagacaagcttagctatccaagagtcctcattcaagtgtccattcatcaagaattcccaggtactatctattttgaagatgagcatggaaataatatacctgttgaaatcttttatgagtggaaacctataagatgtggaaattgtaaaggaataggccatgccactctggattgtcgtaagaaagaaagtttgaagcaggagtgggtggtcaagaacgataaaagaaaagctgaagaaaaaccaaaaccagcaccaagggagttccaagcagtaaccaaaggctggaaaattaaagcaaaagaaccaattacaggaccctctacatctaattccttccaagctctacagggtaattctcttatagaagaggctgtaacataagtgtcagaaaggtcactccagatgtaaacagtgaagacaggaggagggagagatcctcctcttctcaatggataaaatcatctcctggaacgtccgaggaatcaacagccagcaaaagcaaaatatggtcaagcattttattgctattcaaaaagttggtttggttggtctccttgagacgagagttaaggctccaaagcttggagccttatatatgaacatgttttcgggttggtgttttactactaatttggcttggcataagggaggaaggattatcttagcttggaatcccaatcagttcatagtgtgtatcctgacttgctcgagtcaacttatccacattcgggttacaacttttgatggtaaatatcaattttatgcaaccttcgtatacggatttaatgatgaacaaggaaggcaacaattgtggcagggtttacaaggtctttctagtactgatccatggatagtattaggggactttaatgacatccttcataaggaagaaagaataggtgacagagtaaggtatggtaatttgaatgcttttgcagattgtgtttctagctgtcaccttaaagacattaaatactcgggaagttttttacggggagtaataaacagaatgtagctgatagaatttattccaagattgatagaattttggctaatgaggcctggatggaattattggcaactgcagaagctatctttctcacagaaggcttgtttgatcatacacctgtagtggtttctatacaccctgctatggagagtggaaggaagcctttcaagtattttaggatgtggtcttcccatcctaattttcagcagattatcttggcagtttggaatcaacatgtgcagggcataaaaatgtaccaggttgttaccaagttaaaagctcttaaatcttccttcaaagagctaaacaaatgtcacttttctgacattcaagcagctgatgttaaatctaggccagatctatttgattgtcaaaccagactccaaaaagatccattgagtaaagggttgcaagagcaggaggctgattctaggaagatatatgcggatgtacacaaaaactactgctctttcttgcaccagaactcgagaatggcttggataaaggatggaatgaaaattcttgtaacaccctaactagcataggcgtattacgtgatctttaaacatactgtgcagctcgtttctaatcaacgaggtttatggaa

SEQ ID NO: 14606 - DNA, 5980 bp, Cannabis sativa
ttaaactttatattttttaaaatttattgattaaattttttattttattaaatgataaattaaattttatattttttaaaataatacattttgttaaaataagagttaataataatccgatttagagttattataataaatttaggtacattttttattattgtttatattaaaaattatattcaagtagttatattaaaataaattattaaaaattaagttttaaatattttataccattttaaaaaataaatagtctaatttattattttataaaataaaagatcctattaataattttttgtaaaaaagaggtgaaaaatagtattaaccctttttcttagtctaaatactaaaacccgccaaagaaagcgagggacccaaaccaaagccctcgccttcgataagctcgattcttcaaattgatcgaattgagtttaaattttgacctaacaatggagacgtggatgaatttctatcctagctgattcaagtttctagtttcggtaacttttgaaatttgttgttttttttttttttttattgttatattcatgtatgtatacgtatataatacctgtttgggggtaatatatatatgtatatgtatatgtatatttatttgatcaatgtcatgtttcttcaatatttgtgtaaaagatggaacctttacgtgttttaggtatgaatagttgaatgctttgaaaatttgtacaatttcaggtgctgatttcgtgtatagtaatgtaaaatgattttaaaaaattgagtgaagaaattgatttatatactatggaggaagacgaagacaggattctgttgggtagtttgggtataacgtcggcgaatcctgaagatattgagcgtaatatattgtcagaggtaatatactgttcgtgtttttgtttactttgatgaaagttattgcattgtaaggaaagaagtttgctttagttccttagtagtcacttattagtggaatgtgatccttggtttgcttgaatgaacgttgaattgaatgctgattcttaatcatcttgaattcactagtttttgctcatttttgagtaggtgattaagaaaaaatcaatatttgatatgatgtaaacaatgcgtgttaaacataattctgctaagggaaattggtgatattaagtaatgagtgaatttagagcaaatatttgcattattaatcatcctgaattcacttgtttatgctcattttcgagtaggtgaataagaaaaaaaaaatcaatatctgatatgattcaaacaatgcgtgtcaacatgattctgctacgggaaattcgttgatattaagtaatgagtgaatttggagcaaatatttgcattaataagaacattgttgttgttgttgttggttaatgtgttattggaaaattgttttgaaattttttttggttgacaatagtgagtgttcactgtcaggcgagaaaaaatgaagggaacggtagtgaaattggacaagacactgataagaatggtcttgagagttcagaaaatgtagatccatcatcttcaaaccaggcaaaactcttaagtaaattgagagctgtagaatttgaaatagatgctgttgcctctactgtcacacaaggaagacatggtaatgaagatgatacttatgatggtcatgaaagctcgacgtttggggatacagggagccctaaagaatcacctaatgatttagatgttcatcgtgctttagctactgatcggttaaaaagtttagagaacacaaaagctcagatcaagaaagagatttcagatttgcacaagaacaaaccttccaaaggtattgctcatgacaagttaatatcgaatattgtcaaggaagagtttaaacacaaaaggaagtcgaaagaagttccaacaacaagcaaaacttcaaagaagcggcttaaagttgtctcctttgatgaggatggtgattttgatgcagtcttggatgcagcttctactgggtttgttgaaacagtgagttcatatatccaacactagcaaattgtcttttctttttttcttttttcagaagatacaacagacatttcatgtttgcaactttacactaacattatatactcctgatatgctaggaaagggacgaattagttcggaaagggattttaactccttttcataagctgaagggatttgaacgtcgtcttcaaaaacctgggccatctcagaggcataatgtatccacagaagaaagcaacaatgatgattctgcttcaattagcattgcaaaagctgcccaatcgatggttgaggctgcacaagctcgcccaacaacgaagttactcgatccagatgccctaccaaagcttgaagcaccccctcgtccgtttaaaaggctcaaaaaacctataaagattcatcaatctctagataatgagccagatagaaagaagaatcgcaaaaggaaaagtaaacgtcctctacctgacaaaaaatggcagaagcgtatatctaatgaggatcgaaacttggaggaaagtggtatgtcagttgtgatatgcctatgtgattgaactatttatcattgtgtgaggcaagtttgtttattttgcagaagatgtagaagaaaagtcgtctcattcagatggtgaagaagaacaggaggaagaggataccgaaagtgaagacgatgatggaactccatgtgtagtccttgaaggtgggctgaagataccagagaaaatttttgaccaactctttgactatcagcgagtgggggtgcaatggctatgggaattgcattgccaaagagcaggaggaattattggagacgagatgggccttggaaagaccatccaggtcttgtcatttcttggtgctttgcatttcagtggcatgtataaaccgagcataattgtctgcccggtcacacttttacgacagtggaaaagagaggcttgcaaatggtatccaaaatttaaggtggaaatacttcatgattctgctcaggatctaaataatagaaaaaaacgatctgactcttatgaaagtgattatgatagtgaaggttcattggacagtgattatgaggtaaaattatcttccaaaaccactaagaaatgggattcattgattaatagtgttttgaggtcagaatctggattgcttattaccacttacgagcaactccgtatactaggggagaaattacttgacatagagtggggatatgcagttttagatgaaggccaccgtattcggaatccaaacgcagaagttactctggcttgcaaacagctccagacagttcaccgtgtaataatgacaggtgcaccaattcagaacaaactggctgagttgtggtctttgtttgattttgttttcccgggaaagttgggtgtcttgcctgtgtttgaagctgagtttgctgtccctatatctgtgggaggttatgcaaatgcttcaccacttcaagtatccacagcatacaggtaacacattgcaatatctctgaaactacggatagttacagatatctatttatggggtttttcagtgtgatgtggttgtgaactgtaaatcttgagttgaaaacttgtggtacaggtgtgctgtggttctgcgagatttaatcatgccttatctccttcggcgcatgaaagcagatgtgaatgcccatcttcctaagaagaccgaacatgtcctcttttgcagtcttactaccgagcagcgatctgtttacagagcatttcttgctagctctgaggtggaacaaatatttgatgggaacagaaactctctttctggaattgatgtgatgcgcaagatttgcaaccaccctgatctgcttgagcgggaacattcctgccggaatccagattatggaaatccagaacgaagtggaaaaatgaaagtagttggccaagtgctcaaagtttggaaagagcaaggtcaccgtgttcttcttttcacccagactcaacaaatgctggacatacttgaaaactttttgatttctaatagttatcaataccggagaatggatggacttactcctgtaaaacagagaatggccttgatagatgattttaacaactcagatgatttgtttattttcattctaaccacgaaggttggtgggttgggaacgaatctgactggtgcaaatagggttatcattttcgatcctgattggaacccttctaccgacatgcaggtattgtgcttgactcgattctttctttctttgtagatacataaaacctgctagagcataccaatttacaacttgtttaactgtgaacaggcaagagaacgggcttggcgtattggtcagaagcgagatgtaactatatatagactcatcacccgtggaactatcgaggagaaggtatatcatcgacaaatttacaaacattttcttaccaataaaatattgaaaaacccacaacagaaacggttttttaaagctcgagatatgaaggatctgttcaccctaaatgatgatggacagtctgggactactgagacttctaatatatttggccaattagctgaggatgttaatgttgttggctcaagtaaagatgaacaggataagcagaaatctgtcaaattcgatgaggctttagccgatcaaggaaacaacatagaagcttcacctaaagggaaaaaagggaaaggaaaagctgatcttagtgatggtgatgaagaaggtgaaaaaaaggatgaagaagcaaacattttaaagtctcttttcgcccatgggatacacgtaagaatttatgctgttttcatcaatctgatcacgacgttcgttgtttcattttcaaagctccattccccttaccatcttttgttttctcttacagagtgcagtgaaccatgatgcgattatgaacgcccatgatgtagaaaagatgaggttagaggaggaagcttctcgagttgctcaaagagctgctgaagcattgcgccaatcaagaatgcttagaagccgtgaaaacatctcggtcccaacatggactgggaaatcaggaactgctggtgcaccctcatcagctcggaataaatttggctcaactgtgaattccaagctgatcagtagctccaaaccatcagctaatggaatttctgctggtgcatctggtggaaaggcattatcttcagccgaattactagcaagaattcgaggaaaccaagctagtgccgctggtgctggaatcgagcaacagttgtccactgcttctaatgttaacagaggaaatgttggaacctcgagatcaactaaaaacttgtctagagttcaacccgaagtactaattcgtcaaatctgtactttcataacgcaaaaaggtggaagtacagattcgggcagcatagtgcagcattttcgggacagaataccatctgaggatcttcccttgtttaaaaatcttttgaaggaaatagctaatctcgagaaaacatcaaacggttcggtttggattctaaagccagattatcaacactaaaatatttgatccttgttactcaattttgtttcttcctaggatcttattagccttaggagacagagtagtaaggatatgattgttcttcatttttggtgctttctagcacatcttgtttaaattaacagagccaagttaaacaattgtctttctcttgtacagatttttctatgtatttcaactcttaatatcgaaaaaccgtcttgtatagaaaattttagaccctattggttttagaaactgagagaatttgaagtgaaacatatagttgtagactttgtagatgtcgtttaaagcataaacttgtcgtatttgatactattaagatacgttgttgtgttgttaaaaagggcttattggcccaaattactgaatttgtgaagtattgtaatgtttccaaactctaattcgggtgcgatcataccagcactaatgcaccggatcccattagaactccgcagttaagcgtgcttgggcgagagtag

SEQ ID NO: 14607 - DNA, 6831 bp, Cannabis sativa
  modified_base (50)..(54): a, c, t, g, unknown or other
aatagaattataagtatagtttagcagtaattaatccaattccctgtggnnnnncctcacttgcgtgagtatactacttgattgcgtgcacttgcgtagtaattaataattttcagcaacaagagactcatcaagataccgttgaaatgggaagacgagatgaaacgattccctctctctggaagaatattaaatctccctatgaaatcaataactagaaacaacatgttacgactggctacgatggcgggagaggtgatagctattcagaaggaagaagtggcaaagatagctttgaatgggaatttttggttcaaagtgtggatttcaattgaccaaccactttgctcgggattcttatttcctagtgctgaaggcaaagtttggctaccatatagatatgaaagactcccattcatgtgcttcaattgtgggagagtgggacatgatttcaaggcctgtggtgaacaccctacaaagatcaatacaggagaggatcaaagttcggtagcctatggaccatggttgagatttgaagacactcctattcgaagtggagacaggaagccacaactggagaagatggaagcccaatcagaaaaataaaaacctacgggagaaacgtcatctgtgcaagagattaatcttgtgcctactattaccaataggaattctcagaaactgcaggtaacatcctctaaccctctgttatcttatgattttgagaacctaacacgcaggattaatgaccaaaacacggggatcaatggtggagaagatcgtggctctggttcaaagaaaagggcagatttcgaggccttcttaaacagggaagcgaatacgaatctgagtttgggcaaaagagttcactgggaagaaggtggaacccaacaggggctgggtttgaatttgaattttaatgaaatgggggaagaatggagagaggcgcctatctctattggtacagaggatgaattggggaactcgggctctaagagggataaaagaaggaaaattataccaaagagaaccaggaaggggactatcaatgcaaatcctccatctttgagcaatataacagacatggaaacaactaaggagttgacagggaaaaggaaggctccaggggacatttctagtttttctgatttgatctctggaatgaacttgaaagcggcaaacccagcgaatctgggtcgccgagagccatgaatatcttattttggaatgttcaggggcttgggaacccctggacattgaagaccctttgctcccatgttcaagatcatcatcccgggatgattttcttgtccgaaactagacttaatgagatcgctatggaaagaatcagaattgttctgggttttgaaaactgctttgtggtgccaaataagggtaaaagcgggggtttggctcttttgtggaaggacacctttgtggtgagtattaaatcatatactgtttcccacatagacgctcttgtggaaaatggtatggggttttcttggcgttttacgggtttttatggtagtcccgatccgagaggaaggaagtcttcttggcagctgttggaaagacttcgtgatttaattcagggtgcgtggctttgcggaggagactataatgagattatgctagaaaaagagaaaaaagggggaagtaggaaacctgaatctcagatgaatgaatttaagaatgcgatttccttttgcaaattcagggaagttcaaatgaaaggtggggattttacttggtgcaatgggcggcaatccaacctcgtctttgaaaagttggacagagtaatggcaaacccggagtggtttaaaagctttagatcttcaatggtgactctccttccttggtggaattcggatcaccgtcccttgctcttatgtccggattccaaaccgaaatggtcgacaaaaacccctaggtggaaatctaggttccattacgaacaagcttgggctggggaagaagagtgtaccaaaatcgtcaaatcgatatggctggataattctaactggggctctactcatggtataaggaagagaattaatcattgtggcgagatcctccatgattggaacaaagataaaaaggcagagttgaaagctagaacaaaacaacttaaaaaggacctcaatcatctgtccagctcggttgaagatgaaaactggagtgaaaggaggaaggttgaaaaggaactcaatgttatggaagcaaaggaagaaatgttatggagacaaagaagccgtgctttgtggctagctcatggagaccgtaacactaaatatttccaccacaaggcatcacaaagaaagaaaaagaatacaataatcggattatatgatgataagaagaaatggtgcacctcggacagagaaattgagaatattttggtcatcttctattcgaaactcttcactacttcaaaacctaatggtgacatgggtgacattctcaatcgttgtgttcccaaccggctctcttaccaagataatatggatcttcttgaggagttcacaagggaagatgtgagagaggctatacaacaaatccatcctctcaaagctcctggaaaggatggtctcccggggttattttatcacaaccattgggaggaagtaggagaagaggtgattactacatgccttgaagttctgaacagtaatgcagattgtgattctattaatgatacacttctttgccttattcccaagactaaagagccaacaatggtgggagaatatagacctttaaccctatgtaacgtcctctataaagtgatctcaaagtgccttgctaatagaatgaaacttagcatggataaggttatctccgagaaccaaagtgaatttattaaagggagacaaattcaagataacgccattctcgggtttgagagcctccattgcttgaagaaggggcggtttggaaatggaaagaagatggcccttaaactcgatatgtcaaaggcttatgatagagttgaatgggacttccttgaggtaatgatgaaatgcttgggttatgatgaacaatggatcacaaaggtaatgaaatgtgtaagatcagtcactttttctattctgctcaatggggaggctcggggtcatattgtgccggaaagaggtttgcgacaaggagatcctctatctcctttcttatttctaatttgctcggaggggttatcttgcctaataaatgaagcaagtcgggctaataaactccatggacttcgattcggtaaccttgagaagaagttaacacacctccttttcgcagacgactgcctcattttcatggaagctacggaagaggagggtcaaacaatatctgaagtattgaaggtatattcttccttatctggtcagtgcattaattttaataaatctaacctttgtgtgggcagaaatatctctaagaatgaaggcaaaagactggcgaataacatgggggttactttcactgaaaaccattccaaataccttggcctcccagcttttgttggcagaaataagaaggaagcctttggcctaattcgaactaagatttgggaaaagcttcaagggtggaagatgggtcttttttctcaagccggtcgtgaggttttgattaaatccatcatacaagctattcctgtgtatctcatgagtagttttagactaaccaagggtcttataaaagagattcaaactcttatagcgcgcttttggtggggatctactaaagataaacaccaaattcattggggaacttgggagaaactttgcaaagataaatggagtggtggcatggggtttagagatttggaggattttaatcaagctcttttggcgaaacaagggtggcgattggttataaatccggacagcttgtatggccaagtgttaaaggccctatactttccaaattctgatttcttcatggctaaaaccggttctgggagttcaaatgtatggaggggaatcatttggggaagggatttgcttataaaaggtttacgatggaaggtgaaggatggttcaaaagtgagaataaatgaagataaatggattccaagaggagccccattccgtctcagatctcgggttcaggttccagctaatacgtgtgtaaattacttaatcaatgaacatggaaactggaataaggaatacatagagaatcatatgcatagtgaagatgtcccttgggtattgggaattccagttaattcaggtggcgacgaagatgagattatttggcattataccttgaatggagattacacagttggtagtggttacatcctaactcagaaagagaagcaagaaactgaaacttctaataaaaaggaagtgcaaaactggtggaaggaagtttggcaatcgaacttaacccccaaaatgaaaaattttgtttggagagtgtgccacaattgggttccagcgaaaagcgagttggttaagagaggtatcaacatagatggaacttgttcgggctgctggaacaaagttgagacaatcgggcatgctctgtggtgctgtccaagactgaaatcagtgtggaaagctgctggtttttggcatcttttccctgaaagcctcgaattaatgaaggacctgatggaatttctgattttcatgaggaagaagtgcactaaacaagagtttgagacttttttggggataagttggatggtttggaaccacagaaacaagaaaatttttcaaaacaacaagaccccattgaagacttggatcccgtgggctttggatgttgttgctcataccctggttttaacagcaaaggagcagaagacgaaaaaggaaaaggagaggctctcgtggcaggctccccctcctggaactttttctttgaattgtgatgctgctttgaagatggattatgaaggttttgctactgctgctgtcattagaaacgagaagggcaatttgattgcagccacagtttgtttctatcccggttatactactgttctgatggcagaatgtttggccttgaagatgggtatcaagcttgttcaagatacagattctaaacctttcatagccaattcagacaacatcactgttgttcgccaaatcaattccaaaaaagctcccagagccgattagggtcaacctattaatgaaattttgtcttctaatcttctcaatgggtgcatgggaattcgatttgtaactagggatagtaataaggttgctcactctttagctaagtgggctttaaaacaaagatgtaattctttttggtcagaggttttaccctcttgtgctgctgcaattttaaatgcagaaaagcctgaccggttgtagttcttttgttggttgaataaaattttgccttcaaaaaaaaaaaaaaaagaaagttacaaccaaaaattaaactagtacaactaactttttaaatgtaaattattttgaataaaaaattataataaatttatttgtactaacataaatttatttattatatcttaggttttttttttaccatttcataatagtttcttctttgtatttttacgaaattctaagtagaaatttcgattgcaattaacggagcaacttaaatcgcaaccaaaatctgtatagaaacccacatagaaaccacgggagaaactaccttaaaaagccaaatcgtaaatttaaaaaaaaagttaaaaaataatatatagagcaatttttctatatttattaaaaatattttttttaaaaaaaattaatattataataaaataaataatattaaatctttaattttgttttgtttacaatatatttatattttcataattttatgttaacaaatcaaatcacgtcaacttagaatatttattttcttaaacaacttaaaaatttgtatactaatattttattttcaagcgataaaatataatttgaaaataatatatagtatttttaattactttttttttttattaaattcacataaattaacacttttaaaaaaataaacaaaattattaaaaataaaaattttgtattataaatttttatatattcatcattataataaattatattattattgaaatatttaaaaatttataccattttaaaatatataatttactaaagagaattgttaaaaagtatacttagtggctagtattttttttttaatattatataattattagtgtaattaattatcaaatctcatataacttaataaaataaattttaaccaatattcttaccaaacactacttatatatacattgatgctctgttgtttcctaaaatactgttaagtaaaatttttttttttttttttgccataactcagctgtaggctatagccagttagagccgctttttcttagggccacaactagtataataggagtgtataattgaaaagcgaatgatttaaggtgggtccaaactccaaaccgcacgattgaagggaagggaccgaatgagattaaaccatgtcaccctctattatattgccgcctattttggcaaacacaagtcaaaaatcatatctagaaaccaaagtatgtaatgttgcctttgattttcaaaacctcgtgaaaagtgtcttaaatttaggtgaaagttaacttttctaaggaacataatgacagtaataagtgctacaaattagagctgtaaaatattaatatattaaatacaaatatttatattcttttgggccaaattaactctccaagggtatttcattaaagaggaaattacactctatactctttttatattattctcttttaattttactttcttttttaaaatctatcatttttacctttttttctaaacattgtaccaattt

SEQ ID NO: 14608 - DNA, 2584 bp, Cannabis sativa
tacttaaccatattgttcaaaaatacaggtgaaaatgaagtaatacaatttaagaaaagacctataacttatctacagtatgaaacagaaagagattagaaagagaaaatattaatagtttacaactgcttattcaacttcagtcaaaatataaaaataagataaaatactttggtaagaaaataatgttcactaatagtcagtaacagaaaaatactactctcgagattccagatattttctccatgtttttttgctaagagggcttaaatttccataaagtgactaagcataatttaaagtagaaggatgtttattcaacacttgtccaagttggtaaaacctaaaaaagcaatagtaatacacgacaagactggaaatatcattaaaccactaataaatacgttttactcaaagaaaccagtattaagtccgattaaacatattcagaagaaagttttcaactttgaagttagtccaagtctgttcactatcacttccaagcaccagaaaattagtaccatgtacaaaattttcttcccaaaaaaaaaggaaaagaaaagaaaaggtgagagatgtggcaagagacagccataacgagaagattccatcattcccataccaacccacgaaaatcactaacttagactacttatcttttcagaactaccacacactccaagatctcaataaggggtatccaatcagaggacccacatattacccaacaaagaatcacttgaaccctattagtaagtatgactctcataaattcaatctctcctaaaagaaagggttatagtcacacaatccccacatagcaacaacaacaacacacacttaaatcgctcaccacttacatataaacatcaaaagacttcaacctgagccatgaaacaatcacaagataccttaaattcaaaagggtatccacacaaacaaacacttcccgtccattacatataaacaacacaaaacatcataggactccaaccatgagacaaaaaccaaggcctataaataaagcatgtcaaaactcaaaaagggaattgataaaaacacaaccttttttaatcccattacctaaattctccatctcatatttggtcttgctgaccgaactagctggccgtacttttccacgcttttcagatgagaaatcgattatgggaggtggtggtggcgccgacgaagatattggcttaggggacaaagccatagtgacacttccatctggtccatactttctaggcctacctctcttcttcttcaccggcatagttgcaggaatagcaacagccaaggttgttgttggcgccgcttgtggtggtgccgccgcagcagcagccgccggagccacggctggttgatgtgttgatccaccggtttgagatgggatttcagtcctcggagccacatggtagtccgagggagcatctgatcccaccactgtaaccccactactcacagcttctcttccctccatacttaaacccctctcaccccccaataaaaatatagtctttttctttttcagctctctaccaaaaactcattcatttcctttcctaatctcaaaaactcaaaagaaagtttgatgatttaaatgaatataaaataaaataaatttttaagcccagaatttttcagactttcaaaaaaaaaattaaaaaataatttaataataataaataataataattagatagcttttgataaataaacttctttttaaaaataaataaataaaagtattaaggatcaaataaacttaaactacaaggagagcttcactgtgagttattttctgctaaaacttgttttttcagggaagattagctgaaaaaatagagcttaaagaaaagataatagcttcattattattattattttctttaaaaatatatatatatatattttaatttttatttcagtacaggagagaatgagattttgaaaaagaaagattgcttcttcttttttttttcataggctctctgtaattttctaattttgtgtattgaatggaaaatgccaagataataataatgtttttgttgttcagctaattgggttcctactgtccgaatttaaaatacataataattaattaaattaataaggaaattaataaaataaagaaaaaaaaaattgaatgatgggcattaatgaatattgttgtggtgatttaatattttaatgttaaaaaatatagatatttgggttttggttggaatctggtgacttgtgagaaataatatataaagtaaaattgaaagtgggtggggattttcttattcttctataattttatatagtttttttgcttgaaaaatgggcaaaagtgaaataatggtaattattatttttattatttttaaaatatttttttaggtgaatggaaaagtaaaattaggttgccaaggcaagaagaaattgtctagaaaagggaaaaagatagggtggcctaaggcaagcatcacctttttggattatggcaaacataatcttgcataaccaaagataattaataaatatcatatctattattatatttttcttatgattttttttttctttttcc

SEQ ID NO: 14609 - DNA, 13796 bp, Cannabis sativa
  modified_base (2232)..(2235): a, c, t, g, unknown or other
aaaatgctccaaacatgatttaaattaaaccgaaaaatgtgctaaaattaacctaaatttaatactaaaaataacctaacagttctacaaatataatttaggtactattactttaaaaataggtaaatagcgatataagtactttaaatttcaagtttttaagttgcataaatctattttcaaaaaatagaaaaaagtcgcataaatctaatgtttatttttagcggcataagtaccaaatatttgtaaaattataatttttttctaatttcgttaacgcataccctgttattgtcttaaacaaagcatatataaagctcaaattctagatcattggatctagacaaatatatagtattagttactttcaaatgttcttctaataaattcaaaacggattttgtactaatgaaattgaaagaaaattatagttttataaacattgaatacttatactactaaaaataaatatttgatttatgccacttacaaacataaaacttttaagtaatcataagtatcctctattagtaataattaaacttaagtatgccacaaatttgaaaagaaaagaaaagaaaaagttcaattatttatttttattatagaaaaaacaaagggacccacttgcttctcctttcctttttataaccaccaaccaattctaattatacaacaatatctttttaagaagagaaaagaaaactcaacccaaaacagaacagaaaagaaagaaactagagaatgaagtgaacaccattatttatatttagcattagagaaaaaagaaagagagaaagaaatgggtgctgttgctgagtctatttggatgcatttacagttgcagcagcaccagcaacaacagcccatatataagaagaaacacacaacaaaaagtttgtgtttcagcccaaaaagtcttattattaataataataataataatggtgggaaaaaagtgttctttcctactaatacttctcttgtgtccttcaacaacaacacttctattagtgttgttgccaagttgagttcttccgccgctgcagaagcagcggcggtgccacctttggaattgggtgttggggagataaagaacaagtgcaagaagtggatgtggaagggtcagttttcgattaattacttggttgaaggagaagaaaatcaagaatcgaaattggaatcgaaatccaatcctcctttgcttcttgttcatggctttggtgcttcaattcctcattggcgcaggtatgttaatttctcatttagcttaaggctatgaataaacattgttacaaacaaacatattctcaaaaaagaaaaaaattgtgttcttaagataaacatattatatcgtattgtattgtacagtattatatgttatactataaaatttaactaccatctaatacagtgatataatgtaccaaatgaacccttagtctttccaaattgaaatgactccaactaagaggatgcacacaagaatcttcacaatatttttgccttatttctaataagtatagaagcttttagtgcttataatcttgaagaagaaacacttttctgaagcacccaattcatcaaactatttgaatgtgataacaaaaatttaaattacatttattttatgctcctaactgaaattaataatatattataacttgattttgagcatgagaagtagtgttggtgactgattttgtttcattctttggactcgtaaaaactttcccagagtgattgatactatcatattttcccttttgaaatgtgacaggaatattagaacattagcccagaatcatactgtttatgcaattgaccttcttgggtttggtgcttcagataagccagaaggttttccatacacaatggaaacatgggctcaggtatgtatgtttttccaatgcaaagattcatagaaataggggtttctcttttaagttttttttttctttcgggaatatactcgtttagtaccttgcattttattagtatcatgtatttttaatgatgctcaaatttaatcgataaagttttatcaattttatcaaactgctttcacttatatataaaatatagagtagtttggagcaaaaatacttaagtttaattttcggttgtaaataaatacctaagtcataattctgaaatttctgtaggtacctaattgttaagtgctaagtaaattgtacgtgtcaattcctgattggttcaagtcattaaatnnnnatttttttaaaaaaaaatagttaaaatataccaataagaaaatgagacgtggataatgacgacatttaacggtcagacacctacagagttccaaaattataactttagtaatattaccgccaaaaattaaacttaaatacttatttacaaacaataattaaatttaaatatttactgtaaattactctaaaatatactaaaaatgtataatttcaaaatacaatagcaaatgagtacacactctttctttttattaaattcataattgacttagtattttttgtaaatagttaatattagacttcttggatgaaattgtaaagaagccaactgttctagttggaaactctgttggaagccttgcttgtttaattgctgcctcaggtaggtaatgcttaatccaacctacaacttttttgatccaataatcataaccatttcattttttttttcataactgatgttttttgttccaactagaatctaatcaatcattggttagaggacttgtgttgctaaattgtgctggtggcatgaacaacaaggcagttgttgatgattggagaatcaaactattattacctttgctttggttagttgattttttgttgaagcaaagagcaattgcttcttatattttcgagcgtgttaggcagaggtattctatttcatcagtagtattgagaaaatgtcttgtggatatctaaaggtgctgacatgaatgaatctgattataacaaaaaattccaatgcagagaaaacatcagaaatattttgctatctgtatatggaaataagaaatctgtggatgatgatctagtagaggtactatttgattcttctgcatagccatgctcctcttatttattcatattttttggggaataattatggtataagtgcttaaagttttgagtttataaccggcacaagcttaatcattttttttagtgacattagtatctgaatttttatcagtatagactccgttagtgttttaaatagaacacatattaagtttagattctaaattattggctctggacggaaacatgtagtatcaattatttctaaaaactagatctgattataaatttaagacactaacagaatctgtaataatgaagctagatgaaaattacagttttattaacattggatacaaactcaaaactttgagtatttacgctgttatttacccttttctttttttgtgttcctaaacaattttctttttatcttaaaatgtagatcatcattgaaccgacattcgaccaaggagcattggatgcttttgtttcgattgtgacaggtccaccagggccaaaccctgtgaaattgatgccgaaaatctccatacctgttctgcttttatggggcaatcaagatccatttactcctcttgatggaccagtggggaagtacttcagtgccttacctgctaaggtaccaagcataagcctctttgttttggaaggtgtagggcattgcccccacgacgacgagcctgaattagtccacgaaaagcttcttccatggttggctcagcttcctgctttatcatcatgacagaaaaatctatgcaattatgatcaattgcctccccaccacacttggtgagattatgtagagaaacactctctttctatactgatatgtatatttttcggttaaactactttaaagtttaacagaaataaagaaaaatccaaaatttcttattctgaattgtgtttggaatgaaagggagactatgctgttatgcacaagttttgtagagcttatagcattcacttattcaattatatgacttgttaagataatgattgtgtaaagactaactaagcaaggctatttaaagataataattgaagaaaactcttggcaatttgcaatgttggagcttattgtgagagagagagacttgttatttatagaagagcaatgagtttaagatttatagaagagttgttagaacagaacaaaaacagaatacaactacttttgaaaaaccaaagctaaaactacactactctattatcactggtcaagcaaaaagggatagaagtcactttgagtttgagcttgtactatgtacaaatatgtcaatgactccatagggagaacttcgataaatagagctccttaactataatctgatctccgacaaaatgtaaatttatctcaatatattttgagcaagcatgaaatacaagattggtaatagacaagcttgataatcaacatgtagtgacatgaagatctttgagtaaagaacttagccacttgacttcaactaatgatgcattagcaagtagggttgtatatttagacccgaaaattcagcccactcgctcaattcggcccactcgtacccgaaaaataaaaaaaattggattttaaaaattttgggctaagtttaggtaaaacccgaatacactttgggacgggtgcgagtttgttagaaaaaaagaaaaattaccccatgtacgataagttatactttttttattattattttacgtttgagttactacgtggattgttagttgagttgtaacttgagttgcgatctggataacaatttaattaggttacgatttgaattgctgcatgagttgcgattagagcatttactgtaaaataccgtatatttgtaatttataccagttttaagtggatgcctttttagcatttctggtatttattttatgaaaagagttgagtgagaaagttaactaatctaaccaacactaactaccatatttaaactccaacaatccaatacaaatttgacaacacacacgtgtcatattcttataatgacacgtcacacccatcccacaccaattgcatgcatccataggtgtgtttaacactatactatatctcactcactcactcacaccactcacaaaaggcaaaagacataaaaaagcaaccacttcttcacatagactcatataaacttggcacttattcagtggcattttcgtaatattaaaccaattctaaggtcattttttattcttctattgcccccaaactccttttcaccctatcctcacctatctctctccccttccaaatctctctcgttcagattcaatccctaaaattaagaattatcaatttttctacaatttcttttctcagtaattaaaaaaaaaatccaattttgattctgggaatttctcgattaatttttcttttcccttcttgggaataaaaattcgattttgcagtttaagggatttgggggtttgaatgtgatttggtaaaaaaaaaaacaatgtcggaatcaaatcaagaggcgtcaatgtatggaagaggagccatggcgaataataacatgcatagtggtggtggtggtcatggggatgaagaagatgacgaggtgaccggtgctgaagagtccattgataaccctcagctccggtatgaagatggtggatgtgttggagccatgaacggcgttcaagatgttccttcaaatgttctctacgtgcccaactctgaatatcctcccgttgccgaaaatggaggctctgatcagcttactctatcgtttcagggcgaggtttacgttttcgatgctgtttcgcctgataaggtaaagattgcttcttctcctttggggttttttataatgtttttgaagtatttttctttaattcacgtaagaaagtttagattttggatatgggttcttatcaatttggcctgttctgtgttcttatttatttattttcatttttaacttcatctttttatggtgtttagtcaattaatgacttgaaaattctctccctaaattgggtttatattagctttttgaggaactcgtggataatgtgtttgtgggaaagaactattgatttagtatcttctatttttaaaatgcattatcaacaagtatatgtagtttgagggcttttaccttgtgttgattattatataagaaactttacactttcaatgtgttgattttcacaggtgcaggcagtattgttacttctgggtggatatgaaatcccttctggtattcctgccatgggtacagcccctcttaatcaacgggtatgtgtgcacatgtcttaaccatttccttctatgtttcattgttttgtacattgaggaaaggaaaaaaaaataaagagagaaaattggtcttcagagtctcttgtttttatggttaattttggagagaaatgcaaaggagagtgtagagatagtaagtatcaagtatgcaaatatttcttttgtgctcagtgtttgtctcataaagtgagaaatttgaagaaatatgaagttttctttgttagttcttatttcaagttcgtgatgttattagtttgtacatacttcttttgagaaggtgcatagttgatctaactgttggcattataatcattcgtctacaggctgtgaatcaatttgtttcaaagccggttcaaccacatagagctgcttctttaaatcggttccgggagaagaggaaagaacgttgttttgataaaaaaatccgttacactgtccgcaaggaagttgctatgaggtaattttttttcacatcccgttttgcttttcaatccaataagtaatggctcaaaaacacatcaggtcctttatatgaaattaaatttagttttgaaagggctgtgctgtattgatacgaaaggatttctcttcttcgtatttaaatgattgtgctgagataagacatagttttgggataaatttataattattattgtaagattttaggttgtattacaatgattgtgctgagataagtcataatttggaataaaatattaatcttattattaaaagattttagattgtattgtcgtaattacaatggcggtgtattcattgttaaatgcttagtatttactgtttagataactactacatccaaataggaatttgagttttaagattgcagcctctacacatttgtggagtgtcattccaggatcgtgcttgtcattcaacttgcgcgggtcaaaatctgtacatacagttttctccatgtttttctaatgccatattctgaactgataataaacgaaatgaagtaaagccaacttgttatatttattccattactatgctcatgtaatttgtgatttttaaatttcaagaatgtgctggcggcagcattctttatttggaaagattcaatacggtatagggacgttcaaatgcttattatattaaggaacagagtaacaaagatggaacttttagtctttaatgttgtctacttatgcttacaaactagttttagtttttagtatggaggctctaataaaatgtcttggataaatggaattcttattccaccaaaatgagtttgattgagctttaattataatcttatgtggctctttcaggatgcagcgtaagaagggtcagtttacatcatctaaggctagttccgatgaggcgggctcagctgtaattgtttggaatggcgcacagggctctggccaagatgagagcatgcaggaaacttcgtgagtctcaattagtttcttcatgttcatgtgaattctgctgaccatcaaatccatttatttttttcattcctcctgtacctgccccagggtgaaatagcccgggtttgaatagaaattgttctaaattttggatattaatctcaatcaccatctttaatgtaatctttaactcttttagttattgatctataacacaagcttaagaccttgcattgtaattttttcgtttaacgcactgtgcaggtgtacaaactgcggaactagttcgaagtccacaccaatgatgcgtcgtgggcctgctggtgcaaggactttgtgtaacgcatgtgggcttaagtgggctaataaggtttgtatagtcttgaaatgtgttttcctggttttaggtccttaataataagacatgaagattaaaataaacttgcatgaaaattgtattgattgtgttttgttaccaaagagtttattatcatgttaaactgtatttttcattattattttaaattatgtgagtgtgagatgttgattaatgtacaagtacgtttttaaaccttttattgatgttgtaatatcacgataggttagttcatatggttacgcctataggcttgctcccatgaggtctgagaatcgagtctgtctctagctggttttttggtgtgctacttatcatactatgtatgtcatgtttgtttatcatctatgaccaaattgcttagtaaggctaacttgcttttttggcagggagtcttaagagatcttaaggttccgaacggtggtgtccaggctgcttcaatgaaggaaaccgggcaggtacacctcccatttaatgtaaattctctagatgcttttgaaaatgattttcttcttgttgagccattttaaaataagtgcatttcttaagttcttttgtggatatgttaattacagagcgatggtgatgctaatgattccgaagctgtaaacacaacaaccaacatcgtctcttccaacgggcaccacgaccatatgactactgaaacaggatgactgggttaactggatctaatacattttctgcctcagcaaggatgtgaaatagattcaaaatatgtaacaacttcacattcactttgagcgtaaatagagtttcaatgtactaaactaaaaaattgatgatgatgatgaataagttaactaatttgggactcttttttaacattagcatttgtatattactcccataaaagagactctttgctaaatgaggatgcttttccacactatgtaaggttttgaattttgatcaagtatgtggctaagtggtagttatcttgtatattcttgtgattatgaatcctttgggttttaaattcttcatgacataaaaaacgatatgcatggttcattataatataagataatgtatatacgtaatataacagtatatgataaaaaaaaaactagtgaaagctatatgccggccgctattcacaggtgggcgaagctcccaacaagacggctaaagctggtttcagtgttggttttaagggatggcttggttttggccacggccatttcgccttggccaaagctatggctatcttgtcaggtattgggttgtgtgttcgcctcggctattctcatgtgtaggtggtgttgaacttcaacactcactcttatttagagtgtattattagagatacttagtttattgtaactattttaatgacacttatttcttttattatgcataggggcttggatacccaaattatgttagtgcattttcataagtctgcttttattgattaatgatattgttttggcactctttttttcttttgaaatttcttccattgagtttactcttgaaattttttttgaaaccagtttttctaaaaaataattaaataatgtaacatcaaagttcaaagaatttgtacatgcacatattagttaaaaagaaacatatgaatttgttaggatatcacattcacatcaacggtttttgactattttttcatcaaagcaccctcaaagccatgcaaaccacaaagtgagatttcttaatatttagtaaagaatttactcttactacaaaaaagtttactaatgaatccagagatggataactgaaaaactatactatataaaagtaatgggctccattaattgtgatacttataaataaataaatatacgagttagggtggaatcaagaatacaatttacataattcctcaatgagaaatataacaagtaaataaagagaaaaattcaaacttgctcgattcgtttatagcccaaaggccactctttgtacacagtcggggcgtcttttggtgggcatacgaatcagccctgtgatctgcatttctgttactgctttgcaaaatcgtgctctttaaaacaaagttaaggaaattcaaaaccaacctatgatgcaattgcaaagcaaagaccaaaacacacctttaacttagtatgcttaaatctaactaattatcaacattgcttaagcttaactacactctttctcactctcatgtcttaacacttggcttcacctatggactctaatcaaatatcttcacctagtatgttctatacatataccttaaattaccaaatcatttagtcaaaaagatgatatagagagttttcttgtatgctaagcatttaagatggcttctcttctcacaccatgcaaaataatgactcgaaaattccctaaagcaaagatgtgcaaaatcaaataagaaaaacaaagcaggatactgtattgacgattcactcttgttttcgttttcatttgtttcttttcttttctttcgaagtggtgactgctgcttccctttgtgtttcactttgatactagggttagtcacgactgatttgaaacattggtaccaatcatgaagactgataagatcgccatgttcctgagctagtgtgtacctagaataatggatgaacgtttaagccaacaatccacaatgcatacttgcaactatagtagaattaattgttttaaagtccaagtgcaaagttgaaagaacatttcaccgtccaaaaataatggcgaataatgcgttggacacatacttacatgattgaggtatcaggcatggatggtattggaacattgccagtcctgttgcagcacttacactgcagaaatttgtggaattctaaaagatcaacttgaatccttcttcttgggtctccattcaaagcctaaaatagtaaaagaacaagaaatattacgagccaaaaaaacgcattgccatactatgttcgtaaaaggcacattcagctgtgggatcttttaatgaagtttgtagtgctttgattttttctacccatctctaaaaatagaatttatccaagacttctaaataatacttcaaaatatcctcaataaacatagatgcctagattatccatcgatcatatcaggaaaacaaaccccttaaaatttaaggacagtccctagtatattttgtttcaaaatttaccaacactcaagcatagtttcgcaccactttcctcagcagatagcaattggtgaaaataaacacaaatatgattgacaaactaatatgagaaaaccctcaccatccacttggatgtcaatatccaacaatctaattctaaataaccagaaagttgactaaaaagtatagcagtcagtgcaagaagtgcctagagtgcttaccaattgaagtttttcaacatctttaaagcaaacaacttcatgaaaaggaatgcactcgatgggtttcataaacttgctgtcacacaacaataccagtgataaataaataaccaatatcatctaagaataataataaataactacaatataattatttagaaaacatttaacacgaatctgcacctgcaccttccaacactctggttttatatgtgatatcattaaaataaactaattatttacctaatcatgctagttattaggttagcagctttttcatttcccgtctttgactccttaatataggcagcagtccgagatgtgtgtctcctgtcaaattaacacaaagggtgcataaatacgtacaaatgaacgaaaaaccaaatgcaaactagccttttctaaaaggtatttttgcggaaaaaaaaaagagcttgtgttatcccggcgacactctacacttgcatgagtagatgtttgtgtgtcaagaaaattaatagttaagttgttcggaagactatttttccaagaaatttttaaatgtgtatgctgcacatgagaagaaaacactttaagaaataagtttctcaaactttaggatcatctatgttctaaactttcaattagtcattggaagtttttattgaggccctcaattatgaaatcttctagaaaattgaattaagaatatgaactcttccaaatgaggacttcaaattatgaattaaacttcaaaaataaaggcaccctacagccaaattcaataaggtaacagtaaaatgtagcatgtcacccattaacatcctatattcaaggaaatcctatgattgttcccacctcaagcaaaaaatggttttcagctccactagattgtatccctagtaagcctacgatagatacagttctttattgtaatgctcgattgaaaatttttatactaaagtatctgacgtgtaaagtaaaaatttaaaaagaggatgtttattttttattttggcctagatatgatagagaataggcatcactctcagcacctacttctaacatttcattcttcttagcatatgattaagacaatgaaagaataaatttaaagaaaacatgagagattattctgatacaaaggaagaaacaagatgaaatattgtattacttggaaaggtctgtaaaatcctgtttcaaactcattccgtcttcaattttaatcatggggtgcagctccttcactttgtcatggatctatgttgagcatgtgagacataacaattaattaatttgggagataaaaattctacttataaatttcttgaaatataaaattggcacagcaatattccttctttacagaagaacctgcagtatcggcataacatcataacaacagccacacagtagtagcaagcatgatatatgtataaatccatacatgcaacatgtgcacttgataatatctgaaccatcatttggtatactgaatctttttataaccttcttggattagttttcatacctcaagaatatccacagtgagattttcccaactcttaagcaactgagatagtgatgctgctggaagatccctgataatttgcatgaagaatcaaggtataatttaaatagaattttatccaatataaacattgcttactgatttttcttttttttttttctgaatacaaaaacatggatcaaagtgaagacatgttcaagagatattgcattcttacaagctacctacctcactttttgaatcacctgagaaataggaccaccctttcgccaatattgttgagccacagattgattgcttgaagaggttatgtcaaaacctttccctgacctagtttgagtaccagaggcgatggcattgtaaatatttggatcaagtgcctcacataataagtctaggagatggactttgttgtactttccagcttcataaaggcactaaagcataaggaatagaatgaaggaaaatcagaataaacaaaataaactaccacaaagagtccaggttcaccaagagatcatcaatctagaatacacataaaactttatactataaagatattgtagtgttccgggtgtaattcctagtttgtagggatcatattattttatgctctctattctaaacgaaagattttggagagtaatgtctacaatcttttaatttcttatattttaatatgctaccaagcagcaaaactttgaatgatatccactcaaattcagtgcattatcatgcttactattttctaaaagcaaaacaaacattaattcacacttctataagtatgatcactaggtcattttctattgataaataattt

SEQ ID NO: 14610 - DNA, 4530 bp, Cannabis sativa
ttagcattgttttcagcaatattcaatggctgtaatctaatgccatctgtccttatatccaatggctgtaatcatttgtaaaaaccttaaatagcaatgaatttgctcatgctcattgagctgagatttatcatttacatcctctgtatttactcttgttttctcacttggtatcagagcaaggttgagctcgcgtcatcgctactgataaatctcagactccaagaaagacactgggacaagcctcacaagtcaattcgggatttgtgtctgcaagatcgttctctgcaagttcttcatcaatagctactcctttcagcaacactctaagtcagccattcaccatgaagctcgacataagtaattttcctttgtggaaaacaatggttctaaccattattagagggcatcgtctggagggttttctcaatggtttgaaaccatgtcccccagagtttcttccttcgaaaaacactgaagcagaaaccccggttccaaatccagagtatgaactttggataacaaatgatcaaatcttaataggttggctcgttggatcaatgacagaaggcattgcctcagaagtcattggctgcagatctgcagcaagtctctggacagctattgaagatctttatggagctcattcaagagcaaatatggaggatctgagaaccaaactgacaacagtgagaaaagggtctcaatccatgacaaactatttgaaacaaaaaaggctttgggttgatactttagctcttgcaggggaggtaatgacaatccatgacaaactacttagaggtaatgttctatctgatctttgtgctgagtatctaacaattgttgttcctcttgaagttaggtctactctctcgtgggaagaactttccagcacccttctcagtttcgacagcaaactggaaaggcttacatctctctccaccaactctaagcagctggaaaatcttactgctaacattgcacaaaagccatatggtctaggtttcaattcgaaccatggtcgagggagatttaggagtaacttaaatcatggtcgagggaaccatcaaccctctggtgcatcgagaggaagtggctcaagaggtagaggaagaggaagcaggcacaataactccaaacccacatgtcaagtatgtggaaaatatgggcactctgctgctatgtgctacaatagatatgatgagaattacactggcctgccacccaacaatgacacttctcttgacaaacaacagcagtatgctatgattgctacttcaggaacactacacgatgaaggatggtatgctgacagtggtgccagcaaccatctaacatcagaagcagggaagatgagcagcaagagtgactatggtggtaaggagaaagtgaccataggtgatggaagcaaaatgtctatttctaaaattagtcatagcacactcaaaactctcactgattcacctttgattcttaaagatgttttacatgtgccttctattgctaaaaatctgctaagtgtctcaagattaacacatgacaataatgtttcaattgaattctttgctggtttttgtgttgtgaaggatcaagcagggaaggtgatcctaagaggtgctcttgaggatggtctctacagtttgggaacaatcactactccacctacttactgccccagtcaactcgatccttgtcctttttctgttcaagttcagtcacctaggaatgttgtttcaacttccctaaaggatacctagcacaggaggctaggtcatccatctttacttgttttaaatcaagttttaaagatgtctaatgtaaagaattttgtccatgaaaatctttgtttctgtgatgcctgccaacttggtaaatcccatgcattacctttcaatatctatcacagtagagccaaaaccatgtttgaaattatacatactgacctctggggtccaacaccattagcatcacacacaaactacaaatattacattaacttcatagatgatcacagtaggttcacatggttgtttcctttaaagcaaaagcttgatgcccttgctgcatttattcagtttaaagcccttgttggaaacaaatttgaaagaaaaatcaaaatcctgagatgtgattggggaggagaatatgatgctttctctgacctagtcatcaaaaatgggattgagtttcaacactcttgtcctagaacatcaactcaaaatggtagggctgagagaaaacataggcatatagttgaaatgggattaacactcttggctcaagcacatatgcctttgaaatactggtctgatgcatttcaaacttcgattttcctcattaacaggctgccaactgctgttttgaatggcaaatcaccttatgagctggtaaactctaaaacaccagattacaaactcttgaaaatatttggagcagcctattttccttgtattcgaccctactagcaacataagtttcaattccactccattaagtgtgtcaatttaggctatagtgaggtcttcaaaggctacaaatgccttagtccacatgggagaatttatatctctaggcaagtgatttttaatgagagtgaatttccatttgaacagggcttcttgaataatcataaaccagaaaacacaatcaccctgaacacaccacactcttggttcaccttgccatccatgattcagaacacacctctcagcccccaaagaactcaaactgagcaccatgctgaagatcttatcacagaatctcctatcctgccatctgttaacaaccaggtcagtaacgattttaattcagatgctacactactgttacttctactggtgcaaatgtgagtgcagggaatgatttgtctctgtcacaagatcctggacaaacagtttaacaacaagttacaccagttgttcatcctatggtgactagagccagagcaggtatcttcaagccaaagatttactttggtcaggccaacttcgatcaatccatccatgagcccttgacacttgaagctgccctgcaatataaaggatggaataaagctatgaaggatgaaatctgggcagtggagaaaaaaaagacatgggtgcttgtgcctttttcaaacctgtacaacattgtgggctgcaaatgggttgataaaattaaactcaatgcagatgtctcccaacaaaggctgaaatctagacttgttgccaaaggttttcatcaaaggccaggtgtagactttaatgagactttcagccctatcgtgaaagcaccagcagttagagttgtcttaactctagctataactaaagattaggaaattaggcagcttgacataaataatgccttcctcaatggcacacttgaggaggatgtttacatgatgcaaccacctggttttgaatcaccacaacatccaactcatgtctgcaaactaaacaaggcaatatacggcttgaaacaagcaccaagggcttggtttgatcttttcaaaaatactctactgcagtggcattttgaaaactcaaaggctgacacttccttcttcattctagagaagccacattatgtcatcatgttactgatctatgtggatgatataatcatcacaggtgacaattccaaagaactcaatctgtttattgacaagctgaatcaagttttctctctcaaagaccttggatctctcaattactttcttgggattgaagtgtttagagacacgactggaatttacctttcctagggtaaatatatagctgaactgctacataaggctgaaatgattaatgtcaaaccaattcctactcccatggtaacaggaaaacctctatccttgactgatggagaattcctcaactcacctacagcctacagaagcataatcggggccctacaatatctcagccatactagaccagatatctccttcactgtgaacaagttaagccagtttctcaaggccccaaccacagctcattggaatgctaaaaaaagggtccttagatacttgaaaggaaccatgcatcatggcattcacattattccagggactcacttaaacctaactggtttctctgatgccgactgggcttgttgcccaaatgacagaaaatcgattggagggtactgtgtttttatgggagaaaccttgatatcttggtcctctaagaaacaacatgtggttgcacggtcaagtacagagtcagagtatagagctcttgctcagctagcatcaaaattgtcttggctgcaggaattgctcaaagaaatgaaagttcttctcactgcttcaccagtaatctggtgtgacaatatgagtgcaagtgcactagcctccaatcctgtgtaccatgcaagaaccaaacacatagagttggatgttcacttcatcagagacaaggtgatgaacaggaagctggaaattcgctatataccttctcatgaccaggtagcaaatagtctaaccaaaggattgtcaccttccagatttaagtttctgattgacaaactccaagtgaaagagtcacc

SEQ ID NO: 14611 - DNA, 7990 bp, Cannabis sativa
aaaatattagtagggaaggggcaagaaccaaaaggaaagtgagttttttcttcacactgacattggccctgtctagtaatgattttaggtgaatattgctctttttctgaaaaaatgaagataaaaatttccatgtaacatgattactaacactgaccctcaatctgatcacaaacaacaactattctctctgagaaagttgaaaaagaaaatctctcattcttgagaaagacttaatttgctcaacacagagtacagtgtataccatttccatcactgttttaagtaaaaaaatttcctattgatataacttaacaatatatcacaataaaaacaaaactgtcttgtaacttccgtgaacatatatttatatattttatatatatacaaatgcattttcagtaagaaaagtcacaactcatgcccctttgctttgctgaaatgctgacgcagccccacaaatacatacactgccagagcccagaaagtttgtgtgtgtgtgtgtgtgtgagagagagagcgtctctaattatattattatttatttatttatttaaaaaaagattatacatattccaattatattatatttaaaatctctctctctgtgataaagtctgaagggacaaaagttgaagtaataataattacagaatacaataaccttcttctctattacttctctctctttatatagtgccacccacttcgaaacattttcagctacctttcaaactctccctgtttctctctctaggtttgaagcttttataggacaatggcattgtgggagaaaacagttgcaatggctttagtagtagtagttgttcttgtatgttgtttcattgccaagactgaagcttttccctcttcttctcagcttgacaaaattagtagattaccgggtcaaccccaagttgggtttcagcagtattcgggttatgtgaccgttgatgacaagaaaaagagatctcttttctattactttgctgaagctgaaatagatccacataccaagcctcttgtgctctggctcaatggaggtttcactctcacctctcttttactctttttcttttctctttttggttctaattttctagccttaaagacaagtttctttatttatttgtttatttttacagggcctgggtgttcttctttgggagttggtgcattttctgaaaatgggccatttaggcctagtggggaggttttagtgaggaatgaatatagctggaacagaggtacaagtacaaaatattactcttttccctattcaaaatgttaaacttttgctattgtttttgttatgtttgttaaattaacttattgtttcatatggatatatacagaagcaaacatgttatatttggagacaccaattggagttggcttttcttattcagctgattcctcttcttatgagactgtaaatgacaaaatcacaggcatgccttatatctcatgtctcactacttttcattctttagaactttctttcactcaagataatttcttgtattttcttttttacttaataagccttgaagagtaggtgataggtagaaaactagaacaccccttttgtgtttatctatttaaagaaagaaaaaaaaaaacggacagatagatagaacacagttcctatactattccccaaagattcaagtcaacttttcttctcattttctctttatttatatattaatttgaagacaaaagaaaaagaaaaaagagcaataataatattttccaggaaagttccgttggaattgttttgttttctttccatggtaaaggggctggacaatacttaatgataccctctcgttcgttccatagtttctcttttatctttttcttccttactttacagtttgtcatgttcactgctgactgtggatattttgtcttttttcccctttcccagttgacaaaaagctctccttttagagtaaaaaaaaacatataatatctatttatacctctctttcttttgatttctctctttagccaaggacaacctggtgtttttacgcaaatggttactcaaattccctgagttcagtaacagaagcttgtatattactggagaaagctatgcaggtttatttatttatttatttattttttactttaacaaccatttttattactattcacataataaattaataataatgatactcatacttctctctctctctgtctctctctttacatttgcaggtcactatgttccacagctggctgaactcatgctccaattaaacaagaagaagaaaatattcaatctaaaaggcattgctgtgagtagcagtataaaatgttatattgtaaagaaccaagtttatatatatatatatatatgtaatatgtatgtagttatgagttttgtggtgtttggtttgaatttgtagttgggtaatcctgtgttagagtttgccactgattttaactcaagggcagagttcatttggtctcatggactcatatcagattcaacatacagaatgttcacttcttcatgcaactactcacgttttgtgagcgagtactacagaggctcagtttcacctatctgctccaaggtgatgaaccaagttggtaaagaaacaagtagatttgttgacaagtacgatgttacacttgatgtttgcatatcctctgtctttgcacaatccaaggttatcagtcccaaggtaaagaaaaaacaacaactatacttgattgactttgtctatatgactatatgtctacctttcatttcagttgtcgtttgtgcccatatcaaaagatttcttaatttgtcgtttttggtttggcagcaagttgctgagactatagatgtgtgtgttgaagatgaaactgtcaactatcttaacagacaagacgtgcgtaaggctctccatgcacggcttgttggagttcgtcgttgggcagtttgcagcaggtatatatatatacaaatatatatgtgtatatattcattctcttacttcatattaagaacaagtttagagttattttggtttaattagttttcttcgtaacagtgttttggattatgaactcttggacttggaaataccaacaatcacaatcgttggtaaactcatcaaagcaggaattccagtcttggtatacaggtatactgtttatatatatatatacatgatttttctccttgaactctctttttctctctttacttatcttcatattatgttttcagtggtgaccaagattctgttatccctttaactggaagtagaacattagtacatgggcttgcaaaacagttgagtctgaataccactgtgccatacagagtctggtttgaaggacaacaggtgatatttcatttatataaatatatatttacaagacatgaattttataagtgatttttagcaatgttaactgatattggatgtgtttcttgtttcactattaggttggtgggtggactcaagtttatggtaacatactttcttttgccaccattagaggagcatcacatgaagccccattctctcagcctgagagatcacttgtgctattcaaatcctttttgcaaggaagacctttacctgaagcattctgataatctttgggttgagattatttgtaaagttaagtttgaatttcgttgattaacttcaattatttttctttctttttgttcttgctctgttgcacagagtcccttccacactgtggaaaccagctgaatttgtaaaaatctcaagagaaaaagaaaaaaaaaacaagtgttttgctgtcattcttgcaattgtatttatattattaacgattcaaaacaactgatcatgttactaatcttaccatgcaaggccagaagagagtgcatttttttctctttcttttattcatagagggataagggatttcattcaacataaagaataatatcttgattaacaagttctcaagggattattagaactagaacagttggaaattacaacaggagcttcaacctccatagtcatacagctgaatttcaatgcaaatatgggctttgatagcatcacagctgcactggtcgaatgatccatggtagtggtactaatactactactactgcacttgtcctgttctgaacattgttccaattcactgtttcttgacacttttgttggatggactgctcgcactctaatttatgaacacaacaaacaaaggagcccattaaaaagacagtctttaatttattactccatttgatgatataaaataaaaagaaaaataatgaaagagaaacctgcactgaatcttgcaagaatacttgaacaagtctggagtatattctgtacggccgctacatagtcgtaataacacagtttaatgataatgtccataatcgtttatgaactcaaagcgctttagaaatgtacctaaagcttggaagagacattttaatggttggccccatccacttgcccaaactcaatgcagctggcactgccaataggaagaagaatgatgtgatgagaaattaaatgggcaccattgttacctaatctaggcacagaattacaagaatcacaatgtgcagaaagaactttacatgagcttcaacttcagaataaagaattaaggcctttttaaaatcgatgacaaaagagacaaacttacaaggcgatataaaactgttattccattcatcactaattgcgtgtttgagatacaattaatgattcttatcgtccttatattatctaaacttccactcatttgcttatttttacaggtagatacttaattgagccaacaaaaacaagcatagcaatgaaatagctcacccataactatttaaaagaggatagtgattgagtcatttacttttagtcctctaaacataaaatgatatctttgatatctgtatgtgtgtgtgagtgttttcatattaaaagttaaagaagggtgacctaactacaattgacatatatatatatataaatatatatcaacaacaattgcaactgacctaatgtggtagtaaggttaaaagagcagctatcttctacacaagggcttttgacttcagtcacttggacatccatgcaatcttctatcgaattagaggaagctgtaccagtagtagtagtcataccaatcatatttagaaatccaatggttttattacttttttgctttggtattgctgtaattctctgatcaaaacaaaattatacatcaaggtctaatttgcttgagaatttggattgttaaatatcaaccttgaaatatatatttgcatatatgacttgaaaatgttaagtagtgaaaataggaacatttaagtacatataggcctacctttgagaaacttgccacatgacttggaagccccacttcctgcaagaagtgaaaacagccaaagtcagaattatgaaacaaaaacccaaaagccctactccatgagaccatcaccatattttgtgttcgtgtaaaattcagtgtcttctagtagagtttctcactcaaatgttcactactctatttagatgttcaaacaaccatattttagaattagtggcaagagttctgtagctcccccacctttcttccatgttcacaagcttcattactgttcacaaacaccttagtggcccatctgttaattaatttgcataacaaagtagttaatggcctctggtatatattatttaaaatgaataaaaaaaaaattaagaaaacagtggcttgggtgggataaaacttgaccaattcacagatgcaagaatgggactatttattgtcaagcattgtcaacttgcctagttgttgcatggtgcacttgtattaaactatgcactaatgcatttactttatatgcaaaaaaggcaattcattggtaccactatgaaatatctaaacattttgttattattaattgatgcatgcatactccttttgtcgattcctttagaaaggaaacattttgctttagactggtctaatataaagtcctcaccttgaaagggccaatttcaattcgtaagcatccacttcatttttttttttttatttccccattctcaagcaagttagtttaaatatctgtgtagtaaccgacttgtaaaggtttcatcttttttacttgctatgatagcaacttaagcacactatacattagaagtgaaagtcagagatactttgatatgatttatgtcacactcaggtcctaacaagatttttgttattttttattctatatttgagaggcatgttacataacaatattataataatgaagcaagttgatctgtgaaaaacttacgcgcaagatgttggtgggttccatacaagccccgcaagcacaacgagctgaggaaaacagtgattaaaaatgttggtcacataggtctgttcaatgaactcaaaatatagtgtacaagaataaagagtttatgtggggcataacttaatattattgaattgggtgcgtatggagtttcatctcaaaatcaattagtagatatcgagtaaagtaacccgtaatatcgtctacaaacctcatcaaagactccagccggactgtcctcgtagtttgctagaaagaaccctcccagagtatacctgtgaaaaatgaaccctactgagctgagtgaattatcaactaatatcttgaaatgtaaaattcttatgatgtgggtgaaggaaaaaacagacatacccaaatgcttcaaccagtttaaactcttttgggatacatgctcgagcagtttctgctttgacaagatggagttgatacaatgcactggcaatgataaaaagcacaacccatttgagtaaaacatatcaaatataaagaagacaaaagaaacgaagacaatgagctaatgtggggggattatggggtacttaccttcctttgaatatccatggaggtttgccatagccagaggaatttcttgttttgccaatttccatggataataatgtttaattgtacctgacaataaaagagcaactacaagatcaaaagcctaaatttgaagaagaaaaggtaatgatgataatgccaacaaaatatcaaataacgagtgagtagtaatagttaaagagcaaatgagtttcagaaataaagaaagaatgaaaaacttacctttaaagaaatgaaattgaaaagttgaacccaacaaaggccagcgacctcagagaaagaaaagccacccagaagagtttagggaaaaaaatatgagaaaaaaagatatacttatggagaaagaaactaccgacagagaagagtggttgatgaaatgaactgggacaaattagaagcagtagaagaatgggataggataggattatataatacatattattttgcataaaaagccaaagccaaagccaaagccaaagcccacaagatatggtttggcgccaactgaaattaacatcataccatcaaatagtaataccattaattcaattcattcttacaacttgccaaaaccacctcttcagtcttcccttctatctttctattctcaactggtgatttaattatgaatttatgatagtgttctttttttctttcctttttttaaattagtattttagatatttgtacggcacattattatgtagccacatactctctttttattattatattatttgtttctcctcagccacacactcacacaacaacacaacacaacttctagtctactctttcactcccatttctttaatatatatccattttctcaaattttggatccattttctaattctattataaattacatcaatagtagtttaatatgatatgctgctttcagatcaaaccatccaaaccatttaagaattaattaactttatttaccaaattagtcataaataaatctaaaaaaaaagccataaataaatcaaaggattcactttttttcccctttttctgttactatttcttaacaatcatatgatattatctcaaaaaaaaaaaaaa

SEQ ID NO: 14612 - DNA, 7403 bp, Cannabis sativa
cgtttattatagtatacctccaggtatatcacgtccagattttggaattggaacagaagctaagattggtatatttgattccagaactttaagaacagcagggaaaaaagatgaactgtacaactccatctttccaacttcatcaatgataaagagatcagtatcttctttcacctgagagagtagtaagaagcacatttttacctctttaaaaaacatttgaaattctaagaagacaaaggtacatactttgcattgcagacaatgagtaatatactattgaactaaccaattgacgaagaattcaaaatggctaatgggttttccaaaacatgataaataagtcatgacccttcaacaaaacctctgcctactcatgagtaaattatacctagaaaaacaaccattacactatatctgaagttatgtatttggagttgagccactgtcaactgccaaggactcaaattcaataagactttttgaaaagagttgaatttcctactctgagtaagtaaattatatcttatcaaaccaacaattattgcatttgaagctatgtacctgaagttggggcagtgccaaagactcaaaggatgctacatctactttgtaccttcccacagttggccatctaaaggaatcagagctacaaatatcccaaatattgtttgccatattagcttaactatagctcaactttcaacataaatgaattaacagattcataaaagtttaaaaaggaaggaatgaaacaagacctagtggaggttgttgtagccagaggagctttctggccatccaaggtgactacttcaaacccaactctttgagctccttgtctaacctcacctggctaccaaaaaaattcacggaaatcactaaactgactaatgaaatagacttgaacctttttcataaaattgagagaactaaagagcacatacgagtgtagaaaccctgaaattttagagaaggatttgaggccttcagggactcataagctctaatgatgagagtggttttgcccacgccctgtgtccaccattgaaattgtgaattggaaacagaaaaggaataatcaattcatacatgaattactacaggtaaggtaaggtaactgagaagaaaccaatagaaatgaagtggacttaccggaggaccggtgaccagcaaacattttccggtacttgctgccgccatcatttgtcgctttgttgaactttcgctctttttttcattagagtcgcagatatgttaaacgacacgctgagttccttgttcttttctcgacaggctaaacgacatgtcgtatgctcaataaaaataacattcactccaagctaagtaaaagttctgtctcctaacaaatagtaaactgtgttttctaaattttgtagattaaatttttttttgaactattcaacttatcaaattcaaagactttcgtccaattttactaacgaacacataacgtgaataaaagtttaggaaatacaatttaatacttgtaaaaatttaaaaaacatgatttggtacatattaaaatatagggtgcataatttaatacatgaatagttgccacgttattaaaattaaataagatttgacaaaaaattttgaatttaacaatctcaataattcttaaaaaaaaaattagcagtctaaaaaaaattcgaaaagcacaatttaatacttgtacatattcaaagaaaaaatttgaattagcattattagaaattattacaatattattaatcaagagtgtcaattataaatctcttcaaaaatagagtcaataatataaataatgaaagagttcaaacttcaaaataaataattggcgcgaaaatttattgtaaatttgtcctaattaatgtacggtaacaatgtagtccacatagagattacaaactagtatagtataataatttccatctcaaatatttaagcattcggcctcctatttataggtttacatggtgggacatgatacacaatgagcttaatggttgttaagaatccacattacaactaactatggtaagaggtagtaaatgatagtcatgtttagctaagtttctactacttctgttaatagtaatcattttaatttatattttcaataaagatgtttgcttaatgataccaaatatcatgtaaattattttggtttctcaaaagtcacttttcctaattaatagttaaagagaaagaaggcaaagaaaatttcaatatgagtctcccttttgtcatttctttccattcaagagaaatgttaatagtgacaaagaatggtccaatatttcttacttcaaattcaaaacattggagaggctgattaagaacagaacagaaggagtgagtctgaaactttgactaacaaaaatgagaacatataaaaagataagatacccaaaacgtgaatgggcaaaagactagaaaagttagcttttctttcttttcttttgagataaacaaagcaacatgttagcacactatgacactactacactacactacactaccttagcttttactttttcatattatacattgttcgcctttacccaatcttaccgttgtattgaataatgaatactccctccttttccaaacgtttccttctctttatctacctaacttcatcaacccatcataaagaaactttcatttcaaatttttgtttaatatgtacacgtggcatgaaagatatttctttttcctcttcccgttttaatgaaaagcaatcacagatatttcaaaggtcaagagacacaacaccaaacaaatgattccatcaactaaaaaagaaaaatagcctttcaaaagacctgatttttgctccatccatcaaacggaataaacaaccgtttgtgaatcacaccagatggtccacgctggaatcactaaaggaaatagctctaattctaacaaagaatgactccattttttagctcttctttattttttctacataataaagttttcatgcaaacaaaacaaaaatcgcattggaagatctgacaccagacaagaccaatgcccatctgccacaaaggtttttcaggtaaaaaccacctatctttgtctaaacttttaagaaccaactaacgacccgaatcaaaacaaggcaccaactttcattgccaagaaattattaaagctttaggttgagttaaaataacatggaccacattgaatcgaaaaagttaaaaaaagtgcaacggtaacaaaataagatggaattagaatataaaagacgcacactaactgaatgattaaacataaaacggagaattaagtacagaaaccatatggggaatcaatcaggcagacaaagctggaagctgattaaattccttgtttggggtttttttgttcctaaattctaacctaaaaagagtagtagctatttatcatcagaagagaaaaatcttaaatgaagaagagtcatcatcatcataatcatgatcgtcattcattataatattttttggggctgggttctaagcaatgctacacaacttcatcttgtgctatggctcaaaactcagtaccaagtctcctccaaatctctactcgtcatcatcatcatcctatgaaacaaaaataaacacaaagtcaaaacataaagagtcaaaaatgcagtcaaacagacgaggtaatagagtattatcatcaactgctcttacatctccactctcgtcctcctcatcctcatcatcattcacttctgactttgacttgtcagactcttcttcgtctgctccagtatctccatcagcctatgaaaacaatccaatcatacttttattattaatattttgagattattactactaatgtaaagaagctaaagatcagtagttaaaacgtaccagcttcttgttgtaagctaccatgtttttgttgtactcaactttcctcttctcagctcttgaaacaaatggagctttctcctgtagatttattttcatcgatcgaacaaatgaataaaacaaaattcaggaatatgaaaaagaataaagaatatatttgctgaataaagaaaaggaatctgatactcacagcttcagtcaatgatttccatttctcaccaccagctttaccgacctgatgtaattttgaaaaagaaaattaacatattgtagaaattacgcgcgcgaatgaagaagacatgaaaaatcggatcggatctgattctcttacagcggaaacggatttgttgttaggatgttccttcttgtatttttctctaaattcctccctatttcatttcaataacagcaacgcaatccgcaatcagtctaaacacaaatcgagtataattttattacgaatttctagatttaacagcaaacaacaaaaacaagatctagtctagacaagaaaaataataaaataaaaaacaacaaaaaacaagatgcgaacatacatgaaaacgaagaaagcactggcaggcctcttcggcttgttaggatcctttccagcctttccagccttcttaccagctccagcgctcttgcttttcagcctaaaacaaaaatccatccaaaacaaaaaataaatcaaaaccgcacatcacacataaatacggatctacaaaaatacgatcggaaaacaatttcataataaaaactaaatctcacttggtatcagttctcctgggagcagccttagattttccacctttcatggcgaacctacactaaaaaaagtcgtaacgcggtgagaatcggcgaaaaacaagtgaaaatcgtagcaaactcagtacgctgagtcaagagtttccgagttaccttggaagagaatagttagggttagcgaagaagatagagagagagagagaatatgctttgtttggttttgtttggagtgagagagaaaataaagagtaaattgtaaagagataagaaggggtcgtgggatgggaatgggatgaccttccgaaaattttaaaaattaaaatattaaaaagaaaaatataaaaatgactaaatttagttattaaaaataaaataaaaattgaagtccgcgtttgggcgggatttcaaattattttatatattttaattttataaaggccacgtcatcgatccttgtgctattgggggttttgattctttgttttgtgtttccttggtgtgtttcttctctccctcgctggcgggaacagtgtacagattttgacacgtgtgcaatctttaaaaagctagctgagtttggtatattattgccagctcgtacgtgccagtttttttatttaaactgaaatgaccaaaatagcctcgtatttgatattattcagagtcggtagttggaggaccttatcgaaacgagcatcacgctttgatgatgtacttggtgacggatattatggatggaaagagttgggggtgttttcgtaattttcatcgttgatattttattttttgagtgtgaagaaagagtagcttttattcctattttatttattttactaattaatactaataattaatgaggcaattattatagatgaatcggattttccgtttacgtacggagaatattatagtttataatcataatatgtattttgtttttggacagaaatttaaattgcttgcccaaataaatagtgaatcgataatgggcttgtacaacggagttaacttgggccggacttttggactaagatacagtcccttgctaagtcgaggaatacttattttttatctattaattaaaaatattcttatattatattttattaaaatatacatattattatcggtggattgttaaatatactattatctttcacttaagtctagcacataagttacattaacttaatatatatatttcattcaaatatacctacttttgagagtaggttaccaaatatattctcacattctacttaactctagcacataaatttcattaatttaaggggtatcatagagacatcatctataataaatagatatatatcttaaatatataaaaatgaaagtaaaaattaaaacatgtaaaataaaataagtatataatgtaatttcttcctttgagttattcccttttctaggctcatttaacctcattctacattgtttatttttgtagaaattacatcttttattattgagataatttcataaaaacatgaaaaacaatcaaaaattataaaaatacaatcttacagaactttaaacattattatagtttttaaaattttatttacataaaatatagtcatttaatatagttttatagtgtactcttgtcattaatttttgttatttatatattatttttatgttgttttatttttgttttcttgtcaatttcatgtaatttttttgttatttaatagaatactgtaaaaatatatatataaaaaaaactttgaacgataaaaatgtacaaatttaccaaaaatgatagtttattttagatatgtgcagaaatatgactttcctaaaagaaaagaaaaagaagttattttatggcttttgaggcatttatttcggaataattatataacatactgaaatttctaatttttttacttttatactatgggtggaatttttttcaaaaatattgtattttttttcaaaaatactgtgtaagtttcatattgtctttagtgttaagtttttaatgttgttttacaattgtttttagttgttaaactcttatttttaattgttgttttacagttgttttacgttattttataaaaagattgtatttttgtaaaagattttgtgtggcagtaaaactgtaaactttatccaagaatccagtatttttgtataaattcctttattttcccatattgacatcgttttactcagcccactacagaatatttagttgggctatttaaaaaaatatgagaaaatgaagataacttttgatatagatggtataaatacttaattacactaaatatgacatttttaaaaataaaaaaaaaaacttacaaatataggaaaaagtcataaggaatgccataaaaaattttaaatttttgtttctttttaatttttttccttttttaaaaataaaacactaaaatataacatacaatatgtaacaaatataacaaagagaattagaaattaaaataaaaaaaacaaagaaaattaaagagacaaaaatacaataaaaactataaaagaataacaaaaaaaacagtagaatgtgagaaactatttagtaaaacaatcaaaataaaaacaaacaaataaaaactggtttccttaaataatcaaataaaaaaaatttaaaactcaattatgaacaacaacaaaaaaaaaaatcagttataacaataataaaataatatgtgtagcagaaactgattatttaaaataaaatagaaattgttgttcaaatatcataca

SEQ ID NO: 14613 - DNA, 5493 bp, Cannabis sativa
ttttttttttttttttgggcaacattatgcagacctccaaatctaaatcctttgaacaatggataagaaatgatctaataccaaaattatgaaaaagactctggattagttgataggcaatcaaaacaaagcattcacgtatgagcttacatcagcaaagcctttgaccttcatacacttatctggcaaaccatttaaaactagccaaatttttaaggcattttcctattcattgtttaacatgttcgtacacctaccacagcaacttggattagtgaacttattggcccccataactatgatgaaagtgtctattggtccttaaactttacattctatcatcttagtccaaaaactattaaaaacaattatgttaatattctgtttgatcctcaataattttcttcacattagaacaaaatatcactttttggaaatgttgtaagatacgttcatgtaatcttgtctaatctagtatcatctttttcagtctagcaattatatggataattaatcctcaatttttcatctgctctatttcatactcaagtctattgaccatgcttcctatgcaagtgggtctgaaataaataattccaaagaagactttccgtttcctatgtagctttttgtaaagagtcaggaatatctagcaaaaaggagaaaactttactttagtatggaccgaaagggagttcctaaagagtttagggaccaacatttcacctgtaacatccaaaggcaaaaataatgaactgcatatccatcagtcttgatgtccaaagtcaaccttatatataatttttatatgcagcgctaattttttatgttttcattttcttcctggccagatagcacagctcaaacaatataataaccaaccaagatgcaactcaaacattaccttgctttgtctaattgtattattagatatactatcaaaatttagatgatcaattacctcaggagcggctgaagaagttgatgcctgctgtaatgatgagacatccctgtttaaaggaaggaaaccctcttttgttaaaatatatatatatataatagatatacatatatacaaatacatataaatgtcaagcacagctaagaaaaaaaatgtaataacgagacaaacatagtagtcattacaagatgacataaacataactttcctttctaatactcttatctttaacatctttccaacactgctagactgttttcctaataaattatgcaaacaagtgagaccaatagaagggtctttccatgtcaagaataaatacttacatttttcgtacttcaatagtctcaaaaatagtttgtttattactggtctatcacccaccaaaactttacttgatacattgagtgcagagtgaaagggagtttttttcatccgaaccctcggtgactttcttcatgaatatgagggattacacaagtttctaaatgaaactcatgttcagtacctttatatattttgttttcccctatattaaaactaatatatatatgcagccaaataagacccttaacagtctactgttagtacccctatgcccggtcccctccccctccccactctcttcatatatagtctgacaaataaaaattcatatttagatgctattctcaaattgttttcaaacaaattttgtgtagctttcaaattaaattcttaatattagaccacctgacattcaaggtatattcacagaaatactaaagcttacttctcttggccaacaactttgtacttgtgaacaggcaaagcatttatctcttcctcagtcattgattgagttgtagacgtaatttcagtgtccagtgctctcaaagtatcataatctgtttgaatagaatgagaacaaagaacctgttatcttcccaacatatatatatattcaagctgcatggacgtcagctgaattgtgaatgcacaatctctttctattagttgatcattcaactataagtctataatacttatccagagctttacctagatcatcaagttcacgatcaagaagcgcaagttggagccttagtccttgtaacctccctcgtgttgcaaaagaaattgatggcggcatgtgcagccgcaattctgtatgaccaagcaagccactggcagttgcagcatgtgcacgagcctgtgcttgtagtcgctgacaagttgcatacatcctcaggcttgttgccatcaaaaatacacctacgactagccagagctgcatgtataatgccggaattaccttcatgactgtgtttcagacttaagactaacaataaatgtgaaagaagacataccagaaagtttggtgacatctgatgagaattcaatatcatgaatagcaagagaactgttgaacgaaaaggttacaataaggatcaacaatattatgcactaaaattgcacatgttgcaacgaaaatactagaaccaaaaacaataccagtgactaaaaaggccagtgagttagtatttactggtcgggccgtatgaatccgctaacagaaaaaacaaatgaagtgagcattatgtgacattaaattaaatgttgcacaatctagtgggcttatataaatgtgaatatagtgctatacatacagaagacctaccacagaaggttgttcaggtacaaatcctggaaatccactttcaatatctgccctagtccctcggaaaacaaaactcatttctgcaaaaagtttaaacttctttctgtagcaatacaatagatagtgtcataatacactcaactaagtcaagaatagcaacccttccctcaaaatttaaaaacctatcaatgcatccaaccagtcacaaataaggacttgcaaattaaccttccagtgcggtagtaatcaaccacatgaaagtaaagtttaatgaagaaaaggttttacaagttctgttttacgcattagataaatcaatgattaagcacagttcacaaaccaacactcaatgagtgttagaaatagaattagcatggtccaggctcgtaatgtaataatcacagatgaagaagcaagtcaacagcttactcatcttaagtgcatgagaaaagggtgtaattaagttgctcatcagcctttattgcagatatgcaaaactaacccagaaatgtatgccaaagcagtaaaatatttgtttccagccagttactaagtgtgatgcaaccatgaattttttaaaatacatatagatacatatgtatatatatatatataaatatatatatgaagagaaagacctcagatttgaagcattgttaaaatcaaaatatattaaagctcttcttccaagccttaaaagtcaaactcaaattttacaaatacaagaaaaaacattcttgataaaagccaacatctagggacccaataattaattatgaaagcaaaagcaaatattacaaaagatcaagcttgatcacaccaacccatgttcatggaagataaaaaaatgtggtcaaaatgcaatgatattccaaaaatctagactggaaagaaattatcggctacaatctagactgcccatgtcatgccttaaaaagctctttaaagattccttcgccacatttaaaaacatcttccccgcattggaatcaacacaatggtgatctataccatgagaaagagttcttagaacgaagcaatgtaacattaagctgattcacaaatggaagataatttaactaatttggcaaagtaatataaaaattcttatatgaaatttgtaaagttgctctgtcacagcttcaaaagaataaaataagcacgtataattatagtgccgaacaaaagaagaaataaaagcataattttgagattacattattgtgaagtagtcagtgaattataagcatattctctatatagaatctaatagtgccatctgagtcccacccccacacccgtctatgaaatatttagtcaatgacatcatataaacataaaatttcaaacacgtatttatgcatataaaatcgtagagtgctcaacccagttaccacaaaaataaccctttgtttaaggaaagcctcccaggcacaaaatcattaacaataaaaaataaaaaaatccatttcccaaataaaatatttccttgaccattgagcatgtgatttttgtcagcataaacaaagatctaaaacctcacaatgtaaaagggaaaaaaatatagagagaggcgcctcattcaaccctaaagaaaattaaaattaaaatttaaaacacatgcgaataaaataaaagataaagaaaatctctgatcctaattggcatgataacaataaacaaattgaataaataacaaaataaaagcacataaaatcagcactttttagcaagcaaaataagtcatcatctcttttttataaacatataaatttatatatatttaaagatcgaaagtgtataggcgtttacataagacagagtttctacggagccaaacagaaatgattggtgagaaaaaaacttacaagttagtaaaatcggtggagagagttgagaatgtaggagtaacaaagcggtgaaggaaggagaagagatccagttgagggtgaagctcagctaactctggtctggtctggtctggtctggtgtctttacccaccaacacaacaacacattaattttttaaaaaaaaaaattccaaaaaactagcttgaatattcgagacgactccaatgactgccacgtcatattgctttgtaaaaatcttgccaccattttaaagagcatgtgctttatttttctttcttcttgctcggcaagttgtctaatcttaattactcccttaataatattaagatttggataatactttttgactcgtaaatttcatatattaaaaataaaaacataatcttcagtcaattttatacctattttatgaataaatcaaacaaatttattaacagcaatcagctaaattaatagtgtgcaatttaatcaggttattacttttattagaaacacgattaggattataattaaaaaattgagacaaataattattggtctaattttcaaatcatttgacacaaaaactaaaaaaaacagatgaaaaagattgcaccatcacagttaactttcaaaaatacttatatattcaatttcttatgaaaataaaagagttgaacattttaatatatacatgtaggggtgttcatccaattcaattcgtactattttgctcatagtagatccgatctgcactaaattgggattttatttttttgaatccaatccaatctgcacaataactcaaatccaatccaattcaattcgtaaaagtgcagattggatttgttactttttaatattaaattatttaatatttatgaaaagaaaatatttttttcaaataactagtaacaaaataaaataaattattgttatcttatgtttccatcaacaaattaaaataaataaaataacaaataacaaattcaaaagaataaaaaaaaattgtatgtataaa

SEQ ID NO: 14614 - DNA, 9418 bp, Cannabis sativa
ccaggtccgggtctggggccgggctgtagtccgagtcgaggactggggccggcgccagagttcgggtcccaaggtctaggttggggtcggagtccaaaatattgattaagaaaaatgatgtttaaaaaaattttaaaagtgattttttttgtttttaaaatttagattcttaattaaataattgaaaagtgaaaacagttttatagaacatatttttaaaaaatattttcacatttttacttttaaaaacaaaaaaactgattaaaaacgtattaccaaacactccctttattttttgtaatttgtgtgtatttgtgaaataatgtcattattaaaaaagaaattgggctgaaggaagaagcccaatatttgaatgaaagcagaagagagttgagttgggagttgggagggaaaagaggttggactgtggagatgtggagcggcggtggatcatcatcatcatcatcgaccattacgccggagcaaagagccagaattacccgcaatttcagagccgccaaagctctcctttctcgtaaacgccctcgaaacgacgccactttatcccctctttccaaaaagtaactaactttctcttactcaaaatcttagaacacaactctttcttgaactgttctttatttatttatttaatggttctttttgtcaataaaaatgattttatgtttgtagagtctgggatgaaaacgaaggcatggagaccccaattaggggtttcagcactatcaatagagttcctcttgccgacattccggtgaatacgccgccccgttttgctggtcacacctcttcgtttattggccatgaaaaacatataagtgttagtcggagtaaagatgtttctttaggaaatgtgtgtgaagtgaattcgtttacaacccctttgaaacaatcggcatgtccgaagtcatctacggattctttttctgttactagttttataagtggagttgatgacgatgatgatgattttgatgagtccattttggaagaaattgatgccttgtgtgagcagaaatccatggaaagaactggaaggttcgacccaagttccaattctattgtcactagtgagcatagtgatggtaagggtgatggtgttggtgatcctaatgccagctctgtggagttggaaaatatgggtatttttggatttggaaatgatgggattggggaatgcaaagaagaaaacgggttgtctaatacacagagcataaaaattggaagcatgccaagtgagttttcgaaatatatgttgtctttaaatgacaggcaacgtgaagctgcttgttgtgaaatttctaagcctttaatgattgctgctggccccggaagtggaaaggtatataaatctttcgttctatgtctatgaagataaatattctttagtttttgacttgaaattttctttgacaatgtcagacttcaacgatggttgggagagttcttatgctgcttcacgaggtattgccacttaattaccattttttcctcttgttataagacctttgctctgttattttttcttgttgtttaggaattttttctatggttatctttggggtttgttttttatgcttactcctacttttatcctcatttttctttgatacatatcagggaattagtccatcaaatattttggcaatgacttttactacagcagcagcttctgagatgagagaacgtattggaaaagtggccgggaaagcagtagctaaagaacttacaatcagcacattccattctttttccttgcagctttgtcgatcatatgcagaaaagtatgaaactttataatttgcgttatagtactattagtactaatagtatttaccaatcatatagaacatctgacctttttcgcatttaaatttctctttttcaatactactaaaaacctgtaaacatttatgacccctttcaacggtatgttggtattatcaactgctaagctaattgtaatatgaaacattcctaacatcttccattcagtgtatattactttagtttttcttttcttgtctctgtcaaaatatattggaaccttgaactatgctgactaagtagattttatattccaggattgagcgcacatcagatttcttaatatatgggcatgcacaacaaagaagagccgttatagaagctgtgcggatattcgaaaatggaaagagtaacaaaaagattgactctcggatattaggtgaagaggctaatggtataacctctccacagtattttaaagatatgtcaaagagatggcagaagtttgtgactcaggtatagcatgcacaatattagttattggacccacatcaaaaagaacacccctagtccctagaaaagtcttttggcttatttgtgaaacttcatataaatttttaatatttcaggctaaagcttctggaaagactactgcagagtgcttcaaaatgggtgatgaaatgggggttagttgatatcgacatgtttcagatgtattttattctggaacgtccactttgattcttaagattgttgttgatgatgcttgtgaattgtgataacaggccacaattcttgggaactacaatgatatattaaagtcttgtaatgctttagactaccacgacttaattagctgttctgtgaagctgcttactgattatcctgaaggtttgtatcatttgagtatcatttaactggccatgtcttagttatgttttgatgttgtgctgctctttcattaataagtattcagggagtgtcaggagtcctggaaagccatagtaattgatgagtttcaagatacaagtgctatgcaatacagtcttcttaaaatgctttcatctcacaatcacataactattgttggtgatgacgaccaggtatgttaaacctgcacatcaatagcttctcagtgaattacctttacttttttgtgttatagtcatcgttattgtatcttaagtttgctttctgttttttaaattaaactgtatttgtgtttctgcagtctattttcagtttcaatggagctgataattctggatttgattcatttcgtaaagattttccaaattacaaggaggtttgcctgctcttagcttcttattgtcacacgtgcttatgcttacacaaagtttcctaaatcacatatttaatggaatgatgaatttcagaatgtttaccattcacaagtgatttagtattattctctatggattaaattttgatatgcctttatgatacaggtcagactgaataagaactataggtccactcgttatattgttgaggccgcatcctctgttatacaaaataatattaaacgatgccgattaaagaatgttgacaccgacaattcatgtggatcaaaggtttcttgcttgtcttctttttctcaccaataaccagagtacaatttgacgtgattttctgtacattggtgctagtaattcatgccctagtttttcttactaaacataggtaatcatcaaagaatgtcacagtgaggatgcacaatgctctttcatcattgacaagatttttgaatctgcaactattgattcaactgctaagtgctcctatggaaatattgcaattctttaccggaggcaggttgatcttgcttactgcttaatttacaggacatcactgggtgtttttcttggatacatgaattgtaagatatgtactttgaatttcatactctgtttatgatgataggtttcggggaaagtcttccaaacagcctttcgagaacgaaaaataccatttaacgttcatggtgtggccttttataggaaaaaggttctagtaaacttttaattgtcagttccttttttcttatatattctccagcttgcagaaatgttaattttttgttctttttgcagaactaagatacttatttctgatgtatttcttctcttctgataggtagtccgggcaattattgctatgcttagaactacattgccaggttgtgatgacggatcgtatcgtcgagtcttcaaggccttacttccttctgaaaaagaggaaaaaaagagggtacttgttcagctctggttattttaattcttgttatagtttttgaggttacatggacattacattctcttatctttgaatctgtctttcaggtaattgaacatattgacaaaatctcaactgttagaaaatgcagctttatttcagccgcttgtgatatctttagtgcaaaagtttccggaacctttaaaaggtttagtagaataaaatattggcataagttggtagatagatgcctcagtttcatcatttactatgcagaatttaacatgtcgtaatggttattattattggcataagtttttatttcattctttttccctttgaatatcaatggttaaaaatatttcaatgaatcttcagttgtgcattgataagtgatccttgtaattgattatagaagtcagctcacacaagggcggaaggtgttgataacgctggagatgatttcaaagctagttaacagggtaaactttttgagtcaagtgcttcctaatatatgcatgattctgtaccatatatggcaatcttatctgtcaatgtttacaggaacaatcaatttcagctgtcattacctcagtggcaaacatggtacctcaggtttgtctttcttccaaagttagacatttataagaacgaagatgtttgatatgagtattgtattgttttaatactgactgatggcctattactttttccttcttttttcctactgacaattttctttttctcagaaataccttcttgagcagcgggcagttgttgatgtagatgcaggaaaatatctcaatgaagataatgatatcagatctgtaagtgtggaatttcataaatttacatttttgtgccaattaccatgtcaattgattccattgaaatacttagttctgtgtttatatactgttgtaatgagatttcttttcagtacaggttcttcagttcctcttggatgatgtatctgaattcttatctactagatgtgtaccaccagaaagggagaaggatctagcagaagagaaaggctgtcatagtgcacttaaggcttttgtagatcttataaccgagagggagacagaaaattttcgttctcgtagagaggataacaaaaattctgtcaccttaactaccatccatcaggttgttttttactttagacactgtctattaattttagggtcttaaaattttatagcaatccagtgtaataaataactattcattagttgaaccctttctaaagctttcttctaaattttttcctttatacagtcgaaagggttggaatgggatactgttttcatagttaaggtacgcctttaacattttagacattgatttgacttttcatgcctattatttatactttgtcagtggctcaggcaaatgaatctgagattccattactccatgaattcaatggtgcagcaaaggaaaatgggacctcagttgaggttcgttttcttaaagatttcttgtacaattctctacatgtatgtattattaaatcaagtacttaatatatttccttgttcaaatataataggaggaacgtcgtttgttttatgttgcgatgacacgtgcccgaaagaaattgtttgttctgtatgtttcaatggattccagtttccaggtttgtatctttatataattttatttcatattattaatacatgtttctgttttctgactgacctaaagctgtctctcttagatactccgaccttcgcgatttctcaacgaaattccagaacatcttcgagaggtccaggtgtgcttttttattgtttcttttaatccttgtattgcaagtgccaaaaataggctataatttaggttcctttcttatacggaaaatgcttaaactggttttcatagggtgaactaagtgtacaactacaaaataagcaccgtgactgctcgaaaagtaccgaccaagtcatggttggtccacatagcaaattggaatcaattgaaacagatacaaatccagatgacttggtccaaatcaaagtgaaagatgatcaagttgagtttgtagaatccatggaggcaggcaatggaaatattttcttgaaaaggttctccacttaaatgtgatggaataacgaatgttgcatttatattggtttttttcttccgtaaattaattttgagctgactttgcgtgttttatcacagatttgatatggaagagagatcaattgtatctcatgtatttcatcagtgggctaagaagaaagcatttcaagatcctaagaggttgcttgataaggtgacatttttgcctagtggatggtgttttaagtttcaattatatggatatagaatatagtattagtgaatcattagcacttgctctaggagaaactcgtataaaatgaataaatatcaatttgcttttaacatacttatgtaaactcctattcaggatgggtcttcttgaaatgcagaaatccatttataacccaacttgcatatttggtgcttaattctcttgaccacttttcatatgtataatttattttcctgtaaattacaggttggctttgtaatcgatgagcgcctacgagtaaagaacaacaagcacaaggtagtatataaatcctagggtcaagtgtgtttgagttgccatatggattatgcctggggatgcttgcttatattgccattattcatacccaagaggggtagctcaaatggtgtagtttgctcccacaggtctgaggttcgagtccctcttgggtacctacatagcaattactatagtataattatatatatattgccattatgcattaatcaataatcatgatatatgtgatctgttgaagttatatgctgaatgatcttcccttcttttggttgtttgctttatttgaaataaacttttatttggttttactgggattttggtctcaaatttctatattaattgtgttattaaagagagaaacagtttatggtacacatgtgaaaataagatctgaagttcatatgttattttgcacatatcctgctatgattaattttaatttatgactttttaaatcgctcaggacgtcttgcgcttgctaaagtcattattgaaatgtgatgaagcatttcaatttgctgagtatgtaagtaattatttagctgtttcaagattttgacattaagatgttctagtaaattattatttgtcaaattgtaagtaaagattattaaaatgaactttgatgtgtgctaactttatgttttaatctccctctccctctctatgtgatgggtctttggtctttcaataggttttaagatgggaacaaatccctgctgaaaggcgtgctcatttgatgcgggaaaaacaggttggttgtcatattttggcttatatctgcaattatattgatctgctttgtttgttcccaatgcaaagttcaatatccctttttgagtttcaagtaatatgtctgagttcacctaatattgggttagcttttccaagttcaaattcctcatagtttagaacattgtttgttttgttttgttagtttgacaagaattcttatttacttttattcttcataacaagttagtggtgtaaaagattcataagttacgtgtttgaattataagggtatgaaaggataaatggtccacatcttggtctaagcgatttcgctgcatcaatgcttgtgcaaatgtgaatttgcttgtttaatttacttctaaaattactgcactttttcttcttgcaggagcatttcctgaaattaaagattgagaactcaatgggttcatcagctccaacagccaaacaggtagctaggctactcaagtacctcataaccaatattttctattgcttatgcatgtcatttagtttcagaatgaattataaagaaactctttaacaataatttactgcgttgattatcagatttcttatctgcaaagtttaggctgcactgtggcccctacatcacgtctccatgcttctcatctgattgagcaatacaaatcattgtgattggagtttgttcattaatagttttctcatgtccagaatctattggtaaattttgatctgtttattaatatatcttctgttgtgaaagtatcagttactgttctaaatgaccatgtattttttttgggtagccattattggatcccttgcttaaatttatgtaaaattataatttcaaaacaatcttcaaattatgggaatatatttatttggtaccctttattttattaaaataaagttttgataccttctaatatctaaaatgcttattgggtaccctctatttgtaaaaatagtaaaaaaatactttgcatataattttggtcaatatttttttatcataccaaaactactcttcattttaactaattaattatttttatatattattcatattttaaaagaaatcatatataaatatatttatatatatatatatatattattttgtattaaataaataagataaatataacatttatcatttctttatagtttagttctcctctatttaaaaaaagttgaagttataatatagaaattcaaatattttgtggagaaaatctaaacgcattttttttttgatgaatcaggaaaattgtattagcacacaaaacttttacaacctaaaagcacctgaattttcaagcctttgatacgtttctatacattttgtatatacatccaataatcaagaatataatctgcaatcacaatgttgaataccatgcacaattttcccaagaaacttttttttggccaaaataagtttatcctttgtttcactccagccttcaattctctacaattttttttgctgtcaggtgccttttcctcccaatagcaagtgtttctcgacttccatatatggtacacgagactggaaattgtagcagcatgaaccagcttacgaaacttgctggtttttgccttttctagccaacgaattaacacagtaagggtctttccttgagttctccattgcagccagcttttaatgttttgtagccaaagatgagtggttggacactcaaagaaaagatgagaatgtgttttaggtagtgaattacaaagcatacatacctgatatgtagtaatccccattttagccaatcggtctcttgtctttagcctttgttggatggctagccagctcacaaaactgtgttttggggtattgagtctcccccaaatttggttactccaatgtacttggttcttgacagaacagtttgtacccttgtgcaattgtgtatttaccatctcattttgtcattttccatctcattttctcaaaaacgtcaattttccaatttaaccatttatatgccaatttcaattatttaataa

SEQ ID NO: 14615 - DNA, 12071 bp, Cannabis sativa
  modified_base (12008)..(12015): a, c, t, g, unknown or other
gtccttgaagaagcaggttgagaattgaaaaaccgagaaacatatgtcaaagcaacttcaccacctggtagtgtagactggtctgatgccaatctattatgagcagatccactacccttgtcatgtggtagatatgcttctccatggctcagtttaatattcccagaaatatttggttgtaatatggaacctgttatctgcatctgagaatcaacctgggcactgcaattataggaacacattagtgttactgtaaactgaagaagtgtgaagattcacacacaaatgcatttcgtacgttaagccatttagaaataagatatgaatttttcacatgatgagaaaatttcatagacccaattttcaaagtcaactcaaaagtctgttatgcatgtaagagaagaaaatatctatatcaaaaaaagcaatgtctaagaggatagcgtaaggaaccttaagatattctttgcgcgtacttcaagaacttcacattttaactctatcttatcgccaacggctgcttcacttgtcctaagaggcaaattcccttttacaaacagcttaccccatctgctaaccctactttccaatgagctgatacataacctattagattttattttaactgcaccaccgaaatttgtcagcggtttccagagtactggagaagatatcgatgccctgttgaatgttgcagatccatcaagcactggttgttcaactgttcctctcacctatatttaggaaacatcccacaagtcaaaaacagtaaatttggaacaattctaatcaaatagctttatattgaaagatggataaataattttaaatagataactcctgtagagaagttttatcgaattggcctacctgtagcataatctcagcattgccatgaagccagttggcatgaggagataaagctgttagcaacatcatgcctccatctttaatatcagcatcgaccctaacttctccaacatctagaatgttccagtttaatccctttaggctttcagctaattgggtatcccaagcctcttcatttctttctcggggaagtttcttgtcactggaatcatcaatggaagccctactatctctttcctttacccaaccacgttcccaagtaacttgactattatcactctctacattgtcgtcttctggcatgttattttggacgaaattaataggaatacttccttggatatgtacatgaccattttgaacaattggttcaaattttgcgttgaatagaaaacgactagttgaagtcaatgaagctacaatttcagctcttccgagatcaatacctccaatggcaccatccaagagccttacttgcacatcacattctggtttggccagagttcctcttagatcaccttccatgtgtaatatacccctaattggtgctaaaaattgccgcaatgattgaatagcatcattagctgacgattcaataacctgaaccagtgtcgggactagactaacaggaaaatttagaacggcaaagtgaagattgttcttaggccccaataaggtcccatctgcatgaattgtggcattgtccttctggatgaaaatttgctccaaatgcagaccatcatcattgctgtaagcaccaaccgcaagaacacgctgagttttgtatgtaccccactcccaatcctcaccatgaaaatcaaattctgcctgaaaacaagaaaaagaaaatagcaatcaaacataatttgcagtaagtatcaaactatcaactcttgcaatggtttctatgcttcaaaattccataaaaatgtgctaagacaaatccaaatagagagtataattactgattgggtgattatagtgcagaaaaagtgttctttttcacgcattaactaacaaaaagagagggaaaaaaagaacactagcgaaattcatcatagttcgtagatctaatatgataagtgcacatcagaacctcatttatgaatctccaaccctcaaaaaagaatcttacaccccagtttagattgatcagtttagacatataaacatcaaaattggtaaggccctaaaggacacatgcacttaccattgtatctccatttccaccaccacttgcttcaagagaaccatgccaatgacctttaagttcagctagaccaggaagactcaaatcttctagaataacttcatttgatgatatgaaatggaaatggataacctgttgtaaattaaccaagtcaaaatgaataaaagatttggtcttgacatgtccatctggaaactagtaaagaaacaaataagagtaaataagaacaaagtttaattctattgtgatacgtacagcatggttttattgttttggtaggaataatttttattaaatatttagtgttttgtcctgttctaataagcataaaatgacttatcaacttcccagaaacaaggcaaaaatcagaaagttgcattgtttgtggttcaactactctcacacaaatatgatactaaacctcatcctttacatttgatatcacttgccagtgatatatctccacttttctagccatcggattaaccattttttagtcactctcatgcaacatacctagtcaattgtcctttttattgttattattaaaaaaaaaaaggttctagtcttgttttgaccaaaaaaagaacaggttctctggagcacctgtgaagaattaagagccagttgaatagaatcattcaactataatccacatgcaaacagaaaatgcagcgttccattgacaaattacctcaagcaattctttcacacttctagggtccaatcccaccgactgcaagctttgaataaagaggtcctgcagagagcaagagaaacattcatggtcaggcactcatatcttttaaagaaatcagatctttattgtgatatatactcattccttaacaaaaaaagggtgaaatacaacctttgatcttgtatgaacagcaggatctgtacttcgagaaataagtcttgcaaggggaagcatctcagcggcctcagctcggggaacttcaatcctcattctccacctccccatcgaagatatgacgctgcctagatgcccagccattgcccttttaaacaatccatctctcaccctgtcagcaagatttcgatctcgggtgccaggcagcacatattcaccatgaagttcataacggctattgctttgctccaacacagttttctcaacagtaatctaagcaataaaaacaagcttgtcagagagagagagagagacaaataaaagtaatttacaatgtaacttttgcataagcagctaaaaaacaatcagaaaggagagaaaatcagttattcattgtcataattattaaatttgtcacaggagttggaatgttggataaaagttagcttagaaaagagtgttccataaaggaattctagatcagttcaattaacaaacaagaacatatttaaggtactcacaacatccccactccatctagcagccacatctaaggcttcacctagcacaccgctgaattttggacgaagtacagatagcagtccatgacctcttcttttctgaagattaagttgaatttctgcctgaaagcaaaaaaaaagagactaatattaatagagaatgcaaggtcgaacataaatgaaccaatcgttaatacataagtaaagtcgcatatgacaatcaaatcacatcataatcagagagagatggaaaccatactatcttactcctttctgtgattcttgaacacatatttacttcttaaggaatctctctaaattccatgactgctataatgggagtcatccacacccaatttaatataacacacacactcaccctcagagatatagaagtttcagtatacatttacaccattctttcagtcactaaataataacaatctaaatgagcaaacctaagttggaagagaaatggaagccataaagtaacaaaatcaagaagtgctgtgactgcttacagcctaccttttgtattgtcccccgcagtgaggccaactccagctcgtcaagcggcaaatgacgcacctgaaacaagcgaacatgatgggtgaaaatcataataaaacttacatatctgcggcttcttttggagcttttcaggtcgccaaataaaactcaattttcagaagttaataaatttacctccaagctagcagagtggaaaggttgaaaacaaatgttagctttcagctgtcccttttgaagggaaaacgacagcaactttccattttgcgaattatcgtcaatgttagggcttaatggcctcacaaacatcagtgcaagactttcatctggcctacctgtggcatccaactgcagtcaccaaaattttgttagttatagcatgttcgcatttttatgtagtaatcaaatataatttaagaagagctgctttagctaccttgacacaatcacgtgaaacgcttaagaatccattcaattgaggtcccaacatcagttgattcaatttgagacctgagatcagaacttcaccagcaagacagcctattttcccttcattactattcacttgttgcgtgttattttcaagactcaaatcttgctcactagatttcaagacctttccctgaaacttgacccttcccgttgctttcaaatgcaacggctttggagaatcagaaagataagctgagaccaagctgaagaactcaaaactacgcatacgcaaatccaactcaatcccctcaacagtaaatggcacagaagtctttgcactaaaatcgtttgtgtttaacccgtattcatcacaataagatgtttgaactttggttgtcaaatcaaaagcaacagatgaagagttaatagttattgaatcatgtgaaattatcatatctccccgagcctcactaaatgacccttcagcctttggtgcagtccatctaatatcaaatttcctatacatgaaaaaaaaacagcataaacaatactgaaaaaaccaaaaaaataaataaataaaagaacttctaaaacacctaaaacaacataacaggttacacagatttcttgttaatgtcttacaaaaattataattaaccatttatatatactacaattcgagaaaacactgaagtttattgattatatgtaggaaatgagaaaacaaataagagaccaaagaggcttacggtttcagcaaagaacccgagagttttgtctctccatttaaatcccctaatttgagtggaatcagttgaagataaccaggcatatatcgatccataattttatcaaagcacatacttccagaaaaattcacatccattgcagtatcatcctcctcaccctgaaaatcaagtattcaacgccaagattgattttcaaaactacttaagcagaagtccaaagattaaatttaaaaggcagaaagaaaaatcatatcatattccaatatttaacagccacttagataaatttcactaatgctaggagaaatgattcccacccacccacaaatattaagtctttatgaactgactgaaaattaaaaagataacaatagtaagacataatatcacgaaaccacagatatctaaatacagcaaatttttaagaagcataccattgcgagatcattaaccttacagccaaaatgattaaagaaaattgagaagtaaatttgtgaaaggagaacatcaaagcacattatgaagaagcatttatgctgtcatttgagttaagagtaaccgtatgtgtaaagacgatccagcaacagagaactcgtgctaatagcagagcattcggtgagatcaacaacaagaaagacaggctgtctcgtatgaaaataatatacctctgggcaaatccatgcattccctgcacctcgaatttcaccaccatccacaagactagctcgaattccatacaaagtcagccatctagagcaaaaaaacagcttcacaataatataaccagacatgcataaattatgacttactattcaaaactcaattagttagcattaacaaacttacacaattgtcagtattgaaagtgaagttggctgataaatacgaaaagggaatgcgatcaaatgctgccactgcaccagcctccttactttttagaacagcttcagatgcacaggatggaggaaactcagaagctaaatgagacatctttctagaaaccattccacttcctacaaatactggagcatctagtggaccttgacaattaaatacagcagtcactgaaccagccagctgcaatcaatagagaatagtatgaacgaaagtatactgatattccctgcctagccctccctttttaaaggcaatgtctaccacattactgaagtatgttttcttcatccaacatgctccaccattagtttacagattttttttttctttttttgttcatcaagctttcaagcatctttttcagtcgctgcttaatctcacaacatcaagcaacatttcatcaaatcattgttgattttgatctgtggtttatatcaattattgctataagcctataaccattattgcttctccatgaaagaattactaacaaccacagtaaagataatttttccattttaattataaaaagtagtatgaagatcaaaaagctcaagatgcacataccggaaacaagagaggtttcatcttgaaagtattcatcaaagcatttacttcgacacagggaacctacgaataacagtttcataaatattatgagtttaccgaagcactaaacacagaataagaataacaggaaaggacaagaaggaacccatgaataagagttttatatatattttgaggttgctcaaacataacgaggaatatcacactctcattaaaagaggaggtctactattagaaaatctgacaataacttttgttgaaaaaaatatgtatgtagacaggaattaagatagactgaggacatatttatttgcaactgttttcccattcattctcttgttgctaaggatttttttcaaacagcctaggtactaactattaaacatccaaaccaaattccaaaaataaaatgttgtgagaaaaattctatttaattatattgttgttgcaataagagagaggggacagaaaaccaaggctgcatcagcaggcctgagttagctcctaaaatctcattgataatcaccgagatataggaatcctttctaacattgtttaataaaaatgaattgagaaatggcaactctgttccgtggtcaaaggcagacttcaggaaagacaacaataggtcggttgggcagagtttgacaaaaaccaatttcctacttttgctaaacaccatggaatgacaattcaatctttgtaaataagatatatacaagtataaataaataaatgtgtactttaaacaagattcttgggagtaaagaaacctttataaacttcttgtaatgattgatattcatcattcaacgtaagagacatttgcataaaacactaaccaagtatttacaaaaaattatcatccgccttttagctcattaaaattatgcaaccaaacaagaagtaagctaagaagatacctgacacataacatgaaactctccctcgtcgggatgaattccgaaatctcccgaggcctctaaaggaactgcaccaaaagacccatgtgcattgtgtaggaatattcgttggccacggaaacataagcttgctgaaacatcctgtacaagaggcatgcacaataaaacaaaagaactgtttcaaaaaaaaaatctatatttttcttttttattaagctaaaaaatacaaatatagcctaacattttgaaaaaaggtgacgaactctaattaggcatcatttatttcctcaaccatcaatgaaaatgaaagtagaacatacagaaaaacaagatggagcgtcaagtatttgaaaagctaagcctgttacatcaagttgcccatggagatttggaaatgtttctcccgtagacatgcacacatgaacctgaaagaaaaaaatctcaagataagccaaattttataagaaagagataactagcggctactgtaaacaatactgggtttcccactatcaagtaataaaacaaataacaaaacaatatatatgactttacaccttgccatcaaatcaagatagataacaaaaatataaatgagaacaaaaagggaacccagaaagcatctgtgatagttaaaagttcaatgcagctaataaagcatcaaatacaaatatgagagtagtggttcagggttcagcggtataaagtctgagatgcatccaatgtaatcatgacaacgtcaagtaaaactgaaattaaaagcatagaaaagtacctcgcctgtggctctacctttggaccactcgattggaatttctaaaattctctcaaaaagctgcagaaaaacaaggcatttaaacattcttatagccaaaagtccaaaagaaaagtttgacagtatcaacaatttatcaatttaacatgttgtataccttaccggagcaaataagttagcaattttcaagttggcgtgccatttctgttcaacaatgtcaacaaaaacatctgcagacaaccaaccaccatcttcccacatcatatctgacaaatctgatctccacatcatacagttcccactcaattgtacatgaacttggccgtagtgattttgaaacttcacatgtccactgacattctccatttccctatacaatataatgatttgttatttaaaagttagaatcagtaaacgataatgatataaggatttccatcaacactatattgtgggtttcgtatccaccagtaccattatcaaaggcgtgagctttattataataaggcaagctcatcattataaataaataaacatgatcatagaaatcacaactaaattagaccaacacatcaatcttggaaacaaaatctttggtcaaaatgcaaaactactgaaaataaatcaacagtaagtcactcagaaacataacagaaacagctcgcaccttggttccatgtcaccatatgcaagtagcattagcgttccacttttgaaataaacagaatctagcgtaactgggaacattttctcaatgcttgcatcatgcactgtatctaccccatcaacaagttctgcaacaatatcttcaactctaggacccatagttgatgttagcttttgaatgggaccagtgactaagcaagataacaactccttcatatttcttgaaaaattgggaaaactcgatatcaaggattggggccagattaaaattggacgatcaacttcaagttgtatggaagatgaggttagtgatgaaagattatcttggctctcaaatatctcatcattggtactctcattgactacatcacctcctacatcctcacttttcatacaagaatcactattattagatcgagcaagacttgtgatagaagtactggcattagtatcaacctcatttttcactgtaaaattgtcaaaattcgtaacattatcacctccaaacgaatttgaagactcactagactttcgatgcagtccctgaaaatatgcagcagccgatattgcacttcgcccgagaattcttcttttggcagtcaaggtagatactgaggtatcacttccattagctttcttcttgaatttctgttttttagggccctgtatcactttggaccagaatttaagcccggaacctggaacttttacaccaaaagatttctccaaatctgcatgcttcatgtcatactcaacacctgtgtccaggcaatgatgacctctcaaatgcatcttctcatccatgcataaaaaagagtctaaacttgtaaatgctattaattgactgccactttccttcataacatcacctccatattgactagattccttgtcagaaacaatataacccatttctgcagcttttttggctgattcatccctttcactttcccagcgagaaccagcttcctctctagcaatcctcctggtttttgtacggtaatcgattccttcttcagttgacaaacgtctctttgaatcatcttccattgaaggtattcctagccaactaaaatctttcttctgtgagaccaataaagttggatgagacaacactgcatcaaccacaatctttccccttctcaaactagcaaaaggacggattcgaattttcatcgtgggtacctccccacaagaaaattcttcattatgagtccctactgagcacgactctaatgtaatgctcaaaggtgaaatacttcgtaccttaccaaaatcaagatctcgttgtatgtaatcactaagtgatgaacaaacagacggtaaaagtttagcttcgataaaccctttggcttttgccttcccataccatactaataagcacactccagagatcacagctacaagaacagaacacctaacaaaaagtaatccctcattccgcaaatgggacagagaactcaccaaagccttgcttcgagtaagacgctcttcaacacattttactttggtttcatatctagagcttagagtactctttaacaactccacattgtgtccacaaaaatgtgaaaacctaatcacttgagttatccaatgattctgctttgcacatacacacctgcgatatcgccttctacccaacaaccctccatccaagtaaccaaaacctcccacttttccaccatatgaagaagatccatgaagcggagccccaagaaaagggcaatggagtctcaaactcatggtctgttgcacctacataatcgctacacaattcggactcatatgttggaaatggggaccaagaagcccctccaagtcccctgacaaatcacagcattacaaaaggagcagccactccaacctaatcaagaaacaataccatgttccattaaacatcatccatacaaaatgtaaagcatttgaaacaacaccacaaaatcaagaatattaaaaacaaaaaaaaaaaccaccaagcattgttattactatcattattttggtttttaaaggaaaaaaaagtcatttcttagttttttcttaacactatttagaattgctttgatttactttataatacaccgacacgatttttattatattgtgctgatactttcttctcggttccttcttccagaacgcgagctcggagaaggaagagataagagaaccctatgtggtcagaaatcataatagaatccgaccacaacgaccgagtataatattgagataagctaatttagagagttaacaatattgcataataattattaaattaatttgataacagtatgacacttctggtgctattttagtatgctattttagtatgccgccattgaaatcgaaaaattaataagattgtgatataaattccacaaataaatttctccatcaaattcatttattctagaaagaaaaaaatttaccttaaatagaaagataatgttgaacagttcaaatataatgcaaaatttgaaatgaaaatcctcaaaccgaaaacgcataaacacagagtactcctttgtctaacaaataattcacaaaacctataatttcaacaacaaaatgtaagacattagcttcagcattttcactgaccttctccttgtttgcaggcattgagctcccatgcagagtcaggttcgttgtctggcgaatcagtataactattcaattaccaagaatcgaaaactaagcattgataaagaaaaaaaaaatcaggaattgagaaactaatgacagtggcgtaatttagggaagtagtagagattgattgcaacgagtgcccaaacaaaagacaaagaagaataaaaggaaaaggttatagagtgattggagaggtgaagaggaagaaaaacgaataacctgccggaaaatttgactgagagagccgaggcgatttgcagcgagctagaacagcatcttcgacggaggaaactacacgctttagtattttcccaccttttacaataataataataataatnnnnnnnntaataataataataataaatatgtctaaattgtaatgtaaataaataaattggact

SEQ ID NO: 14616 - DNA, 9234 bp, Cannabis sativa
attggatttttatttatgcagcattcgattgattactggctttgggctgatttgattgcccctgaatcagagaggcttttgaaaactgttgtgagagttgataagcaggaagaagctgatttgttctacatacctttcttcaccaccattagtttcttcttaatggagaaacaacaatgcaaagctctttacagggtgtgagtgcacttccatctttttattattattatcattattaatggatatagataatgccatgctgagacattagtataataccttaatttcttattcaattcacgaaacttgttctctaaagaagtaaagttgagcatttgtgtcatcttattgaaatgtatgatgttttaactgaaaatatggaatgaatgatgtcagtctgttcttgagtttttaatgaagcgttctcctaaataaaggaagttttagtgtccatcttattaatggattgataagagcttataacatgcttagacattactgcaatacctgaatttcttcttcagttcatgaaacttgttccctatagaagtaaagttaagcatttgtgtcatctttctgaactgcatgatgttgtaagtaaaattatggaatgaatgatgtcagccagttcttgagttgttattgaaccatttccctatatataggaagttttggtgtccatcttattattggatagctatgagcttaatgccatgctctactgtactgcaataccttaatatcttcttctattcataaaacttgttgtctatagaagaaaagctgctcattcgttgtcatcttactgaactgcatgatgttttttcaacaaaaatcattgaatgaatgatgccagccagttcttgagattttaattaacgatttctctatatataggaaatttcatgtccatcttattaattgattgataagagcttgatgacatggttaaacagtagtacaatacctgaacttcttcaataaatggaacttgttctttttatgtagaagttgagcatttgtgtcatctttacggatttacatgaacccattcttgagtttttaatgagctgttactattgatgtaggaagctttgaaatggataacagaccaacctgcatggaaacgatctgaaggaagagatcacatacttccagttcatcatccatggtcgttcaagtctgttcgcagatttgtcaagaaggcaatttggctgctacctgatatggactctactgggaactggttactatacaactccctgctatgctttttgtgatctttactcactgtagaacttgcactttaacaatttttttactcaactgtgtttaggtacaaaccaggacaagttttcctggagaaagatctaattcttccttatgttcctaatgttgaattatgcgatgctaaatgtttagctgcaactgaactgaaaagaaccacccttattttcttccgcgggagacttaagagaaatgctgtaagactgtttttattttatgagaaattttcttgcacatgggattttgatttactctattcatacgggtggaattgttgtttcagtttcgatagctccttattcattcctcattcttatttttagttcattttattcatttttcgtagttacattctaactttttgttttcagggtggtaaaatacgagcaaaacttgtatcagaacttagtggtgccgagggtgtagttatagaggagggatcggctggagagggaggaaaactagctgctcagaatggaatgcgcaagtaaagttgtgttgattttcactcatgttctatgatgtgatttgtttctttgtcataattattaaatttctttctctgttatcagatctatattctgtttaagcccagctggggatactccatcatctgctagactgtttgatgctattgtcagtggttgcataccagttatagtcagtgatgaactcgagcttccttttgaaggaatactagactatagaaaggtaatgttaaataattcttgtatttattttttctcttataattgatagccatattgagtgaggggtttctattaatgatgttaattgagtatgatgttacatgcgtaagggcttctgttagttgggaaaagcttctcttaatttgagcatctgtttttagttttagtatagttatagagaaatcggtatgcatcaattacaatgagcttatacccttcactcaattgattctaaatcccggtgtaatggggaatttttcggtgttagagaatttaaaattccagctgaatcatttgataatcatgtaattagatagtctgtccttacggccttgcattttcggttgagcaactacaattacacatcatctctttcgaccttcttttatttttgcaaatgtcaactccggtcttctaaacttaatgcagatagcagtatttgtttcttccggtgatgctgtacaacccggttggcttttaaattttctcaaaagtattactcgttctcaaattagtgaaatgagacgaaatcttgccaaggtttgtgattcctccattcttcatacgctggtccggctatgtttcaaaattgtttagagttaactttgttataacaattttgtttcatttcagtactcgaggcatttcgtatactccaacccagctcaacccttaggccccgaagacttggtgtggagaatggtacgtttttcttcgtgttaatttcggaactgattgtattcgtattcactcttggaaacactatgatttactgaatgaatgaacagatggctggtaagttggtgaatatcaagcttcatactcgaagatcacaacgtctggtcaaggagtcccgaagcatctgctcatgcgactgcaggcgtgccaacgaaacgattccgactcccattttgtaatcaattttcacttgtctccatatataacatatcatagtaacacaaatctatatatgtcaagtgtgttcattcttttgtttttcatatttaggaaaatctttctataaaccagttcatgataatctcttctcaatagttaaattttggccaatcttggattgatttttagtttgaaattacccttgtaattgttcaaaacctcattaagattgttcatgtgtaattgattaaatagttgtttaaaactactaaattactttttgatatttatttattggttagacatgaaattggggtacctaaattagacaataataacaataataaaaattcttgatttatttcaattaatttacacgtaaatgctaccataataaagaacaataagaatgcatgcaaaggttatgaaagtgagttgttgaggcatcattcttgcatgtccaacttaatccactttttagccaaaaaattaagaaaagaaaccagcccataataaggctttaccatgagttgaatttattggtaaaaaccaataagaaatcttaagctttgatggcgaccaatttgcgcttgttggttctgatggcattgctatccctagtttcttcggtggacattcccccgggaatccaaaacgaagacctcgttattgctgcttcggagatgcagagagcaaattacttcacttttgttttgctcctcaacatggctaaattggatcgaaggcttcaaggtaatatcaccttcttgatgcccaacgatcggatgctgtcgaaaattgccctagagccacatgccatctccgacttcttgcttcgccactcaattccttctaccatgcttttcgactacttgcaccatataccaacaggctcaacaattccgagctcaaaacgggattacatgcttaagatttccaataatggtaggtggagtttctttctcaacaatgtgaaactcattagtccaaatatatgcactgcaagctcctccgttcgatgtcatggcatagatggcgttctgtctctggctatgcctatgagtaactctaccaccgaaattgcttctccttcatctatttgttttagtagcccaaattcatcgcctccagcaataacaccaccatcaccatcaccaccatcatcatcgtcgtcatcacctttttctttagcgacgggagctagtggccttaatatgacaccggccgctggccctagtgtaagtccaccgaaatcagggtcttctacgatttcaatattttcagttacatatatgttgttgtcactttggatttcttctctatgtattgttctttagcttccaaaaagagcaatttattattaattcaatctccaaaggagtgttcttggactctctatctattattaacaagctcaatcaaacaaaacataaagcaattggctttgtaacttgtatgccatatattttatttatttggtataaatataagtctcaagatggaagattttagagttgatgcctctgaatattaatagctttgcaaaaattcataacaaaaatggaaaacacctgattcaactaagaaattacttaaaaaagtgttcaattgtataatttagtatacaaaatttcatttatggtaagaatcgaatggatagggaaagttaaaacaaataaagattcgtttttctacaatcgactgaagtgtacttcatcatcatcatcgatgacaaggggttgcaaaatctgttatcgatgaaatataagttgctcggatatcatcaggcagtaatgtaggtcatgacactcttatgatacagcagcaacgcgagtgtaagctacgtctttaactttcttttgcttcttcctctctttatgcttgtctgattttcgcttcttcaaggatgcctttgggttcaacccttcttcatctgcctgttgttgttccttgtctgcattttctgaatgagctttcgattcccttgcatcagttttcggttcaatgactgacattcctgtaagagtgtagtctaacaaatatgtgcttctcacaagcctgtctacccggctaaaatgcctctgagaatatggtaggagcccttcaaggagttccgaaatacctttaatctggaatatttcatggtatttataaaaatgtcagagcaattcacgatatatatttagaattaatactcaaagtccaggcaaagaagcaacctcaataatctcggttgggggcacgttgttgaaaactctgaaaagcacaaattgtgcaacatgacacagtttcggtttagtattccattctcgaacatactccagaagtaaccggaattcttccttgttaagagcctgaagggctttctgtatctggttttcagcttctctcttcctgcaaagtactcgattgagaaatacgccaacacgtggaaataggaagaaaaggtttaagacaatcgcaaacctgcaaagttcagcaaacagctcgaaaagcttgtgaggcctacgtagctcgaaagcaatttgtattgcttttgtataatcagcatccactatagcattctgaagttcttgaccctttagaacaccttcttcctgcatcaacattaccaacatagtatatttatcatgtgggaagtgcttccttcataagcacacacccaaaaaacttgtgtataaattacgaactctaacctctctctggaaagcttcctctttatcagaagcagtagaatcgtgccatagattgacaacagcatcaccgccacctgtggctaacatttctgtcttcttccctaccgccaaagcccaaacctgcaggacaatttagtactccttaaaatttaaatcatccaattatatatttcggaaaaggattcagcataaagtctttcttcttcattagaaatcatatctaaatgcattgattacatgaattgaatttaactgtcaaacgcccccaccaactgttaggccacctatatggtttactaacactagaaggaaaaaaagaacttaggctaatgttagtaagaaagcttggaaggttgtagtagaagcgagttcaataaagatctcggagaagttactcaaaaacattgttctaactgtcttgatagaaaagagagaaaatgttcaccaatctagcaccctttttcttaattatggtattttgtacacttcaaaggaaatagattctagtcaattcaactatacaagcctacaacatcttttatctattttgagcaagtaccttatcctcatgatgatcatatgtagcaatacattcattggttttgactgtccatagctttactaaaccatcggcacctgaaaccatcatcaattcgatcaaaaatgacatcaagcaaggtggaagagaaaagtataaattcaatcaagcattagcctcattaccagaagagacaaattgagtcccgcgagtaataaatgatgctcttaacacacttgaggtatgaccctcgaatgttttcaagcatgaaccatcagttatatcccatagctttattgtcttgtctcctgatgatgttatgacacattgatcaactggagaaaactcaactgaccaaatcccccttttatgccctttaagtacagctccaggtacaagatccggcagcttccataaacgagcagtgcgatcctgattacccaagaaaggacatatgtataaatcaatgagaaaatttatgtgcttcaaagaggacaagaccatgacagattaagataaacacttactaacctgggaaccactacaaacaagactatcattgggtgcaatagccaaagaattgatatccttatcgtgtgctgcgacaacagctttggcttgcaaatccacaggttgttccacatcatctgaaagaccatcgaagttccacaccttgatggtacgatcactgaacacaaatcaaaccaaacaaattatgaaaagaaaagcagagccttatatcatataacagcagccgagcctatcagtatgtttccaaaatattcgtatacagaagcaaaatggaaaacgtcaatattaacaaacgaatcgtcggatataaagaccaagtagaaacaccaaattaagctaaagggaattcatttttcactcatctaaataaacaaatacagagactcaagagtagctcaaatggtcaggcatatggtttcctaggtacctacatagcaattgctatagtttcctggtcccaaatattgtggggaacctggcaacagattttaacaaggtttgagatcacaccatcacaatagagagtttttgcattctcacctgctaccgctaacaaagaaggatttccctttcttagaaaaggcgacggctccaacagcacccatatgacctacacagtcgccaaggcaacgtccagtttccgagtcccacaatctaacctatacatataatcaagtcagaaatttgaaaaattacaagtatacggaatgcactagaaaaatcaatcgactgaagaaaattgacgagaaattgaagcttacacttttgtccttactgccagttacaataagtgtttgtccagagctcgacacacaggtgtccaaacttaaaatagtttcagtatgacccgccaatacatagtgacacgacattgatgcaaggtcgtacactcgtacctgcaaatttacaaattgtatagcgtgatcagagataagaccttagaatatatgtgatgtttgatgaaggagctagaatcacagacccttcacggaaataaggatataaaaatttcaagcaaatgacctgttcggtatttgaagcaacagcaagatatttctcttcattgcctaagaacttcatatcaacaatttcctcattgtatcctacaagtcttttgctcatgactatatcaaagatcccttcaggttgtttcacaggggaatacacaagaagttgttgatcaacagtcacacaaagcaatccttgatccaagggaagcataacagcagtagcgaaaccccttttgctgccatcctcatctgaactaaccgtaacatctgaagactgttgttcaaacagacaggctgctctgtcaaaataaatacatttgacaaaaacaaactcatcaaatataactcaaagtgaacaaaatcttacaaaaataaaatgtcacatggaaaacacccccatggcttacctttcagaattccatattcgtacaatcccacgctcaccgacagttacaaaataaattccttgtgacccacttttctttccactctgttccaaacacggcacaaaaggagttgaagaatgaatgacacacacagcttcaacagcttcgtatgtcaataccgtctttttgcaactgtagtctagaagatcccataacatcacaacctgaaatcaagtaaaacatcagctagaatcttcaaactataaaaaccagaaggtctctgcatgagcaatgaaatagtcataaccttatctcttccagcactaagcaacatcccaccatcttcagatatagctattgaagtaacagttgaattatgtcccccaagtgttgcaacacacttcttagtcaaaagatcccaaacttttacagttgtatcatcacttgcggaaaatagctatgatttgtaaatgagaaaatggtcaattaaatcaaacatgcatcaaaaataagaacaactagtgttttataaaagtagtctttatgaaaacttttattagcaaaataatttcacaaaaattttttttagcacaataactatgtatggtcccacaagcgaccatagatttacaaagtgcaaccgtcacaatcgtatagagtagattgagtgtggttattttgtaattttactaatttacattgctagttatgcatggaaaataagaacaccattcagcaagaatgagggattcaaaatgcttcatttcctttaaagctaataagtgcatatcatacatacatatattgatagactgaaaatattatagggacttattagtcatttgcatgtagtgagaaagcctataaatatgtaattggatagaaattaatggatatagaatgagaaaatagaacttctgttcattccgagattgacaaagtctcaaagagtgctttcattgagttcaactctcagtgaaaacaataatgatagataatgggtcctcttcgaaacaggactaatctccaaatgcactctttgagatagtgccaatctcccgataaactgaagtccaaatgcactcttcgagacaatgccaatctcccgatgaaccaaagttctatgactaataagcccctatagtattttcatagtcttaacatatatatatatatata

SEQ ID NO: 14617 - DNA, 22370 bp, Cannabis sativa
  modified_base (2721)..(2728): a, c, t, g, unknown or other
  modified_base (2990)..(2991): a, c, t, g, unknown or other
  modified_base (3080)..(3104): a, c, t, g, unknown or other
  modified_base (3701)..(3714): a, c, t, g, unknown or other
tgctgcaagagctgccatcagagcagcaagaaaacaaatcaattcatggggaagcccgggcggatctgactccatattccaattggatgttcctgctactatgccagttgtgaaggaattatgtggactggacattgtggagaggtacttggaatggaaaaaaggcggagactgaagacgctacagacgcaacttaagcattgtttatcgttcatgcctcgtctctaaaataaaacctcattatgatatgaataagatctgttagatcagtataaattatttttctttcattcttggttacaaataatttcacattaaatatagatttagtgtactctgtacacaaataagcattatgcaaaagggaaaagtatttgtgctttatatatgatggtgttttgtctcagtaaaatcttgttatagatttcctaaatattgttgtgttatcgtggtgtttctaaaaagactattatcaccaaattttatagctaatatctcaatagtattatatcataatttttaatgaaaattacacctgcatcttaattatagacatttcatactatttttattcataacacaggccaaattagaagaaaagcaaaacgataaaagtagacatttcaaatgtattcaaagcgtgttggctggtatccttttttgaaccattcatcttgtaagatttcagaaattgttattctctgccccaaaaaaagaaacaaagaatagtatcaattaacaaaaagcaaccaaatttcatcatcaaagtataagtgggcagggttgtgtatgaaaaccaaggtagacatccaaattcagccttgcaaatctaattttgataaagtagaatacattagtgtgtgtgtgtgtgtcatgtacgtaagtgacaatgccatcatatgtgtgtgtgtgtgtaattaacagaagaagaaaatatagttacctttttgtacaaaggcatgagatttggctcattaaaaggcaggtaaccatccatgaggacaaagaaaataaccccacaagaccaaacaccacacgatgtgccatcataacctttactagtgagcacttgtcataaaaatactatacatgagtaatgcatatacagtgcaatatacaacacatgattgtcaattgcattattattttaagatagtaaaatcttgtattaatatactatgtgattaaaaaattaaataccacagagaaaaacatctagcaaacacaaaattgttatacatatattattcacaaaatgtgactagatgacatgcataatgcttttgacacatgtcatgaaaatatgtgaaggaaactgtgccagatttgggtgccaaacctcagctaggattaggcttcggctgggcacaaggacgaaaaaatggtctcaatgaatagatggcgtttttctttcatcaaaaagacaaaactaagttggtgtaacacccccatttcacctgtgtagtcctgtaccaacacaatatacacgggtacgctactttggctattttttggaatgatgactggccctacaaaccaacatgtatcttttaaacgtgtttggtcctcactcgcacacttcctggttagttaacatactaggaggtcacctatcctgaaattgttctaagtcgagcacacttaactttggatttcttaagtgatgggctacgaaaaagaatatgcatcttgttgatataggtagtactcaacaatccattttcgtcatcttcaactgtgtagtcttttaccgacatagtcttaaaatcataacacttaacctacctcaggtgatgttggattgtgcagcttacctgatcttttccctgacagatcatgggacttaaactatcacagctgggcattgggcccaatgcctagattaaccctataggcgcccaagttgatgttgttggtaatttatagttttgcaataatcaattagaatcaaatagtaatgttttcttgaaaagtttacaaccgagataaaagttcaagattcacattgaattagaatcttgattttcaagaaaggatatcttgaacctaaaattagattaaacaatatggatcaaattaatacaatggaatgacgtgataatgtgtatcaaaacagtaggagatgcaaagtatgaacataactaaagagggtaaaaacacaaagattagggttaaagagatataacccaaattagtaactagaggcttgacacatttgataaatgttgtccaaaatctttattcctaagcccccatttcataaagtttcttacaccttcgataattattatgtcatttccaaggcattggtaaaatatactagtatcggatatatggagtatacattagactggaccgatattgaacttggtaaagatatcataaatttactgttatatctttctaagtcaatatcaccaagttgatcttagatcaaaagatcttaatcctaatatggttaggtccaatctcaagtgtgttatttatgttcttagagttgttcgttaaagcttaccaattggtttgggccaatacttacatcttggaaacatgatagtacaattgagtgggagcactaatcatagatacggaatttatagcttctatctagacatagaactgaaatgatgatttccttcgagcttagcttaatagagataaatggaatagctcttatttcagtaattatattagtctactgaaatattatttataggaagnnnnnnnntttaaggataaaatacgttgaggggtagaatggtaaatttatccctactcgatgtaaatcatctattgaggatctttgattatttggaatataacgatggataattaatagcgtatctatatcttggaacatataaagcattctatataattaagagtacaattctgaacttatagtggcgcaaggaggaattaataagttagagaatttactcggtaaattctagatctacttattggaagcttgattatataggctcatnntccccacactagttgagataataatgcgtgtagactcagttatttggttttaattaattaattataatattaaaattagactatgtctnnnnnnnnnnnnnnnnnnnnnnnnnggcttaattgtgaagaaaatatattttagtgtttatttattaattaaaaagactttgtacggtctaattaataaataagttaaataacaattgtatttgataactaattttaattattgaagaattagttttgatatttaaaggattgaaattagaaaatattgcattagtgaaagaaaagataaattattgaataaaatggcaaaattgtaactagtgaggcccattgtatggccgaccacttaaggagtatttttagcctatttttatctttttttttaattctacataatttaaatctaaccctaagagaaatcctatataaggaataagatgactctcattctcatccatccatctataataatttagttttctaactttgtcagacaactagaaatcgggagcctccttctacagatttcgaattctccttctctctttctcttcagaaattttgagcccttagtgatagagtacatgttcactcatatcaagtcaagtaccaatcatagtgtggaagattgtaaagaattcaacacctgaaggagatccaggctcagatcttgttattactctacgatagaaaggaacaannnnnnnnnnnnnnagtggaaggagacatattattctattgccaccaatgtaaggttttcttaactttatatgtgtttattttcattggtttaggaattcatgtttagggtgttaaattatagattataattaacatacatgttagtaatctagatcctggtaaaataatttccaacaagttgtccctgtgttaaaatgacttgaaaaaggtttttagcgactcaccaggtggttgtttcatgtttgtcaatgatgaagcttctggtctcatggttctcgcagcttgaaattgctttttaaattcttgcaacaattgttcccatgaggttattgaatgtcgagtaaacttatcaaaccaactctttattactctagttaaggaagtagggaataacatacatcacaaattaagtccaacattgttagctcgcttgatggtgttaaaatactcaagtgcccaacaaaatttgtagttccactgtacagagtgacttgaggatttttgaatcctttagggaaaattgagtttgttatatttgaatgaaagggttcaggttcctcgtcgaaatcatagccgggcaacttcccatactcaccatgttcatactttctaaacttttcctccaattgtgtgaccatcaattgaattcggtcatctagaatttgattattcctcacacaaataaggtatgtttctatttaaatgttcacgaaggtttggaacattacaattcatatgttctcgcaaatcgaattgtctccgattcaaatgttcccaaaaatcaagttcacatcattgtttgcgacgtcgccctctccttgtatcataattgcttaccgacctcgtagtcgagacactctcagtttgataactttgaaaatcattaatactggtctgctcatctctgttattgtctcaggtattatgtctttcatgttaggaagcttctcgtgtttgggatcacgaggattgacttcgtgtttggcttcttgattcattggcaatagtgtttgattttgtcctttaggaatgggcttctcgcttgggttggcatcgttaatacaagtttgacatgtgattccttccaaggaaggtacatctgacccctagcagtcctttgtggacctcacggtggtctagaatgattttctggtcgagcaacattttattttggtggaggcccctcattcttgcaagaggtttttggtgcttctggtcgcaatttcttggcattcgtatttttgtgattttgatgaatttccctggtatttcttgggtgttgcttctggggatttgtagggttttcctaattgttctcttcgacaagggaatccatatttctccttgtcctagatccacaaggcctcccttgtggattccttataggtggattcgtttgtggtgtgccaccctgagctgcccttgccacttcaacctcacgttctatttccgcattccttcaatttgattcaaccaatctttactaaagttgtcaattttatagttttacaagcagaacgtaatgagttgggtcataggctccaggatctcttctccctagaatttccgcttcattttcatttctttcaaagttccattgagttggacttcttccgacatcctggtcttctggggggttcccttcgggctcttttctacggcgatgcatcgtctattctatttcgacattgttattctgtgaattattttccatgacaagaaaatattcagtaaactttcctaggggagatgggttttttaaagtttaaatttcaagaagctttcaatgaaagcaccaaattgttaactcataatttctttaatattaatgagactcttgataattaatgatctgtaatagatattataagaaaattaataatatatctataaagaaacaaacttttacgtggttttgtagttaaaatctacatactccatgagtccctcttaattctaagttttatgattaaaagatataacttagcatcaattctctcaatcgggaaagaactcgacatctcctttacaatgacttttgccactatttataggaacttagcctgacagttattctttctaatcttatctatatgatggttcatgaaatgtggacattccccatgtttcatgttattttatcttcaaacggttatttaccaaactgtctttcagttcaatatttatcctcgcaaataacatatgaatcaacattcaccgttaggatgcttcttgctgattaattgaacattcttcttgaaataatttatcctaaatgacatattggataattgttgtatgaccccttcaggcaaaattcttcaaattgtatttcttgtgtttctcgtgataaaagcattcgatcttacaaccagctaaaactttttcttctcgctaaactttattttatttgtacagtatttttcgatgagactatattatatgtctttagtcttgattgcatactatttaatgaccaatacatttaacttttatggtacagggcaagactctaaattctatatcatatgagtattatttgaaacacattaaacgccatattatttctccttaatatgcgagtctattaaattttaattgcttgtacacgtgtcatgattatattcacggctcaaaatatgaatttaacatgattacaacaaacataagcaaccgtaatactatgtcctaatagtaataactcctaagatttcttctttttttttctttccttttcttttgtaaggtaataactcagatttgttttggcataaacgccaactatcttccttaaaatcttaccataagcatcacaaatttacattttaattttgcaataataagggttaatttaataattttttaaaaataattcaaaaaagagtgtctgcccatgttcatgctctgtggcagttttttagttttttacagttattttcgatcaccacttccccttttctctattctccactactaattaccaccgtgtaattctgatattacacaccagtatttagtaactggttctctgcatttgttgtttcaatccttgttttacatcagttaccttttctactcatcaatgaatccactcctacacaagatgaaacccacaatgacattaaccgaaatgaaagcactattttggccatcactgatgatggtattgatactgaagtaacacaggagtttattctgatcgctcgtgttcttacaagtaaaaaagtgtggttaactactcttcaacgacagatggtggaaatttgggatggaaggttcaaagttaatattaaagaacatcactctgatttgttcttgctttgtttcggatgtgaaggagatcgaattcgggcattagaaaaggagtcgtggcacttccaaaaccaccacattgtccttcttgatccaactttgcatcaaaatgtgactcctgaaatcatggctcattctcctttttgggtgcaagcctatagactaccattcttgagtaagtctagatctttggctaaatcgttggcctcaattctgggagaatttttggatgtccatgatgattctttcaacgaaggttgggggccttttttacgtttttgggtcaaaattgacataacgaaaccactcttgaggggttagatgattactcttcctaagattaaggatgagttttggattgagtttcgatatgagcgtttaccagactattgtatggagtgtgggctaattgggcatctttcaaaagtgtcctgtttttcttgagaagttggataatggagtggaacctgaactaccatatggaccagaatcgaaaggatcaagattacctacttcttcctatatgatcgctatcgtactaattttccaaagggtaatgcatggcctttactcactcatttggcaagaacttcattgactgcaactcttcccaaactacgctctactcctcaaccgcaaccaagatctttactgttgggtgaatcttcaaattctactacagcaacacaagttaattacccatcacacaatgttccacccgttaatgtggtgtcgactgacactaccactaactttcatgttactcaacctctgattgcaccattgttcacaccactttttcttaacaacatatccttcagtaaatctccagattgttcctttaatgcttcaaccatttcccctgccattgattatcactcaaaaaataaaggaaaaattgttcttacttccagtagcagctcgaattctcttgctatgcttgatgtttgcacaccatatttagcgaaagacgccattgttcattcaggcaattgctcttccagtgtttttgcattataccccctttaacaaacacgatccatggcaaaacactacccctacaaccattaactgctattgctgtcaccactacagtagtctcaactatttctcctgctactttgcacactactatgacgacactcaaaggccaagagaatgctcaacccaaccgtactttcaaaagacaatttgacactaattcaatgagacaaactctcaaaagatgtcgagccaaccaatctgaaatggtttcttccttgtcagaagaaactggtccaactcagttcgtttctactgctggtgtagattcaactgatgctcaagacaactttgcggtgattgcttagcaatcttgcgattcgccatgaaaatcatcagttggaatgcacggggtttggggaacccgggtgcattccgtcgtctatgtttgcttgttaaagagcaaacacctcatgttttgtttcttatggagacaaaggttactgttaattctcttactcgctttaaacagtctttgaatttcaataatggtttagaggttcctaggacgggtttgaagggtggaatcatgttgttatggaaggatattgtggatgtaactcttctttcaatgaatataaattattttgactgttatttattctgtaatgatggaccctgatggcacttatctcttgtatatggctttccggaaactaaaaataaaaagcacacttggactcttataaaatatttacatgatgtctctccacttgatccatggatggtgctaggtgatcttaatgaaattttctcacacactcacaaaaatgggggacctttgacacaagataaccacatgacagcttttcgaactactttggatcagtgttgcttgaaggaattgcctttttttggtgatgattttacttggtctagaagtagaaaaaaccctgctgctcttaaagaaagaatagactggtgttttgtgaataccgtttggatggactctctaattcagccaacagttactcatctcgatcactatggttctgaccatagagcaatttatgtagagcttaacttctctaaccagctggaaattgaaaaaagaagatcaaggtttcggtttgaaaggatttggttaaatgatgcagaaagcttggttataatatctacaaacttgaataaaaaccatcaagaaaatgaggacatcttcactcaattagttgatagcatacaatgttgcgcaaccaacttgcagcaatggcatattggcaaattcgggcacatgaaacaagatattaaggaggctcaatccagagttcaacaattgaataattgtgttacaccagattctgaattttcacagaatgtgcaatcggctgaagctattttggatgagcttttggccaatgaagagcaatattggcagcaacgatctagggtggaatggctcaaatctggggatcgtaacaccaaattctttcatgccaaagattcgtctcgaaaatccaacaatcgcatcaacaaattgcataatgataatggacaatatgtctattctcgtgatgaaatagccactgttataacacaatattttgctactcttttcaaagcctcggatgaagaccattgggcactatctcatgttctatcaaaaattccaaccacaataactgatgctcacgatgattttcttttacaagaattcactaaggaagatgtcattacagctttgaaaacaatgggagctgacaaaagttgtggtattaatggtatgtctgcaatgttctatcatcacaattgggataccgctggtcctctggttactaaagttgttttgaatgtcttaaattatggtggaaacccagctgggttcaacaagcctctcatctctctcatcctaaaagtgaagaagcctaagacaatgaaagacttcagaccaataagtctttgcaatgttgtttataaattaatttcaaagatgttggttcttcgattaaaacatgttcttcctcatgttatctccgagactcagagtgcttttctcccaaatcgactgattacggacaatgtcttagttgcctttgagatggttcatagtttgaagaatagaaagagaggtactaagggatatgctgctctaaaactcgacatgagtaatgcattcgatcgtttggaatgttcatacttggctgctgtgatgggaaaaatggggttcaacatttgatggatttctctcattatgacttgtctacacacaacttcattttcattccttgttaatggtgaagttaaagattcagttatacctgaacgttgactccatcagggcgagcctttgtctccatacttatttttagtttgctcgaaatgtctttcacgacttttgtaatatgaggaggctattggaaggctccaaggtctgtctatttctcgaaatgcaccatccatcactcacctattctttgctgatgatagtttactctttttgccgagctaatgatcgatcttgtggtgctattaaaagagcattggacatttatcatcaagcttctggacaacttctaaatgaagataagtcggtaatgtctttttcaccaaatacaccagctgccatgaagagttcctttagccaaatattgtatgccagttaatgagtgtcatgaaaaatatttaggcctacccgcatattctgagcatgataaaaagcatcattttgctgatattaaagaaaggatttggaaacttttacatgcttggcatgacaaattgttctcaattggaggaaaagaaattctcttgaaagcggtggtccaatcaattcccacttatgctatgagttgttttaaactttcgaagagcttctgtaatcagttggatacaatgatggcacaattctggtggggttcaacagaggacaagaaacagactcattggaaaaagtggaaatttctttgcaaaataaaaatggaagggggtttgggtttttgttcctatgtccattttaaccaagcgttgctggctaaacaagcttggcagatctttcttaatccaaattctttgctgtcacgtattctgaaagcgggatattttttgaatgatgattttgtgccagccaataagggtaataattcatcactaacatggcaaggtatttgttgggggcgtgggttgcttgttaaaggattgaggatgaatgtgggaaatggaaggcgaattctttgttgttctgatccttggattccaggacattcgatcttcacaccagcatactatactggtttaccactcaacaaagttgttgattatatttccagtgatcatgaatggaacttacaatcacttcaaagggacttttctgctgttgatattgacaatattctcacaatcccatattctaattctgctccagatgattattgggtgtggaattacactatacatgggaaatatacggttcaatcaagatatcactttgcttgctctttggagaatcaagatcactcttccacttcggattcaacatcatcctggtggagtgatttttgggggttatattccttcaaaagtgaagattttcggctggaaagtcattcagaattcactcccttttgcttgtgccttatatcagcgaaaaataatcacatcagcagcatgtagtttgtgctccaatgcttgggaatcagtgagacatgccttgtttagttgtaaacatgcgaaggcagtttggcgttcttctggttacacttttgattttcaggctgcaagtaggatgaaagatggagattttatcatgtacctatcaaaaatatacaccaaatctgatatggaaaagatactatgcactatgtggtccatttggtttgacagaaacaacattctacatgataaattggctcaaaaaccagctgctatttatgctaaatccattgcttatcttggcaatttccagcaggtctaatctacgacagcagcccgcaattcgaattcatcagtagcacctcatcaaccttggcaagctcctcccctttctcgattgaaaatgaatgtggatgcagcagtttcttcatcctgcaataaatcgggatttggagccataataagggactcaattggacatgtcatagctgcactctccgaaccgatggctgggaactacaaagctcatgaaatggaggctaaggctccctaccatagtctaaaataggctaataacatgcatcttcaaatagatatggtggaatcggattcgttgatggtggttactgctcttaatggtttaccatctagaaattcagacttcaatgatcttattttaaatgttaaaaatcaattatcctttttccctaatgtttgtgtatctcatgttcgaaaagatgcaaaccaagctgctcatggcttggctaaacaagcgttagcgttggataatgattgtatgtggtatgagaatattccccctaccattttctctgttgttgtacatgactctttaaatttataataacaaactttttctccaaaaaaaaaaaataataataatttttaaaaatatacatatatatacatttattaaatttcaaactttttcactatcactaatcataaaaactttgaaatgcactaccaaacccgaaatcatcatagctgctaagtatattgtatcacaaccagagaacatatttaataaatgtatatatatatatatatatatattcattttgtataattttttaagagatacttttggattgagtttaatgtcatcgtcagaaatcctccgaataattgaagagctgctctttactattcaaacacctaaatctcaacagaatggcaaataaaaattcacaccatatcatggaggacaaaacggacgcttcaactttgtcagaaacaaaagttacatcctgaaacaacacaaaaaacaaacattgttataaaaatatgtagtaccttgtaattgtgttcttacaaaacaataatagggattgcctcaaaataaagagaaatactaaaatgtaccaatagtgtctaacacctttctacgtgtcaatatcgcttttaagtatcgagtctcatatagtttaatgtaataacttttagagagtatcgctaattaattgtaaagacacgtctagaaagtgttaggcactattggtatccaataacaatgcttcaaaataaatcataggagatatgaatctaataagttgttctagaaacgtttttacctcttaagtatttgacaagtaaagagtcacttctcaatgtttttcttcggtttgtagaagtacccctaaaaataggtgtaccaatgcatctctttcgttttttcgatattcaaatagtttaaattttaatttttttatatgacagtgtacattgtagttatctgaaatattgcaaatttctaaaaaatttaaaataatttaactcgtcgataacaaatttccaatagtctattgcatatgtacctcatttattttctacgcgtgcagtttgaatcctactttttgtattttaaattattctaaattttttaaaactttggagaatgtcttaaataactacaatatattatatataaaaaattgaaattataactacttcaagaattaagatctactattaaaagatggtatcccataatgtattaaaccaatctaattgtgacacatcaattaatttgagtactttaaggaaaaaaaaacttatctacatggttaatggagtctaagaaaagtaattagttgagttggcaaatttagattgatttaatacattatgggacaccaatttttaacagatgatcttaattcctatttcaaatatcaaaaacacaaggtaacgtttggttaagaagaatgaaaacataattataggaatgagaatgggaatagaaatggaatagaatggtctttccttccgtttcaaaatggaatagtcattccactaaaatggtagaaaaatcattccattaaaatgacatttcaatactttaatatgcaaccaaacaaaaaaatgaaataaaaattatttcatttccattccattctacttcattatctctaaccaaacgccacctaaagggttcccctaaaagaactcattattatttatttatattattaaaaaatttggatatttatactaattagtattttcaattattcaatcaagcaaatcaatataattggcagtgaagtctcctcaatttttatatttgtagaagagaaatctctctatgttatatggtcctcatccatgagtgcttggtgtaacatggtcgcgcacgaaatatatttgtaatacagtgtacacacgaaatatttacgcatggagtaaccacacaacataagtacacaatgtaaatttattttctcctaaatctatagttactgttaaacaattaagtgtctttcaaatattataaatttatgtatatatatacatgtatgtatgtatgcatgtctcgatacctaatcgatttcagaagttcctagcaatatcatatgattgcatgtattgtcaaggaaacagaaacaatgaaaaactaggcaaatatgtagtacagtagggaaaaaggcactaaaatgtacctcaaatagtggagatgaccaacaaactagacttccaaaactcttaatctcaatcaagcatgcctccgtcttttcacaccgtcctcgttaaaatactgccatttactatgatctagggtgctcaagtcatcaagttcggcaatggcaagtaaatattcggttagtcgcacaagttcttgatcactctcacggcttgaatgagccctcttgaatggcttgattgtcaagccattttgagggttcatcacgaaattccttctcaagtcatcaaacataatagtatttttggagctgtagaactgaaataaaacagcagacaaaatagtcaaatatgcagtacagggggtagggtagcatacataaacgaaaaatatccatatatacgaggcattataaataaaactgcattattttactttggcagtttaaattttccatgtgtcatggtctcaacgaaacaagtatcatatgcttcttccttcgttcgaaccctaaatgttcacaatttagttttcctattgctgttgtcaacctccattccagtggaggttggatgtagataaatagacaagcatacctctggaaaatgagcccaaatcaagcctagaggcttgcaatcgaagatcccacgagaatctgattggactgtaatcattgctaagtggtctagaagagcagtgattttgtagttaggattgttgagtactccaagttgtcccattttcaattcaacccacttcatgctgcaaaattaatacaagtaaattgtatgaatgagatgtgtatacaataacttggggagatgagttaacacttgactaaaataataccgtcgaaaacatccatacaagctaacaaccaaaggaattgtatctatctttttcatttcaaacttgccaactaaatacttagatgaatcaattaattaagaagacagacttaacttgtggaactacatagatttatgagtatcttcaaaaatcagatctactgatatattcacgaaaaaaaaaaaaaaacacatgctttttgcgtgtgcaaatcgagtaagggttatgtcgatttagagtatcaccattgtgcccttgctattccaagaaagggataatatctgttatatttcattgtcttgacttcaatattgtaacatatatcttaatctactttttttgttctttcaaaaacaaaacaacttgtattaaaagattaaaaatataatacaaacaaaagtgaacgagaacacccattaaaaatgataaaactgaaaaggttagagttacaaaaagtattgtcattctccgaataaagaatagaaagaaacccctttaaactctttttcatataaagccaaatagctacccaatgttgtatcttgtcctaaagtctttcctttttgtcttccaaatcttcaaacttactcttattattttttttcatcccataatctaatattatcttcgtttcttacttaaacctcacccgctgtaggaaatcattattaagagaagcaattattttccaagggcatccaaaggatattctctcacccaaatttgagtccgacctgttatcgtttagtctatacttgctttgattattctgcgccacctaattcttttccttaggaaactttcagaactacctcatcagaagtgccttatttatatctttagagtgccgaatgtgcagtcttcctttgttcttgggcctacaagcactcttccaagagactgcaagcttgccaccagccgagtccccaccttcccaaaaagaaaataatacctcaccaactactctaaagtatcaacaaccgtccttgcgaaaaaaaaaagtatcaacaaccggcaatggagcaaaaacaaaagatagtaagctggtaaagtggaaagactgattgtatatgtcaatctaccttcactagacatgtcagcaatcttccaaccatctaaacaattggaaacttcagccccaactagatcttaaaaactcgaatttctaggattatcatccaaaggcatacccaagtattccagcagccaataatagaccacacaacctatcttatcagcttcattacttagccacccctcttccacattgagatcccaaactctggctcttgcttaaattaatttgtagtcctcaatacataaaaatctctcaatactctaagcagatttggaacattttgttcagtggattctaagaaaagtgagtaatgtccactttctctatcgaccataaatccttggacctgagacactccctcagcttgttcaaccattcaacccaacaaatccactgctagaataaaaagaaagggggataaaggatcacctgccttaatttcctactaccattgaacttaccctttcctaataccattgaacttacctcgagcctaccattgataacagacatccgcttttgtccactaccaccaaaactttccaacactttttgattgtatcataaagtcttccaggttcctctctaaaaagttgcaagtcttctcaatatcaattttgaacaccactcctcccttccgagaatgacaacactccactattttattggccattaagatcacatctgtcttcctgctaaaaaatctccatccttgtgtttctacaccatataatataggaattatgtggtttttaaggatagcaccttggagataaccttatatgctgaaggatgccatgctggtctgagcaaaaacaaaaactaaaaggactctcctgtctccaagaactgctaaagcctaaagtgatttataaacgtttaaaattgctttttcaatatcttcttccccctttatctgcttccctttcatatttgaaccacatgttactatcctctttgcatgtaacaactaatttaaaccagagagtctaattctctctgagatacaaactgagcctccattcattgtaaaggctaagatgaacaccctgcgttcaatattaagactccaataacgattctaaaatcttgattaatctcgttcgacaatgaaactcactcttagaaatggaaaatccaagaaagagaaagtctttgacagagataatcccatactaaattatatcttaatcttttagatgagaaatgtcatcattgctatgtgtagtatactatggtataactataagggtagatatagagttagcgtatctattccaagaaagggataatgtcagctacataactttgtcttgacttggatagtgtagcaaatatcttaatcataaacatagaatgtcagcattgcaaagtgttagtgtactgccactttaggccatatagaagtagaaaaacatatttgagacaatatcatagggaggaaaaggatgagtggatatctgacctggttgcagaccatatcatgatatcatattccgcataagcagccgtaagaaattcatgaagatctaacaagacacgttaaacttcaccatcagacaaagaccttgactttatgggaaaatgtctcttacacgattgtataaactcaagaaatagaaactaaaaataaaattacttacaaggacgcataagttgaagagggttttcagctgtagaccggtgatcaaatagagtataatcaatatccaaaacaagcaatttcttcccctcacggcatggattccgaagatcaatctatattccatcaaaaagtgccgatctggttacatttatgtaatgtacatttcaaagaaattacatagatttatgtaataccaccttgtactgatctacgcgcctcctcaatttctgcttattaacttcgttgtctttgatatcaacagcttcatcttggccaagctcaaagtcatcaacaatctccggagactcgacttggtccactatgatttcatcttccacagtactgaaaatgattcatttcacaatcaaataaaacccagaatagaaaattggatgagttaaattgccaaacacattgtctgcgtaaaatataagtaaaacgaaaagaatgagagaacccaatcatggtcatcttgagagaagacttgagagggagttgagaaagcaagacagagtcatcggcgagctttgaagcgaggagtttggggtagagaagcttctggcgtttgggtaagacattagtgagttggctgattcggcgctttaactcactgacggaatcgtcggcgcaaagtcggacagtgtactctttaccgctccatttcacagtgagagttatctcctcctctgtgatagccgatccctctccagccattaaagggtaatggggtgagcttgtttccttacagtccaaccaaactgatcactgcttcaattggggtggcagcagaaggatgtgcggcggtaatggaacggattcaattgtgctgagactaaaatgatacttattttattgggatatttacacaatttttttttattatatatatattttttgaatcattattatatttattttctttccaaataaaaacaataatattttcatgttattgaaacatagtataatgttacataataatcataatatttttttaaaataatcatgtaacgcccaaattattaaggcgccttacctattttctaatcactaagctaacatttattaattaaaagattttactataaaaatgatatttacaaattaggatcctatttctaattaagtacataatattttgaaagagttgtcaaacaataaaatactagttatgccattagtggactcacgcttaataaagattgggttggactatttgactagttatgatggtacgatcataataccaagccctacaagtccaaaatgatagtcattacacataactcgacattgagctcacgatgatcctacccgtatatgagactgagtcttatcactcatttaacgttctttgaagtgatcaatcaaactggccacgcaaataacgatcttcttgataaagtggaaaaagagtgtttcccaagaaggtgagcagtcatgagtaacatctttctatggacgcctataagagccactctcagccactaagagaggcagatcaatcacagtcatctcaatacttctcacttatcgttcactctctcattctctctaaaactacatacttatttttgcagtcaagataagtggtaacttagttcagtcatttattcttgtctcttttgctatattgttaacaatcttattgacttgaccgtcgaagtcttttcggtcagcactatcttggtgtcccaaggttttccgattactctcttctttgtttttcaggttgtcggtgcccgtgtacgatcatctttgattgattgtgaattttacaatctacaatttggcgcccaccatgggccctgacaaactacaaccgagcagagtgttttgaccttcatcgttgagtcaacccacacaagagcaatgacagagcacatggaggaatgagggatcaatgcggaatagaccagcttctgcgaccaactagccactctcacagctcaaatggaagaaaatttagagtacactcaagtagtggaaagagaaaatgtgtcattcaagaaggagaatgatgcactaaaggtctaactcgattcattgactgcttcgatgatgacaacatgcaatagtcaaagaagattccaagttccaattgatccattgcaatcacttgacgcaaccccaatagaaggatcaagccaagcgatcggacaaccatcaacaacaggggtaactaatgtcatggtcggacaacaaacaaccacgatcaatcaaaatatgggttcatagtaaacttcatcagtcattcctcttacagtcaattcatcagccattccttcagaagtcaatccgtcagtcgttcctcgagcagtcaacctgaccaacatgactgctctcaaaggctctctaaaccaacaatcccttactcgagcaaacaatgtgataattgatttaataccctctattgtgaatgcaagagtgaatgttgcacctacccaaaaggagttgattcaacaaataattgcacagatattgggaaacatggaagaaagtcacattgaaaatgactaagtttactgctaacatccttaagaatatcatcaatagcacaatcattcgaaccttaagaagtaaaaagattgacataaaagttaacaaaactattattaatatctctataattactaacagtgtcaccatgatttgaagcaatactcctaataatattatatctttttttagatgaagttttatgataaaaaaatttagtttttttatcactagccttaaccaatttaccctagaccgctgcttccaataaactttttctttaaagagtaaagcatcaagggaagactgaagggttttggctttacaggccagatcactagttaaaggggaagaaagatagatagaatcaagttctttttggatagtagtaattttatgtttaaaactgtcagtattattgctcaaactaataatattttgaacacaacaagactacctaaaaagaaaatctttaagaggatcatgacaagaaaaagcaagactagaagaccaagaaccactaactaactagaaaaaaattgggtcaattagccagtggttctcaaagcaaaatcttctagttctacaagacattatcatatcatctttaaggataaccttcaaggccctatgattaaaaccataaaaggaccgatgaaataagaaagcaaagggatataaatcatatcactttttgttaacaatacaccaattcaaacattttaaaatgttaccatatttccaagtaaacttattactagtaaaagaaagagaaaataaattttatttagtcaaaaaagattgaaagttgttcatagcatagtgaggagggttaaaatagctactcctatcatcaagagaaaggcaatcattaaaatcatcaatgataagccaagggaaatcaggggcaacatcataatgcctatttaataaagtccaagtatcacttttagaagaacataaggcaagccattaaaacaagagatgtgccaattaatattatcatcaaaatttacaaaacaatccacatgattggcaaaataagttaaaatattaacattaattacattattctgacatagaaataaacctctccctaatccacttctagagacttcaaacacattatcaaaagataacttagccttaatactagtactagaaccaaaaagcagcttagtctccattacaaaaaggaaatggggttggtgctgcttcacaagcagggagaggttgcaaatgccctaagactccccaaaccctgggcattccaactgataagattcatttttctaggcggggttgctaagcagcacccgccttttcagtgagattatcaatagagggaaccacaacatcatcattctgagtagctctgaacttcccacttgcatattctgcctcgtgtaggacctcttaacacaaatattagaacttggattaccaccaagaaaaggactaagtctaggtccactaacacctgagggaagaacaataggggaataaaccaccccttttcctttatcactagaagtaagagtagactcaaggttgacagagccaacaacactcttccctttatcaacattagtgacaactgtagaagccataacaggggtagaggaaagcacaatataaatactttgaacacccaaagaggaaacatcgataggacacaaggattatagggtaccaaaattaggttattcataatccac

SEQ ID NO: 14618 - DNA, 6053 bp, Cannabis sativa
tggtgcatgaaagtttttattgtagtttacaagcattgtacttgattgaaggagtgaagattttacagttctggagcattcatgacttggggcgttgggggcttggaaattgctgctattcattgcgaagtatcaaaaatatattttaagacatataagaaatcttactgaatagtgcgattaatgtttcttgagataaacaggtgcaagaaaagaaggtcaagaaagtctctgactttaatctggatccttctaaagctgttggaaatggaagtattgccagttcaagtaattccagcagcccgaaaccatatcttgcaaatggaggttgtccagacagaacgaatagttatctgagcaatgacttgtcgatcccattagggggaattccatcattacgtttacctgtggtagttgtacttaacccttaattttggtttgtttgatttcttgcatcatatttcagtaccattgattttgtgcctattttgtcatgatttgattaaattttcaacattgtgtcattgtcaacccaatgcttgaaagccagaatgcccaagttttatcggcacatagttgaaggagccaaatgcaactgaatcttatattccttctactcaacacttgaatgtcttactgtttaaacaaacttcacactacccgaaaacttttttttttttgtctaatttaccaatatttaattttaatagtctctgtatcttttatctatgttttggtttatatcttctgtatactactctttagctcatgtacgtgtcatttttgtagcattgacatatctaatctcctagattcaaagatgtagtttctgtgtgcaaccagtttctacttggatttttatagtcttaagatgtattgcattcagatttctttttctcttgtttcacaatccatggattaagatatttgaattctctttgattctgatcattttgctaacccctagagtatttcataatttgtaggtaactagccaagaaaccagcttggttgctagatgtcgaagggtttatgctcatgcccacgactatcatattaattcaatttcaaacaacaggtgatggcattttttcttatattaattctgtatttgcatttatcttcacccccttattctaagtgttttgttgtaaaactagtttgggtttctttcctttgctttttggtgggtcatttttaggccaagtttatccttatttatgtagttttgtttcttataattatacatatatatatatattatggtattaactctacttatatgttgaaaaatgtcatattttaaatgtcatcttctgctcagtgttttagaacttactaactcttctctctcatccttgtactttttagtgatggtgaaactttcatatcggctgatgacttgcgaatcaatctttggaacttggagattagcagtcagagtttcaatattgttgatgttaagcctgcgaatatggaggatttaactggtaagcttcttggtatttcgacattcttggctgtgtgaaactgtgaatttagatgtgctgtgtacttttatgctataaaatagactatgattttcgaggttttctcctcatctttttgggtgcttggattgtgagagtaatattttacattgcttctgctgctaattgcattgcatgaacatgcttgtggatgaaatttggttgagaaaatgtctcaatggaaccagggcagggttttatttcaccaggcgcaatgaaagtgaacttgtataaaaactaaatgttaatatttgagttggggcattttagtacaaatgcacatggagaggggttaaatgatagatacaaaatatatatttatatatatatatgtaaaaatctcagtggggcatctgcctccactcctcatacactgggtcccttagtgaatgaaacttttgccttgttgcttaaacgattttatgagaaacgttctgaggcatgtggcttttcttgatctcttgtttaatctcgaaatagttacttaagtactggtcataccttcctatgtttgtctaactccgacatgattgcaatccacatttattgattatgtatggctcatcgttgaatatatatttttattatgtattatataattttatatatacgtatattttttttatgttcttgcagtgaatatttttttgtataccttgcagaggtgataacatcagctgagttccatcctactcattgtaatacactagcatatagcagttcaaaaggatcaatccgacttatagacttgcggcaatcagcattgtgtgattctcatgctaaattgtgagtacttggtgctctaagtttctgatttttaagtgaattggttgaaaataatacaaagaaaggcatggaggaaggggcaacatttatgtgcatatatttaatgttttcctttaccccattctcatttctttattgcttctgcatatttgttattctatagttcccaatacaattaataaagtaacattaaatgccattgccacctttctgatgtgaatcttgattgccgtggttcttcctttcgccgatttgcatgaagctgcaactcttaaatggttgaacctctatgctgccaggaaatttttctttgaggtattgtccaatttgtagtctaacctgcaatttttattcttatgcaggtttgaggagcaggaggcacctggttctcgatcctttttcacggaaattattgcttcaatttcagacattaagtttggcaagaatggaagatacatacttagtcgtgattacatgactctcaaggtttggcttttgtattgtatttcccaacttaccttggcaatgaatttttttttttttcaaatatatatagacaacaagatcggattagtaagcgatgatagataggacaaccacaaaagaggctgtgctcataaaaacaacataaccaccctcatgaaaaagctattatattacaactacaagtacctatcacatagaagtatcgaggagtatgccttgaagttcgtatttttaaaaattctgaatagcaacccaatgctgagcctttacccatgtatcttcccatcctcttctacattgttgaatacttgcaaattgcaatggtgcacgccataaggagcatcccacattcttaacaattgataagcatggcttatttaattatcaaagtacaacatcatttacttctctactttgagttctgagttgacacttgtgccgaatacatctcatatatgggttggacatttgatcattttcccagtttctgactttcatgctatgtttggctgtcagttatgggacatcaatatggattcaggacctgtttcaaccttccaggttcatgaatacttaagacctaaggtgagacttcctccctttggaaaaatattgaagcttcctctctgagtctaaactaactatccctgaatgtaaccagctatgtgatttgtatgaaaatgattcaatctttgataaatttgagtgctgcctgagtggagatggattacgagttgcaacaggctcatacaggtctgctatgaaacataaacatccattttgttctattgctctttgcagtttgatattctaattaacattttattgatatgctcccagcaatctcttccgcgtatttggttgtgccccaggaagtaccgaggctacaaccttggaggctagtaaaaatcccatgaggtaaatcaaatggtaataattggtagacatattttatttttagactagaataattgtgtattcttttatgctttttcaggcgacaagttcagactccttcccgaccatcaaggtctctgagcagtagcataacacgagttgttcgacgtggtcagttttttttttcctttctaatatatagctatcaacagctgcttttcattcgatgaggcttgcatgtacttaataatttctgacatcccacttttctaattttgtaaaatccacaacaggatcagagagccctggggtcgatgcaaatggtaattctttcgatttcacaacaaagttgctgcatttagcatggcaccctactgagaactcaatagcttgtgctgctgcaaatagcttgtacatgtactatgcataaagacagtccaagaacaaatatatttgcttgggtgaacttttttgggttgctattggagaaggtgacttttcccaactaccaaccactcaattggaggctacattagttctcaagatttcaaagtaccccttaagattggtagccgttgtttaatctcgagttcaggaaatggctgtcacagaatcgaggatgaagcgatcagattttgttccagggtgggcagtctcgtcttttttctttccaccctcttctcaagttccaaccctcaaaagtttctctagtttttctttttctttttcattattctctccccttagtcatcttctgaagaagaagatgcattttatgtctgaaaattctgttgggttgaaatcaagaagaaaaatgtgattgtagctctcctacaacaaaatactaaaaggatgttccataatttgccactaggtttaagataaagaatgtagtttcatttactcaaaaaaaagttcttggtgggatggagctgttgaaaccttgcagtgcatcaattttttttattgattctttatgatggttgatatttgattaacaacacttcttaatattttgttttagacagaatttctgtttatgttttatgtaacatagcaaagctacaataactttatcattctctttcaccaggcttagaggtcctaggattttcttctatcttttttttttttttttcgttaacaatgtttaattttttttcccttcattcccatttaacatggttgtctatgtttttcttccaaaatcactttagggatattagttttacctgacatcaataggaagggattcttatttgtacaaatggtacttagaaataaatgccttgatactatatcttccttccatttaaaaaatgtattcttataaatatatttaatttctataacagtccattgtcattgtgggggtacatcacttaattgaactctgttcattgacatatatgtaacagtatttattattcaaagatatccacgttccagaaaatttggaccaatgtgatggcaataaatggctcaatttgaaacatttctactgaaatctgttttctacaacgaatggatatcttttgagacgagcagtggagatgagagcagacagcttttcctctgtgggccatggctgttgactattgacaaaattgaagaagatcaaaacaaggagttactttcctcattgctatgagcagcctaggctttatttctatatgagtatatgttatatgtgttgtcaatgaaatctctctataatatgataacttgtcaatacttttcttttatttttatttgattaactcagtcaaatatatggttattccgattgtattgctcacatttgaggcccagccttcttgagtttgcttatactaggtactcatttcagatatactctaattaaatggggtgagattagattccatcttcagaaggatactaacagtatttagtgtgattataagtattatatttagtggcggaaccagaagacgaaataagaaggggccaaataaaatatattttcacttaatttttttttttttgaaaataattcacctaatttttttagtatgtaaaattttataaatcaatataagaggttaattaactttatacaacatatataaaataatgaaaaataataaaggacactttatagtgtcaagtactataaaaagtaacatatcgttattggtgtaaaataatatcgagtcctaaatattttgatttaataaataatataagaaaccgctaaccatttataaaatgtcacattaacatggtattagataccatgaggatacatatataaagacacatataaatatatatcatacaaaactactctttaaaaataaattatattaattattttttttttgtcacttttta

SEQ ID NO: 14619 - DNA, 17175 bp, Cannabis sativa
tggggtatctctgcatgtccttaggatagacaatgaactgttatagatggaagaaaatcctcctctgcttgcgtaactttgttactttggttattttaacttatatcggtttcccttcaaaaaaaaataatacgattttggttttcctttggggaatttagtaaatatcataatataatattatttccgattattttttaatttaaattgatacatttttttcattaattattctgattccaattacaatttagtaaaaaagtatagatataacaaataaaatattctaaaataataaataggcgtcagatgccgagcaatatttttctcaagtacggcacctctaccacatgtttttgtatcaggtggctttacttttatgctccacgttgtactattcaaatcctagtgatctcttgtgtaattttggtgtcgtttattcagtaatctgtcgttttatcattaattactggagcaagagtcatctttctctcgctttcatttctttcttgtttgactctcccagtgcaaaaccgaaccaaaccaaacccgacccacatcactaccactaaccgttttaaaggacttttcttttgttttaagatcgctccattctaattttcagaattagaaacatatagcaccaactattttcttcaggctgaagaaatggcttcctttcggggattcttctgcgctatttatcttttacaggttcgaaactcgcgtttttttgtttcgaaattggctgccttgtagtattttcagtagtgatcaactcattttgaattgattttgtcaattatatctatatttacatattaatattatcgaaatggatggttctgcaatatcgtcagaagtgtgaaaattgatggtttcatgttttactgtaattttgactatgttgtgaaaattgaaaagatattgaatgtgtaaactttacttcctattgctgcaggttatgttcatcgcttctttgaagactgtgaattcacaggcatttgggtaagaagcaaattgagcattaatgattggaatttgggtcgttgttattggtttatttattcatgcatttatgttttgtttgaagagatctatgttactccattgactagtattggatcatgtctagtagtggaacacaaacttcatagcttgttaaacttttttgttaatgccaaaatttcgtgctgttaatatcgagtgtcatgaccttcttgaatgctttcttctttgttgtacactaaattgtgatatggttactatctgctggttaggaaaaaacatacaaaagagtactgtgcgatgtatgatatatgtggcgaacgcagtgatgggaaagttttgaattgtccttatggttccgaagctgttaaggtagcctctgctctctggctacagtaactgtggcatgtacatacacggttacattctatgtcattatcatttactaataattgctgattgacttattattttacttcctttgtagcctgacgagctgttttctgccaaaatccaaagtttgtgtccgtcaataagtgggaatgtttgttgcacggagacccagttcgatacattacgaactcaagtgcaacaagtaaggatattttcaacatatctgatgaagatattgttgttggcgtttattttaacagatatgtatttataatggttaagttttatccatctttggaaccatatatgacctactttttattgtggaaatgcattgtactccccagaattattttttatgaagtcatttttgttttgctttctttggtatattagtatacataatatttttatgaagtcattttggttttgctttctttgatatatttgtatatttacatctaacagcttggttatttgcatactcaagtcctttttctatgctaacttagttatagtccaagctgttagatcttactcaatatttgtttttgagatttgtgtttctttgttttggtggaaattaagctaatgtataaatcagtatgctctttcaattcttattaagatttttcagtaaaatttaggcctacagagacactgtatgatctagtattgagggatactaattttttctttgttgtgaacttttgtatatattttattgcaggccattccttttctcgttggctgtccagcatgcttgaggaactttttaaatttattctgtgaactttcttgctcaccaaatcagagtatatttatcaacgtgacttctacctctgaggtcagatatcctattttagtatttagatcatgttacagtggttactctttgctgctcttctgatgtattctggtttgttggctgtccagtatgtttgaggaacttgataaatttataatgcacatgttttggtgctaatattacacattttttttgaagtgtatgctctttgtttatcttttttgaacatctatcaccacgactgaacattgatagcaaatataatgaacttagcaggtgcatggtataccaataacatgtttaccattatttttacagaagctgctattctatccttgattatcattagtgtggtaaatgtcttttcaggttaatggaaatttgactgtggatggcattgactattacattacggataattttggtgaagggcttttcaactcttgcaaggatgtaaagtttgggaccatgaacacacgggctatggaatttattggggctggtgctaaaagtttcaaaggtgaaccaattatttatgggaaagtttatcagcagacacactatttgttattgtgctactttaactgttactaacggctgtcccaccctaagttccatgctgtttttgtcatttcttatgggttcactaaaattgcaatatgtgacgacatttttaatcttataatatacttattttaagagctgaaattctgttcagtcctaaatgtgatctaacatttcacagcaagtattgtcaggcagaaaatgaagaacaccaacaaataggggcttagtgaattcgatatgctaatttggttaccttcacttttgcaaatttgtttgtcaggggctaatttggttagaatttttttttgttgaagtttaggccatttttacttattaaaggctggcagttccgttctcgatttcttataaaaactgtaacttacaatatgagcggaccatatcatattagtaaatgcatggttgcatttgcattatcatttttctttatgttgttgtcgttgttttaattattattgtaattactttttgtttgtgactgcgcatagtgcctataatataattaccattgaccttttcctacaaaattttgttgcctgtttcattatgttgcatctcttgatttcattgcaatttacaacccaatgagtgacttcttttttccaatctatttgtacagaatggtttgcatttataggtcagaaagcacctcctggatttcccggttcaccttattccatcaactttaagtcaagtatttctaaaccaaatggaatggatccaatgaacgtatctgtttattcatgtgctgacacttcactggggtgttcttgtggcgattgccctctatctcctgcatgctctaatattgatcctccttccccatctaaagaagatacctgcacacttaaattcggacctctcaaggttggagtcaacacatatagttaaattctctctgtttaaaatttttctgcttatcttggcttcacatactgactaaattattcttcttggctctttaaggatgttgtgagctcagtgtttttcagccatgtgattatttaagtaactaattaaaatttcaggtccgatgcattgaactttcagtcactatcttgtatatagttctcatatctgcattcctagcatggagtttttctcatcgtactagagagaggagaataccttcgtctagcgtggaaccactattgaatgtactccatgatgagatcgactctgtcaaggtgctatgatttctccactagtagacattacttttacttttctgatgtgttcaacttttataatcgaatgtcatttggtgttttagtaattctgtttgaaagttgttgcttgctgagtaggaagacatagtatacttatatcaatgtagtcttaagttacttgagaatgataatggagttcattgaatgactttactagcatacaagcattgagaacattcttttaagtgaatcagacaactctttgttgtttggtatagccatgacgagcttgctttcaacatttggattgtaaatatttttctgtgggtttctgaaaagttgcagtaacataggtactagttgacttgagatgctcttaattcttatgcagataatttatctgtatatgtgcttattcatttcttattgactttttgcacctttacaatcgttgcaggggattgaaatagtgtcacaagttccagatggaatccaacaacctgctgttcaaaaatacatgtcaaactttttcaggtttgcacttctactattgctcagaatacatgtcaaattttttcaggtttgactgttagattttggacagtcacatgggtttttagaacgaaacattttgagaatttcaacttcctagacttatgtagggagtggagtgtgttgatgtaaaaagaattgatgacgtggtctgttgttgtgtgtttctgctttttcctatttttgtactaaacttttgtttaccaaggtatgggggggagtctaagacaagtggcctctttctcttttttgaaaaaaacgaagtgttcaaagtatctgttaagtaatttttgtatgcatcaggggttatggagcctgggttgctagaaatccctctcttgtcctttgttcctcgctagcaaattgtttcttgtgctttgtgttggtctagttcgttttaatgtggagacacggccagagaaggtatcacattctttctcccacctttttttctcagtataaaaaacattgttcttgaggtggttatttttgtacaagttgcactcgttaaacactgcaattttcagaaacttcttgagattcattatgtgcaattttgttgcaacaaaacaaagtcctgtctatttgtggaagtctgatgtaaaaatcattgcagctttgggtaggccctggaagtagggcggcagaggagaaacagttctttgacagccatcttgctcccttctaccgaattgaacaggtttcaatatttctttttataaagtcctacttttctatcgtttgcatggttttatttatttattggccttctttatttttcatgggaaaatatttgtcattattccatgtgtattgtatagttttgtttctagaaggttacttaaacaggcttaacatgttttactgtgttgcagttatgcaatgcaaagcaacaatatgagtgtaaattgacaatatcaaccccaatttgtgtttgctctttaaaaaagaaaaagaaaattcagatgccctataaaggattttgatgatttgtaatgatctatatattgttttgtacataactttcctgatattatcctactatttttatttcatttgttgtgattttagctcataatagcaaccattcctgatccgaatctgggaaagcaaccaagtattattacggaggataatattcagttactttttgaaatacagaagaaggtagtataaatgattgatgctactcttcaatcagtttttttttttgcttatttgagaggctatacattccttccatgcattccactagccattcacatagcacattttgacaggttgatggaattcgtgcaaattactccggttcagcggtatctctgactgacatttgcatgaagcccctaggccaggactgtgccactcaaagtattctgcaggttaaatgttgtgtagttcgaataagtggaattttgtaaggtagaataagtgtaggtcaatctaaaatattcccctctctgtctgtgtatagtattacaaaatggaccctgataactatgacatgtatggaggagtcgaacatgctgagtattgttttcaggtatgtatgccttcattttattttgttcaatgctttgttttggttgcatttgtgcttatttcttgtaatcacttttatgaagcaagattcaatatcatattatttctagcatttggttaattaacattctatggattagaatttcaaatatgaacttcttaaactagttatctgaagcgttcgattttttactttctgaaagttttttctctcctcttctgtgctcaatttttgtttagttattggttgatagcatgtcttagttaagtatttctctcccttgtatctgacttgtagctacataatttctattttaaaagatatattttataatgctaaattgaatattatccatttctacttcccgccttcagcattacactaccgccgacacatgtttgagtgcattcgaggctccacttgatccaagcactgcattaggagggtttcctggcaacaattattcagaggtaagggtatctatatgctgttcaggtatcttgctacttggcgaattgatttataactaatctttgaattttcaggcttctgcatttgttgtcacctaccctgttaataatgcggtcgacaaagtaggaggtgagaatgggaggtcacttgcctgggaaaaggcttttataaagttagcaaaggtatgaggactggtgatctgttttttacactctttatttatgcttgaatttcttgcttcaattctcttatgcatgaggcttgtatctcaccgtgtagagttcatgtgacactcaacgtagctagtgctgcttatttatttattttttatatttaagttttgctttgcactgaacctcctggacattttgtactggatgaaaattcattttgttgctatttattttctaatgctcctaaaagaatttctattgccttgcaatcccatggtttaaaaaactttagattcatattaatctgggatacattaacctagacttcaaattatcctgggttcaagaaaccgatttccttaataatgtagtgtaaagaattctctaatagcaaatgaacgtaagtaatatcttatctggattgggagttgatatgcattttaaaagcaatttgtcagttacttgagacaaactgaacagaaaagaaactggagttcctttttgggggtttatttatattttctttatttcttctctgttctaaacttaggtgaagtggcttaatttaaaatctcctggcttcttttaattgaagcggtatttgtaatacacgtgttatggaaaagaaggccttagttattgtgttcgctttgcttcatattttcttaaccgcattttgtgaggtccacgtttctatttcctagctttttgctgctttcttttgtttttacaagttgaatgaagagtgaagttgttctatcaatatattttgagattatattcattcatttattttttagaaacagaaaataaaaatattgtcaagtaagccttttataaccccatgtgaattcctttgaaatgattattgcaattttattgttgaaaataggaggaattgctgcctatggttcattctagcaatcttaccctttcattttcttctgagagttcaattgaggaggagttgaaacgagagagtaccgcagatgttataaccattgtggtaagtcttcactcttcagttacatttatttattttgaggggtgggtttggggttgttttggtgaaggtgggaggtaaggggggagaaatataagtttgtttgataatttattgccccaattgctaataattatttttttttgttgggaccaactgctaataaaattgatagaccttcttcatttaatcattcattgaatgagttttaaatataacaaataaaacagtcttacatgtcccaaatcatttcaggtaagctatcttgttatgtttgcttacatatcagtgaccttgggagatgctcctcgattatcttctttctacctctcatccaaggtattttacctttaacatcacttatttcctttatttcttgtgcatgtattttccaatgctagttttgtgtatgcaaacaattgcctttcaatttttgtcttgaattgatctttggttccaagaattgacctgtgtttcaatttaaaaatggtaacaatctttttaaaaaattctaactatcattttggaaaatatttgctcaaagagtcagaaaagataaatttgtcttaaagttttgggaaactattatctcaaaacatgctgtaagtgataaatttgctactatacaaacatgctggtgtatgtatttggaagtaacagtgtaattattaggttgtgtaattactaccaacatagtaattagtatacaaggtgagtctggatgtcaagtagtaattacatatgaatttttaagtttattaacgagttagtaattacataaaaaataacgttggataataattaattgtctaaatatagtagcattttgtaattacaaagtataattacactcaattctcaaagacaagctgagaattagagagtacctctaattacatggtcactacgtaattatttcgttaaacaagcactcctaacctagttgaaaaaattagagaaattgaagcaataagtttatagacccttagattaaatgaatctaatggttgaaaataaataattaattagcaaaataaataaaacctaaaaatggttgctgttgttatcttccctggttatatctcttgttcccatccttcatcaccgttgctgttgctgctgctttcccgtcgttgttgccatcgtccatgactgtcctttagcccatcgggatttctttgctgctagagtttcccttttttctgattatctgtatttatataattttagaaaactgcttcccctttttattctcctccatagtatttatttgttaccaagtttatatgtctttatcatagtattagttctgctgctgtagctgataacactaacaacttggttccagattttaaagtcttggtttgaatgcatgcatactgtaagggtatttatatgagcactagcatgtgactatgcatttaagcatcaatatcttactatttattaccctgttacgcaagtaaaaaccctgacaaaacaagggaacactatctggtggtcttgatcgggtcactaaacatatgtaacttgcagatgttcgtgttgaaacttggataacttgtgaggactgggttgaaacagacatatatttatgttcctaatgatgggtggattctctgatttaggactcattgccctgattttttactcacatattggggatttatgagacttttctcttcttttaattgcctctctttttttttttccgggttttgctttacacggtgtagtcgtagttgttggtaaatttgggtatattacatagatgaatacatgcttgcagagttttactttaattatgctttcttccttacatagttactgcatttctacaaccttctgtcatttcaatgtctaaagctttctaggagaatattatcttttatatattatgcttgagtttttaataattggtttatgcttcattagatatatcactgatcttaatctactgttttccaggtgcttcttggtctttcaggagttgttctagtcatgctctcagtcctaggttctgtgggactttttagtgctcttggagtcaaatcaacattaattataatggaagtcattcctttccttgttctggctgtaagttatttataatttcttaatgagtctttgagtaaatagtctaatgtgactttttagtgctcttgcatgtaatctataatttaagttagtcagtcttatggctctagacatagaataagaatcatcagagctatatggctctagttggtctctacatccgcatattctttttatcccttcttctgcattgaccttaatatatcatgcgtgtttcaaattttatttttcaccttcatactttattttagatcttcccaggtctttggcttttgatgctttatactttgtaacttttttacaagcttaataaagtggctacaaaaccggataataaagcattgtcattcctttttaatttattttctcccctctaaaggctaccctgtgaaatagtgaagctttgtgctagtgtttttatcaaccttttcttccaccctctttctttacctgttcaacaagtattcatgttatataatctaatatgttcttccttttggctactgtaatcaggtaggtgtagataacatgtgtatattggtacatgctgtaaaacgtcaatccttggagttatctatagaacaacgaataagtaatgcacttgttgaagttggtccgtccataacactagctagtttatctgagattctagcatttgcagttggaagtttcatttctatgccagcttgccgagtcttttccatgtttgcaggtgtcttactgatttttcatttcatttctgtgtagtatctgttcttattagtttaacatctgatatgtggaccaatggtccacacaatgttaaatttatttttgagagggaaagcccactccaatagcctgctattggggctttcatgcattgccaagctttgcactatcacatgggcctggcgcacctcaccaaaattaaaaaaaaaaatgaaaggaaaagaaaaattctgagaagtatgttagaacttttctttcctttaaacttaatctattgtgtttcatttgctagctttggctgttctattggacttctttctgcaagttactgcttttgtagccttgatagtctttgacttttcaagagctgaggataacaggattgattgttttccatgcataaagatcccttccttgtctgtggatcctagtgaaggtattccttcgaagctttattctgtattatgtctgtcatctgttgtgtttaggcaatactctctttttttttggtgtgcgtgtgtgttgcaaactgctacaaattctgcttaagtaatgccaatggcagagccaaatcgaaatttaaaagggggccaacacatgtaaaaaaatataaaaaattaattatttttatttttaaattaatttttacatgtcttttcagggagcagtcacagaagaactggtttgctgacccgatatatggaggtatttttcaatgaagttatgcttttgcttttggagagatactaaattttctaacaatatgtttggaaactttagtttccaatttcttgttgagaacataataggctgtctgtttccctcaattaacttctgttttgttgtaggaagttcatgcccctattcttggaatttgggctgttaagatggttgtcattgcaatatttttagcatttaccttagcaagcattgtaagtggatctacaaacttccctttagttactcttccattttagcttttagttctctgagtacacaatgttgtgaactcttcacgtattttatccttgtaggcactatctacaagaattgaacctggtttagagcagcagattgttcttccccgtgattcgtatcttcaggttttctcttctgctcttatctttttgtctttatctctcttctaatgaattttcctttccattaattctcatgtcttgttttcatggttgatttatctttctgcaggggtattttgataatctttccaagtatctcagagttggaccacctttgtattttgttgttaaggatttcaactacaggtatgctgttaactttattataatatccttgttattaatgagctcatttggaatattagcttttttacattagtgtcatttttgtcttttcagctcacaatcaaggcaaacaaacaaactgtgctctatcagtggctgtgattccatctctcttttgaatgaggtaatagaatgtctcaagaacaatatgatgcagagttggattgtgcaaaattattttccatatcaatttccctaatataatgtcgttaaacctcagttttacaactctcgagtcttgttctgtaagtgattgcagtttttgtagtgtctctctttctgccttaatgagtgttacgtattggcatatgtcatgtccatagttctctctcggtcgatgatgcttcaaaactttttcaattgtggaaaggcaagtaaagttaaatcttttatgtataaggagaataaaccatacacctcttatcctctattgcagatatcaagagcatcttcaacaccagaatcaagctacattgctaagccagcggcatcttggcttgatgattttcttgtgtggacctcaccagaggcttttggttgctgtcggaagtttattaatggctcttattgcccacctgatgatcaggttggtcatatccttttcctttcccaggacatagggcttgctattagtgctttgacttcctaagttacaaattttttattcatgcatgtgggtgaacccgatgcttatacaatatttctcttggctgagccagggtttatttttccatgcttttgtttgatgcactttgaaatgttggtcaggtagaaccctaaacatcacttattgtcaatttagctgttcttaggcactaatatttatttattatgattacttttctgggtggagaattcattttcataaaaagtgacatagtgcactaaattgaactgatcagagtttggtaattactattacgcatgtgcatgtccctaaatcgtttattgattaatgtgaaggcgcacataaataaaatttttaccctttaatgatatgattttaagcttttttattttattttattttattttattttatttattactattactttaaattcagtataggggctaggggtatgttgggcagattttatatattgtaaatggcattctttcatttttggaaatatctaccactgttgtactgatctgttcattatcagctagtcgtgtaacttattttcctatcttccattagctaatcatctgaactgtctactatctgtatactagtagctttttcttcatcctctctaaatgaaccattcgattactgagtggatctttctatctttccagccgccatgctgtccacctgatgaatctccttgtggtttaggtggagtttgcaaagactgtactacagtaaggcgcccttattctggtttctttaaacttaattggttgtctgtagttgttgtaaggtgttatatgtaatattattgcattgacattagtaaatgtttaaagaaaaggcaaggcactgaagtttttaaattgttaacagtgctttcggcactcagatttggtcaatgatcgtccatctacagcccaatttatggagaagcttccatggttcctgaatgcactaccatctgctgattgtgccaagggcggccatggggcatataccaacagtgtggatctgaatggtctgtaagattagcagtcgttgattccaccataaactagcttcaaattaagatgtgtttatatgtatactctgtattagaaactgcatggtgttcctattagatgagtttgtttctaaatttttgttcttacctgttttcaggttatgagagtggtattatacaagcctctgaattccgtacatatcacacaccagtgaacaaacaagtatagctgtctgtttgtaaatctatgaaatattattattttgattatttttgcacctaaactttcattgcgtttattgtatgtaactttcattttcatcaggctgattatgtcaactcaataaaagctgccagggaatttagctcacgagtttctgcatctttgaaggttttattccagtcaaccacataactccaattatttgtgctccttttaggattgttacttttctttttatacatagaaattgaacctgcactctcctgccttttttttaaaaaaattttaattgaggatattcgcttttcaaactgttattgccttcatatcatatgtgaccatggcacttctttcatcgtggtggaattgaagcataataacatgtaatcaaccttgctttaaaaattacaaggcaggatgagatggtgaatatttcagcacgtgcggacatagggcttataattatcttttagcagcattgctttcttatttagagaaatgtttgattacattatttctttgatgcagatgcaaatctttccgtactctgtgttctatatttttttcgagcaatatcttgatatatggagaatagccttaacagacattgctctagcgctcggttggtattctatatactatatatatgtactcttgtatataagctcattttcatagctgagcgtgtaatttgtttgttcatttgtgtgtttttatatatattattattactctttttttgaagattttgcttcccttagttttttggtcatgcttcaggccctgttcattttcttcatgttttgtaacatggacatgtttttttctaaatccaattttgaatactttaggctggtagagcttgttgtatttagctaattttcctttgagactactgttattttttatttaagaatgctgttaatctcgaataatcctgacatgttcctctttattaatgaactttgggtttttattctcacttgaactcggtagaggtttgtgcaatttcagctttattttgaatagtcagtggtcactaaaattatttcttgtgctctttatggcaggtgctatttttgttgtctgtctgcttataacttcgaggtttgaattcacattgaatctcaaatatggaaacatctttactatttatattggaatttaatacattaacatggtttcttttggcagtctatggagttcactaatcattttactcattttggctatgattgttgtggacctgatggtatagttttccttgaaaattaagcatcatataaatttatatacatattttctgattgtgtgtatttgttaatgtctaatagttattgttttgctttgctaccagccatcgaatgtttcattgtcattttcttttctcttagttcattacaagggcactgacttgcctttatctcagggtgtaatggcaattttgggcatccaactaaatgcagtctcagttgtcaacctcataatgtcgatcgggattgctgttgagttctgtgtacatatcacacatgcatacttggttcgtactgaaacatctccagatatatttgatctgggaggactcttataattttgttggttgaagtgattttgaagcattattttgttagaaaagaaaatagctttacattatgtatgataggttattaaatcagtgatttcattttgctctctcgccctgagagtataaaactgtcttcactggtatattgcagccctttggggatgttatcaggcttgcatctgtctgcagaattatgttctgtccgtcaaatggtttttaaagttattactagactactaacttgttatgcaattttacaggtaagccatggagataggaaccaacgcatgaaaaaggctctcagtactatgggtgcttctgttttcaggttgattacacattctcttttctcctattgagtcttgttgacattcctggtactcaagttagctgactcttttctatgtcaacattttcaggctgattgataatttaatgatttattcttgtatatagtccttgataagcaaagtctactgaaaattcgccttaaacatataatgaacagcttttattttatattaaaacccaggttgtttgagaatggagaagagtagagaagtctctatgtagatagtttgttttattcgatcaattgttctgtaaaagaggccattggcttttcagctaaattttttaatcagtatacttgaaaaagttctcggttttgtttctttgagggcgagcagtgatttcattaattattttctgtcttgtttctcattttgcagtggaattacgcttacaaagctcgttggagtcattgtactttacttctcaaaatcagaaatttttgtggtatttgaatttgttttcgtttcccattttaaacgattttgatgcctccccagatgaagagtgaaaacaagtggcttgtttttgcaggtttattattttcagatgtacctggcgttggtcctcattggtttcttgcatggccttgtatttttacctgtaagttcatttagcttcctttccaacttcttgttaggtagaacacaacacagcacaacacaacacttgttcatcagtgtgtatattattttctccagttaaataaggcaaaacgatatcaaatatgagctcatatcataaggtcatattgatactgaaaagggcattttaagtagatgtgttttgctttgttatttgcaggtggtgttgagtctgtttggtcccaccacaagaaaaacaaccattggctttgacgaacgagaggaagattcttcatcaaatttgagctgattttgggcaagtgcgatgataaacattggtttattattgattagtgctcttcggaccaagacaagttctaacgttgcacactctggtaatagatatgtagacaatgattatgacttgacatattcaaagtaacaattattgcagacatgagatcttttaaagtaatacaaaaatgttaacaaggatcatgatttagggacacttagtacagaaaacagtctgttaatatctttttaaatatgtgaatatctttaaatattatattacactatagttaagtcacttggttttgtaaaatcccattcatgaaatcatatgactgtaattgttgagatcattgatgctgactagaaattataaataattttgatatctataaataggttatacaattgtatacctcgatttgttagtttatattttttgaaaactcataacagaccctacgagtgataaatataatttatatatggctccttaactttcaacaatactaattctccccttaaaatatattaaaaaatttcctttaaacttttaatatttataaaaatttagtctttatgttaagttttgtctcactttaaatgctgacgtgtctttgtaaaattattaattttgcctcttaaattttgacaact

SEQ ID NO: 14620 - DNA, 8468 bp, Cannabis sativa
agactaacgaattaaggctgaaaaaattttgtaatacattatgaataaagagcttaattaacaatacactcctttttatttctcccctagcatagtacataaacaatctctaaaataataaaattaaataagagacatgatttgaaagtacaggagaaaaatattctaattagccttttccctttctatggcccaattcaagatttgcaacatatttaggtagagtggaaggagatatggacggaattgaatttgctgggtaaaagaaagaaagtaaatgtaaaagaaaaagaataagttagcaaaacatataagagaatttatattggaatagatgcgtactatgatatgacacacccaaaataaacaaaattgtgaaaattaataaacaattcaagcatatctagaaagataaaaacttcattaatcactaataagtccaagataaaactttaaacatcatataatgctgttcattgtgaccacaaaagaaactaacataaaattaaaccgaacatcagagctcaatttcttattgacattagagcattttattgggacgactaagaattgcaatatcaaaataattctagtttggtggagcgaagaaaatctcagaagtagtcctctttgatcggaattccttctctacatcagactccacattgaatgcagcctccagcacctgtggagataaagccttccacactgaagtccttccagccaaatgggtgaaaatggggctgcaattaacaaaacgaatatattagtcaaataaaactcaaaagggtgccaggttaccataatatatatgtacatatataacaaaatcatcatcatttagaagtgtgagattgtgacttactttggggttgtgataatagagaaccattccaaaccttctggatcagcaatctttgaaacaacaaaaaaccttggcacaatgaacaagttgccacctttaacagttgtttccaagacccttttgccatctacgcctacaacttgaacacggccactgcccctaacaatataagtaacctgcagagcagagtcacaagaaaatccgggagagcacatagcgctaccatccaacctcacaaggtcagccccaagcccaacctcaccaaccaaagggaggttcttagtgttcagtacaacgacccttcctcctttgataatatcaacatctaagggagcctctaagcagttcaaggccattccttcgcggtgctccttcttcggctctggcatcttgaagtcatcagaaagcttgacaatgcccttacccgattgctttccaacgagggtcttaactacattctctttcaagtcccatgctcggccaacaaactcagttgagaaaccagtgaagattccatttgatccggtgaggaaaaagtcggtgaactcaccagccttgtgagctttagaggtatcccccataaagagaacaacgagctcagtgtcttccttgttgtaccaccatgtcacaacaccaaaaggaagagcaatagtatctccctccttaatggcgatgaccttctcttctgactctggaagtactattccagcaacaccactacctgaaaataaagaacaagatacattaatctcccaattgtcaaatatcaattactcccttaaataacggcgctattgtattaaatttaaaagacatggcatagcatactacattgcacaaaagctactcgagaacaattcacttaacatcaggttgatcttatgaaataaatttagtgaaattcataatcttgagttacacataaagagtttgaaaacaggggtttacaacaatatgaactgaaaacagatccagaacatgtttaaaaaagcttgcagattcatggaggcaaaattaaagtaaaactatcccatatatatatatactaaatcattgggttttaaatatataccctataagaaatcgaataacggatgacatcacattcacatagatctaattaatctacagaacatatcacatatcgctcaaaaacatctgattctcaaataaatttatcaagaaatcattaaaaaaaagtcacaaagacgactttacaatataaaatacagcctacaggtcttctaacaataagagagaaaacacacaattgatattaataaaaggattgaatttgacttagaaaacaatcaaatctacatagtgatcgcaatcatcgaatgaattaaaatataccttgtagtacgtaagcgactttagatgaatctgaataacgaggaagagcgaagccatttttctcgagagctagcttagctgcaccaatgttaccctgacgaagcatagggagctccgatggagcccaagagtagtaggatccaccatcgcctccgtacaccttggtggccaacttcggggaaagatcaagctccattctcaaacaagaattttccttcactttctcggaatctaatcagaaagttaagagagtatggaatttgttttgttagcggtatagaacgtgtgaggatggaggagtgaactacaggtatatatagggaaggtctagtaggatttcacggtcactgataccaatttgtaactgaattattttttttaaataaaagaataatatttttgaaaatttgaaacagatagctgataattatttaaatttaatttcaatataaaattattacgtttttggattttttttttatagaaatttacttttaaaaaaaaacagtttaagatatttatgtttctggggttggtagatttgattaagcataatattttgatgatggatgaagaataatatgcggaccctaccactttgttcaaatataaaattattttttaatcatccactaaattattttttttaagattatatagagataaattagattaaaatgagatcaatttaaaatttcaaaattcaacattctcttcatctaaattaattctacaaaatatttttaaaaaaaagttctagaaataaatgtgaataattagatttttttaaatatcaaagtagatttcttttgtaattaatgcagattagttagccaaataaattttaaataattagatattaaccgaaatattttaaataaatagataatgtttttgaataaatagatagtaaattaaaaaaaataaaagttagttttttttttttttttatatatatatatataatttctgagaataaatttaaagttgagttgaaattgtatagaataagagattacatgttgactaaatacacgttacaagtgtttaacctttggtttaatagattttgatgccttataccttggagtaactgataatattgttcttattctgtttattggattaaaaaaaaatgaaaaaatcgtccaaagaaattgagttttttatttcctaaatttccgttcatattttatgataagattaacttagaaaaagtaacagaatattatttatattaataaagaaagaaaaaaaataccgaaatgataagaattcgaattgccatccaatagtttatcaatcaacattgtacttttcagataaaaaaaacattgtattgtattttccaatgaaacaaattaagaaacaccctttcattgacaaccaaaaatatgatcacaaattttgtgtacctaggttatgtttttaatttttaatttttaattttttttatgtgtatttttaaaattttataaatgtaaaaaaattatttattatttcttttaaaaaaaataatatttaaagttttaaaattttaaggaaaataaatataaaatttaaaaatattaaaattaagcataatcccaacattaaaaataacaataaaaaaaataataatattataaataatatattaatatttataggatttttagatcaccacttttgctctcacttatgagagcattttcttttagttttgattggtttagtaatgaaggtgcatgagattaagatgaattgtggaatatgttattagtttttttaatgttttttatttttttaatattttttacaaaaaatgaacaactttttattaaaaatattaatgaacattaagattaataacttaaaactattttagctatctaatttaattatcattcctaaagattgttaatgtttttgttttttttttttggaagggaagagtattaatgttttcaaagaagatcttttcattcaccaaataaaaaaaaaagaaccttcctataatcaatacattatatatgaattgaagaagaaaaatggaatagataattctatgaggaagagataatactttcaaagaaggaataattcaaaagaggtcccctttattttagctaaagttaagtttgcactctttcttttaagaaattataaaaatgatcatgtgtttattaaaatggtaaaaaattatcccatggccacaatttcagtcaaattttgtttaaacattttcttttttaattcaacttaaattaagttttagatgatttgaaaaattaattgtgttaaaaatagacaatattattttagaacactcccagtgtctttataatagctaaaagttaaaaaatttagttcaaaacttattttaactcttctaacaacatctttatagcttagctataataaattttcacaaactccaataaaatgcatctctacatgtagatatggagagagagtgagctaaatttttttttatttattttattactactttatttaagtttactaactttttataattatatataatgtataacataatatttttattaatttatttactatgtattagaaatatattattttaatgatgtagataaaattgtataaagaagttgatctatggtgtaatgtaaaagtgtgaggtaaaataaaaaaaagtaagattttagtgaattattttaaagaatagagtaaaaaagctgttgtgaatgatctttttttttttttgagaaaataagcgtattcatgcattgaactataaaaacagttagacctcgcggtcgttacataatagctcctccggtatggaggatatcaaaatagaaccatacaaatgatgggcgaacgcccatttagccacattatgggcgataacattacaagttctgctaatactattaaaattacaactgataaaggagggagatgactttaagcaaaatgagacatagttatcaagagcccaatgggactccttcccattgagaacattgatagctagtctcgagtcactctccacaattacatacttataacctaactccagcgcaatcgaaacagccagacaacaagctacagcttctccgcataacgcatccgagaaatccaaccgagacgtgtgaactcacatcaccttaccacaatgattactggctacaacagctgcgcacatactctctaagcctactctaacatcacagttcatttttatccaatccaagggaggtggagtccaggtctccttcaagatcggagcaatgttgggcaaaagagaatcatgtaactcagcaaaagaagtacaaatatggtcaatacatttcaacacataaggaggagaattattgtgaaccttttcattgcggcaccctccatatagtgtcaacaacaatcgaagcataaagaaatacgtcctccactcggacccccctattcctaaggtcccaaatgaatttcacccagtcccaaaccggaataccagtatcacatacagggtagattccccaaggcgaggattgccacaattgtaacgccacatcacaagacatgaataaatgttcaatggattcttccctcaacccacacaggggacaactattatcctcaatctgaaatcgccttccaattttagatctaacagggagcgcattcgataggatgcaccaccataaaatcttatgtcgctccaaaattttactattccaaagtttattccacagggacggagcaacctcacagtgaggggctctttccaaggcctgtgtcaggtaggccgatttgcacgagaactgcccgttactttccaaagtccaaatccatctatccttccctaccctgaggggttgccacctcttaagatagcagaaacactctcttgatcaaagagtctgtttaacttttggacgtcccacactccactaggtgacaataggtcagccacacaagagtgatctgttagaccattaccatttggtttcggaacgaactctttgtaatgaggaatccatggatccctctagatactagtatccctaccactagccaccagtttacaggcccctttccttaaaactgcattgcccttcacaacatttttccaaaatcaagaatccgaatctttatagccgcaactgagaaaatccttcccttttagatacttggcctccaatatcttgcaacacaaaggctgacacccattcaacattttccacccccacttggccagaaaagcaaggttcattcctttagtttttcgaaaccctagacgcccccaaagacttaggcatgcataatttatcccaagctctaaggtgaaggtcatggttccctttctcgagccccaccaaaaatcctggaccaatccatcaatcctattaacaagccggttggagagtttagtggtttgcatggcataattaggcagagacgggcccacaaccttaattagagtagcccaacctgccttggacaaggtttttggcttccaaccttgtaatttggaagtgagattgtccaagatgaagttgaagtcagcatccttttgtcttgctctgaaaaagggaagtcccaggtacttagtaaccccatccggagactcaatacccaagatttccttgatacctcttctcatgccattcggggtgttcttgctaaagaatatagaggttttgagcttattaacttgttgtccaaaccaatcacaaaacctctcaaggcaactccagtaacttttaacttcgctcatattggctcgccccaccagaataagatcatcagcaaagaagatatgggataagaccgggccacccctactcagcctaataccctgaatattcctttttgtaagtgcctcctctaaaagtcttgataaaacttcaacaacacaaatgaagagatagggagaaagggggccaccctaacaaattccacaagacggtgatatctttccaacctgtccaccattaaggcagatgttgagattggtggtggttacacactgagaaacccaattgcggaacttttctgggaatccaaaacaatcaaggacatggtcaatgaatttccaacttagtctatcataggctttgaccagatcaattttaatgacaaagtacccctctttgctttttttcccgttgtgaatgctcttagtctttttgaaagaaaaaaattcacaaaaaacatgttcaagggatcatttttttaccatattaattatcaaatggtcctttttgttatttttcataacaaaagatccacaatagaatttaacaataacagagggtactttttttgtattatcctttcaaagaaacataaattttatttgtaaataaataagttccatctttaaaaaatcatacatgtgtattgatttttatttttcgtattattagtttaaaaatatttacaaatgtgagatcattattattatggtttattttaagaaaataaactgtattgttagtgtgtattttttttcttttattttcttaaaaaataaattaaaataaaagaagttattaatcttgtataagatatttcattatagccaaattaattattaccattagattgagaatcaaaagctataaaaatgctcttacttttaagagcaaaagtgacgccctcacctaaggagtatattatttaaattaatttaaaattgatataagtttaattaacctaaaacaaataatatcaatatttacatatattgaattaataaaattaatatttttatatatataaataaatctaaccttactaattaccgttaaatttaacgaaatattcttatattcgtaaaatattttattaaaccaactaaaacggttaaataatatatatataaaaaaaatatcttttaattcttaattttcttatattaagtgttatattaatttactaatctatatatctatatatatatatatatctatatatctatatacataaagtagaagtatgagcagtgcatgtcactctaaaatctctctaaatacctctatttttttagttttttattaagttcataaatctatatatctatatctatatatataaaagatctatatatatatatctatctatctatctatctatttatctatatatatatataaaggagaagcatgagacagtgacatgtcactttaaaatttctctaaatacctctatatgttatctccttaattctccattcttttaatttttttattaagttcataaatctatatatctatat

SEQ ID NO: 14621 - DNA, 5729 bp, Cannabis sativa
ttatttatacaactcttgccaaagattaccaagctaaaatatcagctcctctacaaatgctaatcacaagaattagcaagccaaagtattttttgtgactaattaagtggtttgcattaagatacacaagtttgaaaaaaaaatggaaaaagcagatacagaatgagacattgaatcattgtttaccttccgaggaagtatctatattgttgaaaccaactagcggtttttctgttggataagtcgctagacttcaaaaaattttgttgtatagtgtccttcttcatttcaacattacacttcatatcctcccaaagttccccagcaaaagactgtccatcagatccagcacctggcgtacttgctccatgtgcagaattttcacctgctgatgcagccattccatcagcactttggagcatgtccattggaacggggtatccattatgaagcatccatcttacaggaagttgtttatatgtcacccctgtgcttgtctgtggttttactatgccctctaaaatgtcaataaaatagtctggaggattgacacgctcagggacattaatcccaaggccagaaaagtactcttcaactttctttgccgatccatgatacactgtaagtcctcctttagctaaaagtatcaaatcatcaaacatcctaaacagggtgtagctgaaagcaaaggaagttccaacaaatgcttttatcatgttaggcagaaataataataactatagataaataaaaaagaaaaacgacattcacttcatattcaaatggtttcaacaaagcttagtaaaatgaagtaaaaaacaattcaactgtcaaatagttactgctcttattagaataattttgagcacatgaagcaatatatggtcaatgatatggcataaaccatcagcaagcgggcccaacaatataaaatcaaaagccgaattcctagtactggaaaaagaaaacaacactttgactaaaacatgcattcttggccatgatagatgtttgtaccttggttggtggacaaccatgcaaatattcactccttcaagagcttcacgccttagtgccttgagaagtaaattagaagaggaactatccaacccagaagtgggttcatctaaaatcagaagtgaaggttccatgaccatttcaagaccaacatttactcgcttcctttggcctccagatattccccgcttctccactgtcccaaccaaggaatcccgcactgcctgcagacccaagcactcaataactctttcaacaaccagaaccttttcaggttttggtaggtctgctgagagtctagtcaaaaatccaaaacagggaaacttgtgtcagtaataatggcaatataagctttcaaaaaaattagcaatatgcaaccaaagcaggtatgcaacagatgagagtacactaatctcaaaagagcaaatagcaaatagaatttggttaatcaattaactttcactactaaaatgatacacaatacaacaggagaaaacttggagaagaaataattgcagaatgtcattgaattcagaacaggcaacaatggttgcagggagttagggaagcctggggtctccctgagtatatttactctgtttagaaattcatcgacccttacacaatcagctactcgccctatttatacttaatctcccaacttcgacaactaactacttaggacagcccaacaataaactgccacatcagctagtgttagttacaattagattcttaggcctcctagaataagttataaccagcgatggtgtatcataatagcttaagaaatcaattatgccttcaaactcagtaataatttaaagagtatactagttcactgacaattcatatttttcctagcatgattgactaaattatctagaggggacatagtgatgtccactagaattataaaccaaggtccttccttccaagagttggcctgagttctaaagatggatacataactaataaactgatccaaaatattagagcccaagtgaagtttttttagctcagcttcctgaaaacaaatacagattacaaaaattatgactcttaatgtcggtagttcaaatgaaaatcaaataggatttgattttttttttaattccacgttgcaactcagggattccatgttggaaaacagccaacaaagtaaaaaaatatctgcctttgaccctctgccaacttgatggtttataggagtgttatcagagatcatttagaaacactgcttacatctaaaagatatatctactaacatctaaaatatggaattgaatatgtcaaaaaaaaaaaaaaacatagaattgaatgctggagctaaaattgcaaaatacctgcatctcgcgctgaaccagagattctcctctaccgtcaaatttccatgcacaatatcatcttgtggtacaaaacctatgattcttttgtatgaatggatcgattccacctttccatttatgagaatcataccactcatggtgcagccagtgactttaccagccaaagcagaaagaaaagtggtttttccagccccggaaggacccatgacagctgaaactcggcctggtgatattttcccagtcacacacctcataagatgtttgtttttccctttcaaagtaagggttaaatctttaaatgcaacctcaattgtaggtctcttcctgatatcaatatcactagccattgaaataaccccagagaaagttaagttcttattctgctcctgtaaagccttttccttctcaatttgaccgtatgcgtacttgaaaatttgactttgagtatgcaactgtttgccctttggcgcatgctttttaatatttttatcgcctatctccacgttaaatccttcgtgactatctgggtcttgctcaatgtctttaattatgttcacaaggttgtttttatcgtttttcttgccttttgatgatgcttgctgagatgatgtaccgtgtaatggcagaggtggcaaggtagaatctgttccatgtctacctagtccaaagcttttaagatttgaagattttttgcgagaaaatgtgcgtgaaagctgactttgtagtccaattgcatgcttcttagcaatgtcttttgcagatttccatttttcacgtgcttgtgcagtttctcgtacactttggacagccttttccctggactttgcttgtcttttctctcgtgttgcaaggacttgatcagaacagttaaatataatgagaagaatgaaactcaatccagcctacattgattgacaaggaaaggtcagttctggcaatgttgtgatgcaattgcttacaaagatccataccccatagcattgaatgatttcaaaatgtgtcatcaatattaaatgatgtttatatatttaaagagtgcctggacagtatagttgctattttgtataaaatatggtagaaacataacgcattactttaatctaaggctttttcataaaaaaaaaaaaaaaacatatcataagaagcatataaagaatacaaaatattttgcataattattgaagaatcagttcacttctccctcaggcaatcatgcaagctgaaatttatatatgtcggcgtaactactacaagttgaaaagtaaagaccactcacaaaaatcaggaccccataggcagtaatattctgatttgctgatctaggttcacaagttgccatccggaaacatgctgacaattcatccagaaatataagtatacatgccacaaggcaccatcatggaagaagtaaatttctttaacaaaaagaatacgaacattacccatagacattcttatttaaaataacatgaacactgaaatttagtgtgtttagttcaaatgaacaaatatcaatcgtgagagatatctacactatgacaggtgctttctcctgtcaagatccaaaatagtaactttccactcttaacatcataacctaaattcctcattttaatgaattgactctaagttcaacattcagttttgcacaatcatattctatgcgacaagagttattgacctgttgactattaaatatccccatattacttctgtaatgatataattagaccaaagcacttgagctggtctgcttaagagttagtcttagaaaaccattcatgataagccccaatccatgtgtcccacagaagaccgaagcgctgaacttattcctagcctgagtgtctaagtcttttaattgtagtgtaactctttgtacagctggcaattatgaactaagacctataaatagaaacggggattctcttgtaaagggtagctaggaaattaagaagagatttgtctcattggagagaacagccctcttgaaaggctgcctgggagagtttgagcctctcgaaagctcactgtatctatggtttctgtcattgataaaatcattcattgagtaaatttcttcttggtgtgtgtgtgtgtgtctcatctaagatagtagtttctgacatgagatttctatcattgcatgtaagtgagtcaacataattcctaaaaggaaaaattaccttgctgagacgtagaccctgtcctgcagtaatgcctgcaatagcatttaaagaaatggcattagcacacaaaaaagtgaaacaattgcttccacaactacaattttttacacacaaaaaggaacaaatgacaatcatgactgaaaaataacaataatgatactgaaataacagcataagggaaaaaaaaccaatttttttgactcatacaagtttgaaagttatagagaagtgcaaggagttttgggataattatcaatacccactactgcaaggaatttttttgacagtagacggacagtatgatcctgccgaacagaatacctcactagtactcaaaacatcagcccaagtgtctgctcctccacaagtatggtttgactggccaggaggtagctgataatgatatctgtaaaatatttctgctgataaatattaattcacactaataaaaaataatgaaaatttgagaagaacaaagaaggttgagcaagaatatgaacttacggctcacaaacaccagaaactttattgagttttgaaagagggcagtaagcacccaacggacaagcttcatggaacataaaaggtttagcagtattagaaacgtttccatagtcaaaaatttttgtttacgataacaccataaatgacaagttttataaatgtgatgatagatacatagacattgcacttgcattgttatcaggtatttaaagaaatacttacgaatcatgcaagtaagaccatgagggcagaagaaaccctcacaacaagctgcgcagtcagaagttctaacaggcatatcttttgaatttttaaggtcaaccttgcttgagccagaactacaggcccagccaggctcacaaccagaaacccacgtggacagattacagttcttattaggtttcaagtaattggttttctgtaacgcctcactcacgaacaaactactgaaatagtacttcacttctgcggccgtgcatatcctctgcataatgtctttttttgtttttccaaattaaaaatcaaccaaaaaaatgaccagaaataaacatcataaatttcatataaaattggtacatacaaatagatggaatatattcagtaaaccaaatagtttaatgaagaagctaatactttaatcaatgcaagaaaggttaaactatctaatcaa

SEQ ID NO: 14622 - DNA, 2586 bp, Cannabis sativa
accgaccgatgtacaaccctagtaaaaatgtttaaaattccgtaaaaccgtatttttgtaaattttttgttgtttttatgtttttgtgaaataattccttttatataatacacttaaaactggacttcttacacttaaaaataaactttatataatatactttagatacagttaataagagtttaatgttaatttttttgtactaattttaaaaataaaaatttacataatatacttaaaattaatttttttataactttgtttttctttatatttttacatatgtttttatttacatattacagatttcttctttttatagattttcgcttatttttttttaccgttactttcacgtagtaacaacgttaaaataatattgtcctgaagtaataaaaaaaaaacaacacttcgtatagttgtaaaaacaaatgatgttactttttcatagcaacaacgttaaaaaaatactaactatttttttttttttttctaaaacaacggaaaaacaacactttatttttgtaaaaaaaaataatccataaaaatataaaaaaatagcgtacgtattcataaataaaaataaatgtataaaatttttgccatttttatatatttatcaaataatccatttaaaaataggttatcaatcaagtgcctcacatattaatatttccaaattcgtaaatataaacaatcaaaccttaaatttgatttttaattctcttcaaaaaagttttgatttttaactttaaacataattttcatgtttaagagaaaaagggaatatttcttcaaagattcttttcaaatattaaaaatagctctaaataatataattccttagaaaaatggccaactaaattttgctcactaggttctcttttgtatgtaccccaccaaaaaagtgatcaatcacataacatcagcaatttctgtccaaaaaataaaattaaaatcacaaatttgaacagtttttagtttaaaaaaaaatggaaaaaacaatttaacgagcgggtactccgtactgtctcccttatgttctctctctaaattattgaaaatcctattattaatatttctgggatgaaatgaattataaatgagtggtcttgtttatttgttctttctcaaggcctatatatagtagtgtcattggaggttcagaatcataccctgaaacactttgcctctccccaatatcttcttctcagcctacgaactccttgaaagtttccaactttaacgatttacaggtaaaatccccaactgggtcttctgcgttttcctcaaatcttacattcctattcttcggttcttatagttttcagtaatagttttgtgtttatataggtaaacaaatgttgttttgttctttccttcttttaattgtttgcgtttcccattatagatcctatacatttgaactaatttcttcgaaagtatcttcttagttaagttcagtttgtgttttttatcaagtttttgttcagattatcagataaaactttattattgatgcagttttaggtgggcttttgattttgagagaccctctgaatgttgttttctctcctttttgggcttgatttgattacttttgcttttggtgttgtacacatgaacatgtttcttccaagttaacatcattttctgaataattttaagtgtaaactgtatctttatgttattgtttggattttaactaatccctatatgttttaaggcatgcttactggtagttaatgactttgctcctttttagatgggggaaaagtgcatattattacttaagcgcaaaaacttcagattacgattgcaattgggtggctagtattttgatatagtaaaagtgtcgttgctgagttggtacttgtgtcggttaccattcttgatgtcttttggtttgtacttttaccaaaatgttggttatgtatttggattccttttgttagtaatattctttttttatgatagatattctctcaattgtaatatgttttatattagaggagtatttttctcttggcccatttgtaaatctgtaaaatttgactcatggaccaatttctgataagttaatattattgcagaatggggagtactgatggaaccagctatggtgcttacacttatgagagtcttgagagagagccttactggccatcggagaagcttcgcatttccattaccggggcaggtggctttattgcatcacacattgctcgacgtttgaagagcgaagggcattacattattgcctctgattggaagaagaatgagcatatgacagaagacatgttctgccatgaattccaccttgttgacctaagggtgatggataattgcttgaaggttactaaagatgttgaccatgtctttaaccttgctgctgatatgggtgggatgggtttcatccagtccaatcactctgttatcatgtataacaacacaatgatcagtttcaacatgcttgaagctgccaggatcagcggtgttaaaaggtttgttttctatgatcaatggtatcttttgcggttaaaatttctgtaccactttattgtttaacaaaagaattattctgtt

SEQ ID NO: 14623 - DNA, 8306 bp, Cannabis sativa
agacaattcaggaccattacaatagctttggcaatggtggtattaccttttttgaatggagatgatccgtttgcgcgggtcatacgcattgaagaatattttcgaattgaacattatctttaaatcccgttacattatgaagccatctggctacccacactccaatcttgtcctaaagacattccatcttcataaattgttcttcaaaaatcttcctattcctttccaggcataattccccatagtaaggctggtatggcaagacgacatagagtttggaaatgaaaatagtatgcccaacttgaatcagcatatttttttgttttacgtctcgtagttcttcctcaaccaggtgtcttttttttttttttttttgaaaaaagagaaagaggtcacttctcttagactagccccacccccaatatattattgaaagtctcacttgtgacgaaggaaaaccatggatacaaccactatagctcaaagcaaaaagagacaaaaacatcaaaactataccagagccgaaacaaaactagtaaacggaaaaacaataacccagaatcacaataaattaccacaaggctctccattctctacttaagtctagaaacagaactactcaaagaactttgtcttatatacccaagtagctgtccaaaatctaatcttatcccataagacatctagtgagctctccacaccttgaaaaattctgtcatttctctctaaccaaatagcccatagaactgcaagaattgcggttctccataagctggtctttcttctacttccacccaatttgctaactatcatatggttgactgattcaggaaagacccactgaatttcaaattcatttagcaatttaatccacagcctatgtacaaagctacacctcaagaacaaatgtcccacatcttcaccacttttcttacgaccaacacaccagcctggcgacaaacacaaaaatggcctttttttttgcatcacagcgtgcacttttaatttttctagagccaccagccaacaaaaaactttcactttggaaggacatctgctcttccataggatttttgaccagaataagccatagagtttgtcttttggtacaacctttaatgctgaacaccaagatttcctccgtctgggatactccactgcatgttaaattctttcagcaatttgtacaaaaattgtaatgcaaagtcacagtgttggatgaggtgtctactagtcttgtttttctttctgcagagcacacgccatcttggagataatgcaaaagagggcttcttcttttgcaaaatcttatgtatgttcaccgtgttcagcatcagtaacataagaagattttgactttgggtggagttgctggtttccaaatgacatcggactaaattaattgcctcccttgcttcctattcctcaataagtaaaaaccagatttacaagagaatagacttgagctcgcacccttttaatttctgcagtacttacattttccaccctttccagtgtccaacaactgcatcagctgtggaatttccctctcgtgcaagtttctgtaaaacttgaaattccaagctacctaagagttgagatttcctataaacttagatatgctctggtttctttttgggcttattcttgctaggtaaggaaatgagttgatgacataatttaatcccacccacacatccccccaaaacggatttggttgggaaaatcttttgaactgatgttacaagctatctagttttatttccttatgttgtcttgtgctttatgttttatttcaatttataaattttgtaattttccccaattttgtaaccatggctttcctccaccataaatgagaagttataataaacttggaagggagtcattacaagacatatgaccaaaagatgagtatgatagcattctttctaagcataggaaaataatcatgtgttggcatataattttccattcattccccctctttatatccatgttactgttgtgttatatttctcatttacctcttcggcaattttaggttggaaagcatttaaaggcattatggtcagcagctttccgtgccatggatgacataaaagagactgtcagaaattccggtgaaaagttatgccgcgctgttacttcgttaactattagactgtgtgatgtttctctaacggatatagcctatgctagccaggccatgaacattgttctgcctgttctgctcaaggaaggcatattgagtaaagttgacaatatccgcaaggcatccattgctgttgtaatgaagcttgcaaaggttaacatttcttttcagttgtttgtagttcttctatctgtattttaaatctcaaaagtattctgggtttctccaatttatttacagggtgcaggacttgctcttcgtccacacttgtctgatttagtctgctgcatgctggaaagtttatctagccttgaagaccaaggtctaaattacgttgaggttggaaacttatataactatatgccattcatactttcaggaattttttattgtttcctttaaattatctctttgtttgtgattgtcacccagttgcatgcagcaaatgccggaatacaaatagagaagcttgaaagtctgagaatctcaatagcaaaaggctctccaatgtgggaaactctcgatctctgcttaaatgttgttgattctgaatccttagatcaattggttcctcgtcttgctcaattggtccgatcaggagttggtctcaatactaggtatctattaattacattattatttcaaatccagatattatggatttttttagttatttcttgttattgttaactttttgtcttgttcctcttagtttgtgcgcttcagatacatagatcttttgtggaatattctccaaatgttcgctttttatagagttaacaattgatcgtttgagatatggaaaagatattaatgatccataaagtatccactgtaaatagggaaactgaaaggaaatgagtaatcaaagaaagcaaaaattcttgtcactgaagcccaaagagagattcctcacttatattattaatataatactaggatgggaaaaagaaatctacaaaattgtatcaaacctgaacatacactgttaggatttacaagaatcctgaaatgaactgagtttattctattttcattagtgagcaactccatgcccactagctagctcagtggtaagggaggtatgaatctgggacctcattatttctttgttgtacgcaccaagtgtactaaccataccaatagaaaaaaaaatagtgagcaactcaaaaatgtgcaggtcatttaagtagagactaaagtatgtgattgtcatgtaaaaatggcaacatgtctttatttcttttttcttcttttttattctctctttacattgataatacaaaaacaattaaaaagaaagagaagcaagtgtacatgaaatatgactacaccattagaaatctgcttatttgtctggtgctttctttgacatggcctgtcttgtgttttctcacagggctggtgttgctagctttcttagcttacttgttcaaaaagtgggccctgatttcaaaccatacactagcatgcttttgaagttgttgtttcctgttgttaaagaggagaaaagtgcagcagccaaacgtgcctttgccagtgcttgtgccatagttttaaagtatgctgcaccaactcaggcccagaagttaattgaagatactgcagccttgcatactggtgataggaatgctcaaatcacgtgtgcaattctatttaaaagttactcatccatggcctcagatgttctgagtggatatcatacatcaattattccagttatttttatctcaaggtcaatttcgtatctttcttctttggtgtgactttggactttaccttaaattagcgttacattattttttatcaccaaatcttggcaaaccaatgagactaatcacaactataagaaggcagatctagcactgtaaagaagtaatttactcaaggtgactatagaagacaggctcaactccattgctttgttgtaatctcttacagggtctccttgcattagaaaagttgctataatcttttgcaggaccttatttgttatgacctttgcaatttaatctcctttggcttctaacgtgctgacctctataactggagtgtgaactcatatttaagaaactgaaagcactgtgataatattttatgcttaacctgcaggaaagttgtaatattctattattgttataactgattattatttgtttgaatattgcgtaaagttgctgtgttttgtttgctttggaattttaatgttcgcaaacacagattcgaggatgacaagaatgtctctggactgtttgaggagttatgggaagaaaatactagcagtgaaagcatagccctccaattgtatttgggagagattgtatctcttatatgtgacagcattacatcatcttcatggtcaagtaaaaagaaggtaagctttcttctaacccctcttaagtgaagttattttagtttctcattatctttcatcaccttacaatttctactttattatttttgcaacttatacttttataattgttggctcatggttgtcattacataaattgcagtctggtcttgcaatttgcaaactaggtgaagttttaggtgaatccttggcttctcatcatcgtgtgttactccaagctgttatgaaagaaattcctgggcgtttgtgggaggtataatcattgatcaatgaactaattactcaaatgttttttgatgaaatgaaaaataaaataaaatgttattaataaagtggatgatttatatgaaaagttcatccggaaactaaaaattgaatactatttctaattccatcctaatcatacaacattctaataagcttctgtagttagttataatcagtcaaccatatgtggaactaagaggagttgtgcagacaaagaaaacaagtgcattaggaacaaaacattgaaatgaaacacaatatattagttgaatgtagtagccaatatatttaggcaatatattgtatctgtcaaaatagtattatcttttccctttcttacattagtctactaacgtaacgttgaatgagacagggcaaggaaactctacttaatgccataggggctctctccaagtcatgtcataaagcaatttcggttgatgatcctaccactcctaatgccattttaagtgtagtttcctctgcatgtaacaaaaagtcgaaaaaataccgtgaagcagctctatcttgtcttgaacaggtatttatttccattttgtagccacaacctatcgttgaaagctttcttttgtttgtgtaaatgctcttggaaatatgtcttgcttctttcttcattcccccgttttttccatatggttgtgccttctttttccatttcatttcatttatgcatatcatgtacttttgttacgtactgtcagttcctgatatattcaattggtttttcacaaatgatatatatatatctgatgtacaaggtcttcggtaatattgctataactagagattattgttttgcatttgctttccttttgttgaaagttgtgcttctcatgttcccattcttacatccaatctagtaggcattttgtcttctttgacatccattattgtctcatattctgatttcaggttgtgaggtccttcggtaatccagagttctttaaattaacttttccaatgctatttgagatgtgccagtccgcaactctcaacaaatctgggaaactaactttgacaaatgatgctgttaaatctggtgataacaaaatttcaatatacctttcaaatataacaccaatttctatctcatttgagcttacaaatctatctttgctttgtggacagaaaaagacgatgccgatgagatttcatttccgaatgacaaacaattggaatgtgtgacatcttgcattcatgtagcacaattaactgatattcttgagcaacaggataacttacttcacttgctgattatgtccctttcacctgggcttccttggacaggtaacctttcttttcctatttgctcttaaccaagttgcaagagctttatgtataatatactgttatcattgatgaatttgatttgttttgttgcttatctcatgcattttcactgtttttctagttaaaatatcagccttttcgtcaataaaagaactctgctcaaagctccagaagattttggatgactccaaggaaccctccatagatgctggggtagcaatctttgtccaaaaggtaatatgagcccaaattatccatccatacctgtatatgtgttactgcttgtttggatcaattgaatttggttttcctgttcaggtgtatcagtcagtgtcgcctaaaatagttgaatgcataacaacggtgaagattgctcaggtatgcacatcatgacaagtgaaaacgatttccataaatgtcttcgcttaaatttaactacttttatcttagtaagtgactggttttcacgttgatacaggtccatgtaacggcttcagattgtcttttggaaatctttaaactatatgagcacattccatctgtgtattggacagcaagtgtagatcttatggacgagcttattcaattgcttgaaattgaaaaaaatggggaagcaaagtccttgttgaagaggtgcattgacatcttagaaaacctgaagaagcatcataatgttcagggcacctaaactcaaatttataggattcttgtaacttgggacataggaatacatgtacaaaccaattgaatcacattaatacccctattttttaaaattggggaatttgcattacaagttatagaatttatagatagattttacttccataatagtacatataatacaatttttaattttattttttttggtttttaactttaagcatgaattttttgctaaaatagtattttacaaacataaagtgatactaaaaccaaatttgagtttatattgttagtgtgctgactatttgaaacttttttttacacaataccactttatctaaaaaatggtgatgtttcttctagtctttgcactcaatattccatgtcgaagttcatttttgatgtccgtgttttccaccaaggatgtgtgtcacccatgaagagggcttgtgagcaattagggtctacttgggtccagcttaggcccaagtactaataagggtccaagtattacgaagacggcttgacattgcttgccttgatcaatgcattggtccgaaacaaccatttcatcttagtcagggatactacaattttttttcttgtgctgtaaaacagaagttctagcattcaggactctgttagtttctccagctccatctgaccgtcttggatcctaaaagatatcattggctagctagcatgcaaaaatgccaaaaaaataagcaaagttaagtgtgcaactcaccatagattaatctcgaaggccagcagagtggagcttgtctggctcactgtcactgagctcctaaagctcatcatcatccatagaaggaggggctctctctaggtgcctgcgagctgcctccatggctctctgccccgaggatgagcctactccccgatcgggcttcggggcacccctacttgaaggtcgttccctcctagccggaggatcatcaatcatgagttgcccagctagtgcaagccctggaggaggaagaggaagagatgatccaacaacatctctaccacgggtggtccaaaccaccttggccctcggacaacttgaaggcttatcaaaaggtccaccagcaagacctctcaatctggaagacatatttgcaaaaataaagtagcaaaatcagaacaagtcacaaatattcaatgcaagataagaatataaaagatggtgtaatcaactatcaaataccatcatcctcagaagagtcattgtctgaatcctcagtaaccaccttgcccttgcctttggatgtaggcaaagagcgagtaggtcctgtagagctctggcctccatgcctaatctgaagagaagcatcactaactgagcccctgcggaccaagcgccgtcagatggccctcttactcctctccacattttgagctatgtgagatagagggacgtcatcatccaagtcagggacctatccatcactaggacaaactccctctgcagttggggctcgatccacaccaactggtaggccgtgggctcccacaactccaggagca

SEQ ID NO: 14624 - DNA, 12168 bp, Cannabis sativa
  modified_base (1952)..(1953): a, c, t, g, unknown or other
cttccatgaggacttatgaacgtaatagattgagtggcctctacttgtttctgactgaattagtgttcgagttaatgtttagagcatggaaaattacatgggaactaatccccatcattttgacatggctccatgccaagatgtcttggttctgtataattgtggacacaatcttatctttgattgttaaaggtaaggtttggcccactttcataaattttgtggcatatgtctcgtttatgcttactttttccacatcctctagcagttatatcatttatttcacccctacacaaggttttaacacatctcttcccgggccaccctctgtgctagctgggcgggtgcctagagaactggcatttccatttcttctctaaccacaaaaattgacctggtcgagacattgaagcacttttgtgcactttttagattacccatcactgtcccaatgcttccgttgtcatagaaaaatttcatacacaagtaggagtgtaaatggatcgaatctcatctagctatgactaactcaatccaaatcatgcaatgatctgccttgccttaccctgctagataagatactcgaatcggatcaaatctaactcaacttattaagatcggatcttatccgactcgacttatctttttttttaaaaaaaaaaaagttttaattttatccaagtcctgggtgggtctaaggtcctaagtttggctccagatctcgagttcacgtctgggtttgtgtttgggtcccgagtctagagtcctaggttcgggtctgggtctgggtctaagtccaggtcttgggtcctacgtttgggttcgggtttaggtttgagtcctatgttcgggtctgggtcctgcgtccgagtttgggtcctgcgtttgagtttgagtttagggttcgggtttgggttcgggttcgggtttgggtccaggttcaattctgggtcccgagtctagtcctaggtttgggtctgggtcctgccctagaatcatgtcccgagtctgggtctcagatctcaagtgcgggtctgggtcccaggtctgggtcagaggttcgggtctgggtctcaaattctgtcccgagtccggtggggcctaggtccaagttcgagtctagtttgggtctgagtttgggtccgagtctaggtccgagtacgtgttaaggtttgagtccgtgttcgagtttgagttcggggtctgggccttagtctcgagtcccaatccacgtataggtcccaagtttgagtctaggtcctcggtccaatcccaagttcgggtttggtcctaggtccaggtccgtataaatggggaccatttgaggatgttaggtttcgtgcaaagtcgcatcagtaccgagaatatcagagattatggtcttggacaaaaatgtggccttcttttagtagtgcacgcatgttgccagtatgatgtaggggacaaactctgacactgtgaggcctcgtgtctagagggttccaagaaaggagatgtatgggtgatatctaggcgactctttgattacccatgtccaaatcgcctcatgaaggtacctggacttgtcttgagagactcttttcttttgggccaaatgatcttttttcggaccagggaatcggaccttagtaggttagcgagttgggcttatgtccggatcgaaatcacaacttgacttaatctttggcccaagtttgggccaatctaactagtattaggctttggaattgtagacgtcatcatttcagaaacccgaataatacatagttgtaactgatttaggtgcaagtatagaaaaatgcatggcaataatgaaatatatagataaacgttttttcttctttgaacattaaataattataactttaatcactctcatcgacttttctactctcactataaaaaaaaaactatattcagtgacaatcttttagtcacaacataattttttnntgactaaatgtaatttttagtcacaacaaaaagttacttatgactaaaatatagtatttagatacaagttgttagttatttaattttagttacaacaagtattgtgactaaaaatacaatgagacacaacaaattgtaatttttgtgactaatatctttagtcacggatcttttagtgataacataggaatgataatttataattagtcacaactttttcaattttagtcataatttttattgtaactaaaattaagattttttgtagtatctatcttttaaaatacattaccaaaattttattttttctattttacctcaaacttttacattacatcatacattaacatctttaaaatacatcattcaaacttcacttttttaaaaaaatttagtatattttattcatttcaaatatataatatgcatatatatatttatttttatataaaaattaaaacttgaaataattaataaaatatatttagaataataaaaaatattttataaatataaagtaaatttttttaaaaaaatttaaagcatgtgatgtattaaatttttagtttgattctttaaatttttcaaaaattatcaattataaattctcatgtgagtgttgtacctactttcctcactctacaatgaattgtttttttaattaaattatataagtaagtttgactttattatataccctaatatattttcaagttgggttaatagttaccctaaaaaaagaaaaagttggattagttacctgtcttgtaacacacacaataacttataagtgctgaaactattctattatttgcttttcaatcgtactattgcagagaatgagactccctaacgtataaaacttcataacttataataatagagtagtaataaatagtgatgtcactgtgaccatagatcgtaatcgtactattctttttatttttttaccaaaggagaattcaattttatataataatattgtgtaatccaaagttgaatctaatctcaaatatatagactataggaacaaaaagagataagaaggttatattgtttgtcgtttataataataataataataattatacaatgctattgtgattataagatgggaatgcatgcttagaagaataaaatcattttgtagggtaggatacttaaaccttcttagctagctacaaaataatcacgtacaattaataatttaaacactttcaggttattatattataattaattttaataaacttccccatgtgcttccactaacctcacaaacatattttataacttaatataattagcaacaaatatatattattatatttataggtatagtttggttaagatttgttggagttaatcaaagcctaatacaggtgggaattttcttttccttaaaatacatataacgagatatattttcatcattgtacatatatacaaagtgttaaagttcaaaacaataaacaattaacaaagctaaaaggaacgatcgatatcaaatcaattcatggcggttcttttatacaaattaacatttatacataattaattaagatttgtactactaggagggatcgtagtacttttttatatatagattggtgagaatagagcaataggttgatgctttcatatatatatatatatataaatatagatatatatatatatataatatttgtagcatctctttcggccaaagtgaaaaatatatagttaaaatatagtgacccctcgtgtgaagagtggtctcaactcaaattcttcaatataaatagttttttttttcctttttcctatgtgaaaccttttctcatactctaaaaatcaagtagctaggtttcgattaaaggtgtgaaaataaggtaaaagctgaagatgggcatcttttaattcattaaaaaaattgagattcgggcgtgtgataaggattggaataaagttgaagatgatcaagaggagagtttatatctaaaatatatctttatatttgtataggtaagctaaggtaagctaagctagatcttttaattgcactatcttaaccttttatcaagaataacaagttggaagatttctcgtgttggtcacgagatgcagaaaagagaagagaagatttataggggccccagcatgaataagatatgtatatatatatagactataaatataggggcaacttggctttcattcactttgcttccttttgggttttcatttaattaaatctctttttcattcatggttttcatcaattactcttcatgagtatccatatataggagggaaggaatctattactaaattcatgctttgattggtggttggtggaaaagtagtttggatcattaatattgtatatttatgtgcatatatagttatgtttaagctgaatattataaaaaagtacttttctaagttgcttatgttacactaaaaaataaaccagagtggaagttttcttttcttttctccacatttcatttggtgggccaaagctatagagtaggtttatctgttgggcacaaagaattcttcatcattacctaaggcccatagtgatgtagataaagaaagcaaagcccacttaaaactctcaattttggatttggattaatcaaaactatgtgataaggaattgactttacaagtgttttaatacaatcctatatgtgtttcatatttgtattacaagcttttcaacaagaaatagcataatttcaattaatgactgaaaagtaagatagttcaaaatctttgttttagtgagatttaaaaaatatattacttgagactgttgaattaattctgaaattgttgtctgagaaaactaattactttcctcgtagggtcaaatcaatctaaagtgaaggtgtagaagagccctgaagtaaaacttcatgttctggaagagataagatagtgatccaagttgtcctggagtctggacaactgacatgtaagttttccccactaacctaaaagttagcatttgggccagattttatcttcttccctatcatatcatatctattacttaatagtattgatttgagatacaactcttctaactaatggctacataataataatgtaaaatctcaattctctatcaaatcacattaatgaaaatactaatctgcactttgccgacctttatcaacagatataccattccattggtggtggggacaactttctcttcacataattgtgtttttacccccaacaaaaaaacaagtaaactaaacttgttctgtactgattaccttctctgttttgttagataactgtttgaattttatgttttataaaatagaaaatataatataatactttaaatccaatttgaacaaaactaaatttaggttgggattgaccaaaatcgaatttaagtatcattatgttatattttgtattataacacagaatcataagacagaagggtcgataaataattttgcaaaacaaatgattcactctactagggagcagcagaatagtcatttcttctataaaatggtaaacacggcagaatctggataaataaaagaccaatgtttcagtcatatgctgatcagatcactccgtttttaaataactatgtaaaactccaagtttggctttgcaaggccattagtatcttgattggcttcgtaccctgtagaaccacttttcttagttaatattcctcatgtgaaaacaatacaagtagccaaataatatctactagactactacaagcaaaactatgtgcaccttggtgagcgagagtgagaccgagaatgagtccgagtacgagtacgagagcgagagggagagcgagaaggagaacgggaacgagagttatatcttcgcgaaccccggctgcttctactagggcttctacttcgtctgtaccttctacaataagcacatcattcatacataagtgtgctggcatactaatgttaatcaaccgaaatgaaaacagtgtgattacttcatttgctagaataagtactctacagaattaaccgaacatttatgattaaagagaaaagggaactgcgttgctcacttattcaatattaaaaacacgaaatatcctacataaatatcaagggagctaacaccgaaaagttgagcatcatcacagacaaagcaaaatgaaaaaccttggtggggaacggctgtagctcctgctacgactgcgactgcgacgcctacttcgacttaaccgatttgtttcagcaagtttttccaacctctgacgctcctgctctcgttttttagccatttcagcagctgtatctttcttaactgtaaatggaagaagtaacacaatcataccaattagtgaaacccactttaacagtcacaacacaccacaaaaaattgtgaacaaggtagcatgacatgagaagggtacaaaacaaaagatacactttgctcaaaacaaaagcaatcacaatatttaatatactgctgctacgcaaaagttgcattaagctataagacatactttgtttattaagctgcctgctcataattcttttcagccgttcttgaggagtttctttcttttccccctcctgttttaacggacccccggaagtacttccctttgtcaactttgctattgcggaagatgcgctgtaaaatgatagaaatgaaatcaatatagactccatctgtgcaaaaatatagcctcattccagtcaagattgaaacagcaaaaaaagaaaaataaatagactacatcaaaaaatatatatatggcatacctcacgggtggtactttcaccattttagtccctttgtccctatttacagatacaccagatgcagggtcaacatgcagtgcctcaagtataggaccagatgatggcctgcatgaaagagaagcattagagactcccttcaatggttcaagttaatcgaattctttctacaaagtccatttcatggaaaaacaaaatcagctttagggaggaagcctcctccctcttcctcttggaattatgatgataacctagacctgatctattctaaaccacaaagttttcctcggctaacaaaatgtgttaaagctgcagcagagtaaacattgtccaatctatctttgcaagaattaaaggtcgagtgctccgaccggtttaacacatcagtatgagatggaggagaagatggtggagaaaatccttcatgctttgactcactcccatcgccagagccaccaaattcagtaatatattcgattttgggagccacttgtttgctgcggtgagcatcatcagaatgtcgtccacgaggatgtcttctagaatgtgagggtgagtacgatcgtgatcttgatctgtacacacaataagcaagttaaaaacttctacaatttgtctaagttcctttggaaaaaatataaataagatatgcaacaatgatgtataaaaagttcaccttcttgaacgagaatacgcttcataagttggacttcgccttgtttcactataaaaacaaagagggaagcaaattataataaacataagtaacatgttcagtactaactattaacagggaagtaaatcattgattaacaaattataaaattttataccgatagggatcatgatggagaacacgggttcctgtaatccgtgcagcttccctttctctctccctttctacctgagaaacctttcttctctccttacgagtaagcttcctctacaaaaaatatataaatatatccatgttacaaatttaacactgaccaacatttacttaagacagataatatttaaaaacctgaacttatgaaaacatactattgcagggtcgcctttgatcacttctttttgcctcttctcttcctccttagctttcttgtccatgtaaacaagccaaccaaaccttttaacaccaaaatcctttgctattttatccattccttcatcattgctatcatcactattaaaatcatcataatcatcgtcttcatcattgtcatcatcatcttcctcgtcatcatcatctgagaattgagcttcctcttttccatcaccttcataagagaatccaacctgtgaataagaacccttagttgcagaaggctgtgccacctgagatctgccagatgcgaggaaaataattgttaagaaaaacttgatcctggagaactcaactatacacatatgaaaaatcttgtccaaatttgtattcttgaatgcagagaaagagatatagacactattaaactcaacagacctttgaggagcaaatgaagcagtaatcttagcttccatctcttgttccacatgttgtagaccatcctcatcagtaactgttgacatgaaacttagcttgtaaaccataatacaaataaatagacaactaacaaaaaaaactatgaaatgataaactaaatataatttttaaaccatgaatattgcataactattttttctttcttttttttcttaataagaacaatcatatttgaaatttttaacaatataatgtatgtaacatcaaaaaaaaattaaaaaaaaagtaccgacatcctctacgtcgatgcttaattaaatcccggtaacgctcaaaattaacaaactcttctaattcttcctcttcttcagacttttcttgagcccggaaatgtctagaccccggttcgcgaataaaatcaagaagggcacgcccatcaaatctgcttacacaaaagaaaatttccccttcaacttaaacaacatgtcaaaaaattatgatcaacaccataatacatcacccttgataaaaaaaaccatacctgtcaattaaaacatcttgtttcccattccaaggtatcctgcaatggaagtttaaacaacactaagtccaagaaatacacatgaatggtgatatattgtgctgaaactaaaatataattcgaccagtctacagactctaaacagatagaatttgttcaaattacagtgttcataaacaataaaacactaaaaagtgttaaatgcaaaaccccaatgaacaaagcagagtactaaaatcaattatttactcaaaaaaaatccagggttcagtggcaatatcatcaaagttaccaattgaaataaagagtaatagaaagctatgatcaacttgaagaagataataagataactaataggtataagagggaacacatacaggccttgctgatcctgagtggcctggtagagaccgtcatcgcggtacatacggcaacgagttccgacgacttgaatcgattgctgtggatcgccacggcgtttggccaagaacacggctcgtctctgggctcgcttccgagccgcgtccatcatatcatggaccttcttctcggacctcctagcctcgtgccacatcttctttaccaatcacaacaaccgattggtctggtaggatcagaatccagaattctgcggattgaaaagggaagacagaagggaaccctaaaaaaaatcctatccttttcagctacagcgatggcgaaagtgaatgaaaatggattcgacactgtattgagattcgagatccacgggtcttagcccaaacccagaaatccgggtatggaccccgagaatcgtgtttattcttgtcgtttgtgaaaatccagagtcgtttttctaaaaggctattgcaattggtattgggcactagtggtacagtaccttttagagatgtctccatctgattggttaacgatatttcctaaaagttattatatttaaattatatgggatctgatacttaaatgttggaatagtgctatgacaacgaggagcgtgctaaacaccattagtgggttttagcatttctcttataaataatacaagctgtttctacaatgcactttattaaaatagatgcacctcctatcagtcccaacatccaaaaaattgtttgtttaatttttcatattcatatacgttatagttatttaagacaatctataaaattttgagaaatttaaaataatttataatataaaaaatagtggttaaacagtctatttcacacgcatataaaatataatagttacgtgtgtcacagactgtttgaactaggggtgttcattaaaatacatctaatattgtctatcaaatccgatccaattatatattagatgttaaattttaccatccgatctgatccaattaatttcaatcatctaatcaattcaacaactattaggtgttggatttgatcgattctatccattatatgtattttatgtatatctattgatttaattcgggtctatccaatattttagtcttagtattttttgaatcgaaacggatccatctaatattttaaatccagtatttattagatttgattggcatccaatctaaaaaaaggtaaaattttaatgttaatttttatatatacatatattttattacctataacaacataaatttaattacttatccaaattaaatgaaaacattaatatttttgattggatgttggatgtattagatttttggacaactcatctaatccaattgaatattcaaaaataacatacaatctaatatgatacaattggatatgtaatgtttaacggtaagttatcattggatttgatggatttatacgcacccctagtttgaaccctatttttggtatattaaatttttctaattttttccaaaatttgtaaaatgtcttaaataactataacgtacacgaacatgagaaaaaattaaactaaaaatattttttcgaatatcaaaatagatagttgtgtatcactacactccttttagagagtgcattatgaaattttacaattatatatacataaatgtccaaaatatattatcattaactgtaatttttttaagtttcataatctatggctttatatataattaggatcactttattgaaataaattactttatcattctcattttttcttttattttgttctctaaattatattattttatagcaatattcttttcttagagtgaattgttcactagtgacgacacgttcgagagcactctttattttttaattaaattttagctaaaatagttaaaataaaaagtttatattttaatctcattccaatcatactttctactttagaaaaccctaacaccaccctaaagagcaaccactctaaaaaagttggagaggagaatatcatttattgatcaaaggtctcaactataacaaagttccaaatacaatatgaatagcacaatcaccaaatctcactagtagcaacaaataaagcaaacttaacaaaggtgtgggcaataaagtttataaatttaggacaatacaaaggacttacactattaaatagagtaaaattacaaccaacatcttcaagaattaagcctaaagaaaagtccaaaaaaaacattcttattaatcttattcactacattaagatagtcagcctcacactgaatattattcaatctaaataaacgacattgaattcctacattatacaagacaagcacttcaggttaaaaacggccgaccatgtgctacacgattgtcgtggatcaccatactcatactacaaaagccatcaacattgacgttgacaaaatccacatggagcaacacccaacatagggcaaccgcagaagcaaactgagacaaagatagccccattattaattatttttaaacttaaaaaattattattttaatatattcttataatttaaatttaataaatatattaatctaataaaataatgaaaatattatttaaaaaacaaaaaatatgtaaaaagctctttacatttaaagaactccatatctattttctattaaagagaattactttttgtgtgcaataagatttactacttattttagctaaaaaatgtatttaaacactatagttgaaatggaaaattaattttatttaaccatcaacttctgtaatcaaatattgtaacaactgaattagaacaaactccaaataaacatacaatcactatataatatagcacctttaataaagttataagccactatatatgacatttaaaaattatcgttacactataaaaaaaaaaaaagtgttcataaaataataataatgaaatggaccaaaatggataattaataaaatttgaaggtttcactccctaaataaaaagttattgattatttaatatttgtttgatttcagtcaagtcctcctatcgtcacttgttcagc

SEQ ID NO: 14625 - DNA, 4728 bp, Cannabis sativa
tacatgtcaaaatttagaggacaaaaatcttatttagcctttttttttaatatttggagaggaaccttcttatcaattgtaattgttaaacatgaaaaaaaaatggcgacaataatataaaaattttacagtttggtcacacatcaagcaggcaaatgccgatgttattatttaatatcacactcaattattttccctttcttttctacacttcttcttctttttatttttattttcatattcagctttaattttgaattaaatcaccatgatcaaaatcaattcactctcctaaaaacttctgccacgatctccaactgcaattcaagctccattatttgacgatttcttctccatcatctcaactccacaatttcttttcatatttttttcccttcaataaatttctacataatggctatcacgtgttattcatcttctccttctcctactgtgaaaaaactcactcttaagaaaactattgttaaaagttctaaacctctagtaatgggtgtggagttgttggtgaaaagaggcaaagggaaatggcctatggtggacaatgatgattgtgatgaaaattttgttgaacaagtaacaaaacacgaaaggcgtcctatgaaaaagtgtttaatgagattttcgaaaactgattaaaataagagttgagagactaaataaatttataaagagatggggatttttccgtggtttgggtattaatgaatcctagtccacgagtcaatcgtatttggcttaatatccttgatgtattacgatggggttattacaagctcaaaaaccctagcttcttgctatagtgtttatgtaatgtttttcttaatatttggatgagggtataaggtgatatttatagggtaggaaccgggtttgggtacattcgtgactcgctagggttggcccattaatggggtaaatacatgaaatatgtgactatggacccactggttgaagctcaaatcatgagccagaagcgatccgtacgtctagggacgacaagatccttgacaaatgccttgcggccactggctatatgtattgtgtcagagggctgccacattatcccagaccaggtctctgaggtgcctcttggagtgccccctttggatgtatcccaaatgctcatttggagggcttcgatcacttcttctcaagaaggaaggaggccattctggatccggataagtcctgtctcgaaggtgtgtcctctgggccttgaatgggcttgcacctatccttctgtatcggttgggactggctttttggtagtgcttttgaccagaccctagcaaattaatcttaagttgagaacaccacatgtcatccttctagaatgcggataacatttacccccaagctttcaagacttgagagtggcagaggcttgtagttttctctccgaattgtcatggacacgtggacaattcaaaaaatgagtgaccttttcgacttctgtattccttgcttgtggatgactagggaccattggattagtgtagtacatgtggcactagcttcttagtccatgaacttcatgcacgttggaaaagcacgcggggcttggggtagtgtgatgagggctaattcatgtcaacactggtaccaaggtgaacattgtgattaaaaatgcctcagtttcgataataggcattaaatgctgactcttctactccctaactgttagatcactttttcgttttttgagacgccatatgagtcgtagattgtagaagtacgtgaattgacatccttcacttataaatagggtgaagaaacgaaattcgccaccttagcttatttcacattttgagtttaaattcttcaagagagaaaaacccaaactttgcccctggtgaatgtctaatcttttttacgactgccttagtcttcttttttaaatttgagcaagagaaaattcaggagcattaccaccgaacttgacgacgaaccatccagattcattgaggtcgctgaagattcaagtagagatcgacaaactacttgtttgggtgtacaaatttcaagccagacttcatcgccgtgtcgaagatcctgctaaggtcgcgccgccgcaaatcttgccacccccacgacctccttcttcctcgagtaagtactctttcccccttggaactgttgatttctttttgtgataaaatgcgtgcttatattctgggcaggataggtttcttctctattgagagttttggtgattacttgcatgtgggttataagacatagtgtgcaccatttagatgtctcaagggtcattctggagctatgggtttatcttggtatgaatgttgcctatagtcaagattagtatttatgaattttgctcgtaattcatcttctgtgctgattgatttcaaggcacttgttgactcaaaaatctggattagacttctaagccacatccgcttgctagattagcgagaatgaaaaagtagttaaataattataagagagacacaacaaatttatagtagttcactttctgtatcgcgacagtaatggagctacatctactttgagtttttatttctcatgagatggtaattacaggaaaaatactaagtgtcagaagctctaatttctaaagaatgaaattagagagagaagctctgaccttgtgggtagttttctgaatgtgtcaaatgagcttatggagctctccttttataggtgaagaaggcccaaaacatagggaaaaataaaaataagatatttttttactgttgatgatgatctaatggtgaaaattagctcttggtggtgatggccatttttcagagcccggcaggtcccgttgtaggtagcctagagcttatttttgtaactcccttgagggtgaattttaacaatgatagcttgagtgtgagacatgacttgatagagcattaaattagcttcgaaatgcaagttgaatcacatcaataaaatcaatattgagtgagttatggctattttactgaacgcagtacatgacccagtgcccaagttaacatccagcgcccaggttgacatcccagcgcctaggttgacatatgacgtcaacatggatgctacataagtgtaaaaacgtccaaggaatgtactttaagatgcctaagtgatattttgacatcacttaacctgtttatatgttctggcaaagctggtcaccagttcttagagatgttgttctacggaaatgagagactcaaaactcttaatttccaagtgagccgaaaatgagaaatgcaaagttatgaatttaacttctttgactcatagatctttgttattgtgaaaatctagatggactgtcgaaacgacatcataattggataagcagaacccagctcaccaggccatttgtcaacctgggtgttgggtacttactcctgagctcttgaggatctcatttttgatacttccaaggcttttaaacttgaggaagaggttccgcaccccatttttgaccattttggattcaatggtcgcattagatttggcatttgagacattgaaggtagggtcacaggttgattgtcaacctaggcgttgggcccaacactaggtcaatctgggcgctgggcctcgtttctaggggctcaggtttgtggttttctcactgagtttacttgaatcttcattatttcttacgataaaaaaaatgcctagaacacctttttttaacttgatcggaaacagcccaggttgacatgcgctgggccttgccccaagtgtcaacctgggcgctgggtctcagttttgcccctttaaaattttcatttggtccccataaatatttgaatctcatattttctaaaaatgaagaagatgcttgaatgtgttcttgaaaaactccatttaaaatggcccaggttgacatgcagggtcagcccatatgttaacctgtgcgatgggccttgctcttggcacctaggaagtgttgtttcttccacaaaaggacctatttacccattttttatgtagacaaagaatatgtaaaattcaaatatttgatctgatacttggaaggcacccagattgatagattgtcaagctaggtgctgggtgctcggggccctgcggccccgggtactcaaaaataaacttgctttgattttgattctaatgcctcaaatatttttgtggtatgtctagttgatattataatgcaagttttgacccattttcactaagacagtctcaaaaaccgaaatcctagttgaggaggccaacttgggcgccaggtgaaaccctaagtacccaagttggcttccgagttgcaagtttgtgtaatgttagctcccagggcttggattaggtttctccatgtcttcatgatacagaatactgaaagatagtgagttgaattcaagctattgaagtccaaacattcatctcagagatcccaaattcaacatgggcacaaggctaaggtcccttcccaggttgactgctatgactcgcgtctactcaactctgtgatgtcatccttcatgccacgtgtcaaatattaatgtccacatcactagggaaagcttttgggttaacatttccccctaagtcaactttacatttgtgtggagttgacttgatgacatgaatcgagtccgtttcgcttgaaactactagatgggcatcaattttgacattcttaggcacttgtatatgttcttaaagcatgcccaattgaattaggactttgaactcttt

SEQ ID NO: 14626 - DNA, 5458 bp, Cannabis sativa
tttttttatatgatattatacattttagttatttaaaacatcctaccaaattttgtaaaattcataataatttacaataccatacaatagtctgtttgaactatactttttgtaacgttaaatatttgtaaatttttcaaaaatttataaaatatttatataactatgttgtatattgtcatataaaagattaagattaaaactatttaaatctcgtcaaaaacacaaatgagatgtatcgatgcacctaaacgagtataaatatttatatatatagatacaaatatatacagtacaaattgagggtaataatttagtacatgttagtatatggcatgcttattagtacaccagatacccaacaaatggcattaacatatgacctacattgggtgtaaagaacaaagtttggtttaggacaatttgtcatttcaaagatttcacatatctatatatatgtgattaatatgattgaagacattgatgtatatataaaaatctacaacttaaacatcagtaaaagctaaatgagatattttattttactccccagaaattacaattacaaatctccatcatataatatatgctttttctatctatttattaaaaaaaaaaacaaaaaaccataagaagtggttgatgttagactaaacctataactgagtagatacatatgttaggcaataatgatctaaaggtaaaagagcaaaggtcagccatggatgaatatatgcagcagtagcagttaattgctctgaaaactagaagttttctcagtgaaaaatggccaaatgagtttttaaagaagccatgagagagagtgagagagggatggatatgacatccttacatagcttcagagccaaaacttgatgttgtgtagctcaggtcccaccatgaagagtggtcagaaatggcagacaaacatattaatcattcagaccagccaacattaggtaatggccaaagttccccaccatttcttctcaaagaaactcctaccaccagcttggattccatctcatctttaagagaacaaaagaaagagttttctacaaggccctactgctgccctgcatcaatactactgcccaagcaaaacactttaagtctaattctttgtgggctccgagcgcggtgataatcgaaatgaaaatccatcattcattcattcaactggcaaataaaaagttttcatcataaagttggttgattatccagaagaactaacctcagccacttgctgatacagagatggattaacaaaccatgccatttttgacacttgccatgacttaatttgacctttggcaatagagaaatctgagaagggaccccattggagaaggaaaaaaaagacataacccgaaattctcaagatttttctacacactgcacatgcctgctgcctactataatggggtactaaagaaatctttctttggctattgatgttgcccaaaaatcaattttcaatcctttgtacatgatgtttgaagcactagctagcgaaagaaagccaccgaccgatggtgatgtacccgatgaagagtaaagcaatgtcttaaaaccatgccaaacccgaaaaaatgtcaatgatgaattggtaaaccataattgtgaaatgccttgatacgaccatcccaacttgcagtaacaattaccataccccatgcatgagaactaaatctgttcttgcaagaagctttcagaaacttcagttgagacttgtgcattgcagattctatggcctggtttgacatcggaagcttttcctcgggccaagttgcagatgccttgggaaaagactccaagaagaattcttggcttaacgaaaaactttctagtgaagaaatcaatggagtttcgtaaacacacttatccacaatgtgaaatggacttcctctgtctgagtttccacctttaaaaccagaccatggtattgcaacagatgcattggaaaaaaaccgctcacaagacctaacttttttcgtttgagagagaacagtttcttcctgtttaacgcagttccatacatatacattggagtcttcacacgacgagactatacgctttccatctgatgtgaaacatgcagatatttggtttcccgaattgcgtggccctgcagaaatatggagagatgccatttagcaagcggatgaaaaaacgaaacctctcaacttaattcgacagaatattatttgttccaaggacaagagttaacataccacgatactttccgaccacattgactccccgaagaactctgacttgtgaatcagcactagtgaccatgactaatctagaatcttgcggagaaaactggatgaatgaacaaaaagttacaatacatcctttaagggaaaaaccattcctataaatttaagagaaaacaaaaattgattacaaaagctgcatatgaaaccacaagagagtaagaaggaactacctgaaagcctgttatctttctggaggctgatttttttttgctgctcaagcatatttgagattccaaatgtaattgattatctgattttaagcaatcaagaaagaaaatcaataaaaagaatatgtaaaatccttcaatattaactttaagcaaaagttgtgctaaccacaattaaactttcgaaacaaatgcgagagttcagcagaaaacaaacctgagatgttgtaaaagcgacaaatcccagcaattgagccaacaattccaccctgcaggacaaataaagcttgtaaatacgagccatttcaaagatcagagtctgcattgacattttaaggtcagaaaaagagattaaagaaaacaaaaaaataccaaccttcccatcaggttggtaacacactgcagtgactatttcccttatgtcagtccaatcaacaacttgacattgagaaattccccagatacgaactttcccgtctattgaaccactgatgaagtaatcatcatccacaggattaaattggacacaggtcactgcatgacagcataacaaagatttgtgagaaaataaattttgaaatgttataatacatgaactggggatcttgccatgaatgaaatcagctagagtaatatattaaaccaaaatgtccataattgaataaaagaacataaatgacagaagcttaccataattactatgagaaaaaactttgaggcatgaatgacagcccacttgccataatcggacggttttgtcaacagacgatgacaagagatacttcattaaaacaaaacaaataattaagtttaatatctaattcatagaactaaagacatttctgcttgaattcaatgtatcttaaccataaattatataatcacttacattattctttgaccaggaaaggtccaagatctcccccatgtgaccctcaaacttgtgcaatggctgttccaatattcgaaaaactttaggcggaaaaataacacaagctgagtctgatgtcttcctcaagcttgctgatctgcccattttatctttatccactttaagtggtttcacttctgacatatggttcattgtgaagtacaagcaggaggggtccaattctggaatgtcaatctcattggatctttcaccttctactacttgccatacttttacaaccccgtcttcaccagcactagcaaggtactttccatcaggactaaatttcatagtcaaaatagaaccttcatgggcttgaatatcttgccccaaataaagagccgaaagttcctttgattgcttgctgcattggcgaaccttgactctttgagcccttgatggtagatatgcatcaatatcatttggtctcaatttatcagcatctccttgtctgtcaacaatgcaagtcatggatcttaatttattcaaccacatacttttaaccctcttcgctgttccctcgaaaatgcttaaatccctcatcttttgtgacaaattaggagatgagccagagcagctccaagattcagcagttgaaaccaaccgcccgaattcaacttccccacattcactcctcttctcatactcacccacttcctccacattacactccattgcaccaccaaaacttccatttctgcaaacaaactcatcctttgaaccagacctatccaaaaaattatagctagtacaagatccacacgacatcatagatcgactcgaatagaactcattctcaatacctgaacatctcaacacagcctcactctcctcacacactctgtcaatctctgtttctgaaagttgaagcatcccaacttggttggaatcaagccccatccacttgaaaaaactattcctacgctccctaacacttccagggctcctgttccaaatatcatagagtgaattatccaaagcccagtttttggaatgtgaactagaatcaaagctgtcagaatttgcatcagaaatagaagcaatctcttcttgggcatcaaaatatctattttcatcatcttcactgaagctatccattatactattaagttcaacccatgaaaacccaactcagaagaccaacattttaaaacatatgaaaatgtgggaaagtcttatcccctcttggcaagcaaccccaagacaacacaaaaaaatctaaagaaaaaaaaacacaaaattcgagatcagtttagcagaaacaataataaaaaagagaaaccaaacaacaatgttaataaacaacaataaaacaaaaaccaagagatccaacatggatcccaatccaaacccaatgaacctggtctcttccccagaataaaaattcaagatttattaagtaaacaaaacaaaacaaaaaaaaatggcaatattaattagaaggaaaaaaaaacccaaaattctgcagcaaaataagggttaaaaaccacttcatagtacacagaaatgaaaacccattaagagaatttagagatcacatgattacacttgaagaaacgaatccaacaaagattaaaaaaacaaatagtggagcaaatatttctcatttgttaaaaacaaaagaaacccaaaacttggttttagttcttacgtgcttgtttgaggttctctaatggcgaattgtttgagactgaggaagaagaagaagaagaagaagatgaggccacagatcgaagaagcaaactatcaaaatttgtagctttttgttttttggactcgctcgctcgatgaagcaaggcaaatcagtaaggaggaaaaataattatattaataataagaatcagaaaataaataaataaataaataataagacaactttttattttttattttttattttttgtgtaagggtaaaacagtaaataatgtaataatttccttgatattcgtgaaaatatggcccaagaaacgagatttgggaagtagagtgtgtttataaacacattttatatttttctttttcaatattatgagaaaccatatttttgttctaattttaatttaatttctacaaa

SEQ ID NO: 14627 - DNA, 16163 bp, Cannabis sativa
  modified_base (33)..(35): a, c, t, g, unknown or other
cactctttccctacacgacgctcttccgatctnnnaaatagtatttaccctatatatatatatgttttttttgataactaaaagatatatatatcttaatttaataagatataatatattttttatttgatttttttaatcaaaatatttaaatgtattgtaatttatatatttactttttttttagtgtaatacgaaaagaaaataagagaaagataattttatttttttatataaaataaagtgtatatatatatattttttagtacaaataaaatttcctaaattaaaatttagagaaaggagtaaagagtacgaaaagaccaaaaagtcaaagaagaaaataaaagaaaacatgaatatctctttacacttgtttggttagtgggaagaaggtgtgttcctcccctacccactaaagaacaaacccattaatattttgaaaatcaaaacaataacattcaacaccaccatcaagtactaacaaataaacataaattaaaacaatatcccaccccaaatatatacatatataatcttatgtaattaaaaaaaaaaattacagttgactattctaatataatcattaattgttatattgttcaaaaaataaaaaaaaaactttatataatcaaaaataaagaaaacaattgttacaagcattagtaatgtctaatgttttttataaatatttcatgattaattagggatatttgttatgattttagacactaataacaattttaacaatcctcaatattatttctaaccattagttataaataaaaacaactttttttattggtcaaaaaataaataaattgttcaaaagaaaaacaaaaaagagagtgaagaagaatcaaaaaacttataaagagaaattgagtttaaaaagccatgttttactcttctgatattcccaaagccgattctttcctttattattttttctcctatctctctcatcttgaccctttgactctctcttcctcttattattatttcattcattttcttcttcactcaccaaattcacattttctcttcaccaaatttcctctctttttctcgctagacaaacaagttttaacaatcgaagcttaagctagtagagcagcttaaccctaaatctctctggtgttttggggaaggattcgtcggtggtcaacaatggcggcggcggctcctaggattacttcctgggtgtttacgctctgtgtttgtctaaccctagctccattcgtttgtggaaacaccgaaggagatgcactttacacgctgcggaaaagcctctccgatccagataacgtccttcagagctgggatccgactctcgtaaacccttgcacttggtttcacgtcacttgcaatcaggataatcgcgttactcgagtgtatttttctctctcttatctatatgtttttaatttatatctatatatggtgtttttttttattagtttattcatgtataatttgttaaagccatattgtttagaatatgaacatctttcactttgagagtttggttgatccaactgaatcccgtatttgagcttttgtcttttagttcggaaaatgaacgtggaaattcgtggaccgtagcactgtgaaactttatatgtgatttcactgttttgaactattggaattttatcttaaagtgaaactgaattttgagggtaatgaatctttggctgcaattatcacgtttggtgctacagagatatataagccataatggaactgtatatgggttgcttctgtcacaaaattgctaaacagtatggagtgttttttcgtacaaaaatactggggattttgttttcgttagagctgtagctttgttagttcagtcatcaatgtggtagggtggggacttttgaattcgatggttctaattttttttcttcttaaaggtttgacaattagatcgatgtgtcaccatggtttgcattaatatcattatcactattaatatccttttcatgtttctagtcttgtttgaattttgagatgttgcacaaggtatatatatacctttctatttaatcaaactcaatgtactattgaagaaaatgttttccgcatcctgctaggccattgtaaaagttggttacatcttattactttaataatgtgtatttatttaatttggttttttgctcttataattgctgttccaatcaaatggctttataacccgtaaataacatccacttataaaaatgtctttgtacgatcttggattgtatagtttgtgggcaattaaaatttgttactttaactcattgctaggaaaaaaaattcttactttaataacatataattggatgataaacgatcttcttactattgatgtcatgaaatggatttaccacctctctgtgtaccttatgttttttattttgacgttttgttttatcatttcatcctcttcagccttataatggacttctctgttttctgttttattttctcgtaaacatcagcgcaatattttttcttctttcctaataaatttgaaccttaattcattttttaattttttaattgcagttttgtaacacacatatgtatatttatatgttaattatttaattcaattaattaaataataaaactacaaatttttctgcttatttggtgagcaattatgtatttcctgttgtatctattcattcaatccagattaaagttagtagttttgtttgttgattctaatgcttttaatttgttgctgtctacggcattgaaatataattatttattcactgtttgtggtttctgaatattgttttaatttatttggttcatatagttaattgttttctgtgtattaatccaatctggagttagttttattttgatctgctaagcatattgggctcctgaatcttgatgtatatgccctgtatttatagtaaataggaattttgattgattgtattgtggttcctgtataatgtatatgttttggagggagggtaaaatgaatttggatggtcaaaatctgtaatgtagttcttttagttttacattttgtttgagcattcataattcgttgctgacattgttcagtttattttcttatatttggcagggatttaggaaattcaaatttgtcagggcatttggttcctgaacttgggaagcttgagcatctgcagtatctgtatgttcttattattctcttttcttgttaactaagcagttaaattagtgaggctttctaatattctttgtatctgatttctcgtatagggaactctacaaaaacaacattcaaggtaccattccatctgagctcggtaacctaaagagcctcattagcctggacttgtacaacaacaacatctctgggaccattccatcctcattgggaaaactgaaatcacttgtgtttttgtgagtttagttaatttagtattgtttcccatcatacacggatagtaggattcctaagttgttctttcttatagtgtatcatttgtatgaaattgatattatgcttaatctttttctatattgactggaaagtgggtcttgcttgatctaagctaggagtataatttaaatttttgagtatcatgtttggttttttctgagttcgttttgcaaatctcgtaagggttgcttctgttcgcatcaacatgtaactggtatggtgtagcaacattatatgtcctccttgtgctgcttacggtggattcttgttgtagtctgtccttgaagtgttatatgctgaaatgcttgtctatgtctcatttaggctgtatagcattgcactgcttgctttcatcttattttaatttttgtttgacatgtagacgtctcaatgacaaccgtttaactggaccagttcccagagatctcattggcatttcaagcctcaaagtagtgtaagtgctgttatcaagtttccctgcacctcccagttgtgatattgcttttaacatcaattcatgctgttcaatgtcttgttttcagagatgtctcaaacaatgatttatgtggaacaatccctaccagtggaccatttgagcacattcctttaaacaagtatgttatttatctcattataattgtgttctctgtttcttgtttgttttcactctttctattgggctctcttttgtagatgtcttagttaattcagttatatgccttttcgtgtcaataagtaactgttacatgttctgtttcctctacttacaaggaaaaatcacacacatacatgcgaatacatacactctacacaatctttgttggaccaattagagtagtaactcatttgttaaactcattcagtatatatatctcagggaaatttcattgaactgcatctttaatgattatacggtattgtttacttttattgtttgaatttttatagcttcaaccattttattgtattttcttattttgtttcttttgaaaatgagatcctgtacactattgagtgagtgtatagctgagaagttggcaacataaattctgattcctatgcagacacatacatgcacaatggcataaataaaaatttacaaaggatgattcctttttaggacatttgacaaaataatttatcaacggggcttgggttatagagtgtggctaagggtgctcaaatatatatttttccctttttatgtgataatattaagtgtgatgtaaacagaagtatacttgtgttgtgggtcttgttaagctaatcttttaaaccgaaataatagttgaaagtgattgaaaagttttagctctacattgcttttacactcttcacagaaaagaactattctttcttaatttagagctgtatgattgttttgcctttgccctttaagactcttataataacttttttgttctgttggtgtgtatgtactatctagctttgagaacaaccctcgactcgaaggtccagagttattggggcttgccacttacgacacaaactgttcatgaagaaatattcattaagctgactctggtatggtttaggtgttttactctttaaagctgaaaatgtttgtttacttcacaatgtaatgggataggatataaatttcattccctcaatataagaatatgtaaatttaaatctgatgatactactacaatatcaatgtatttgtaacttgttctattgtcttcctaagccaagacattgaatttgtactttgcaatactagtgaaaagtatttgtcatggatctctctatttttattaattatacttttatatattaaacttgtgttttctttttctgtcaattttaacaaaatcttataattattaacataatatttttttttgtaattaattcggcatatgtctccgtatcttagatataacttttgatttataagtgtaattgtaattaattatttaccgttaaatatgtaatttgaattttataattttgtaccatattaatggcatgtttacttaggaaaatgttaattaattgtatgatatgattcggatacaattgtttttaaaattttagaaatggagaaattagttgtccacacaaatcacaagaaaataaataaaaagttggaaaatctttttcttttttagtttagtttatttaattttaagttttattaattaaaaataaaaaaataaatataataaaaatacttatacgttaccatggtaatttagccaaattaaaacatccttattactttttaagtttttttgttacttttttttacttataaacaaaataaaataattttgatttttttttggataaataaaatattgtttttgattattttaaattttaaatcgatttatttttttattaattattttgattacagtttagtaaacgtgtcatataggaaatgaatgaagtaattctcattgatttaacaaatgaattgcataacagagtttatatataatctgttacagttacaagtaactaaattcctattactagttgtaattagataactaacaataagactatttcaatagttgtactagttttgtgtatatttttgactaatttgatatagaatctactatttttagtgcaacaattctagggttgaacatttgtactaggtttggtttagacttagtcaactccctcgtacccgactggttgaaactgatcattggagagaacttgaggaagttcagccacttctcttgtctcatgagagtcgccttgaacatcatgacactgttacagacctcaacatgaagcttcaagccaatgtggcattctcaatatcaagaaccaattcctacagaccatcccaaggctccaagattggaagtcgaggtggattttgtggggtcaatcagaacaataggcctcagttgcaattgtgccttcaatttggtcacactgcccctgtgtgccattatcgatttgataagaattaggttcctcccaaaccaggcataaacagtcaaccatctaatacctcgaacccctcccctcatgccttcatcaccgaacacgaatttgactatgatccacaggtgtatgccacttcattcatccttgactttggtgatgactctggatggttcgtggacattggttccacaaatcatattacctctgacactgaaaaattggaaacaacagttgcatactctggctcagaaggtcttgcaataggagacggtaagaaattactcatttctcatattggttcaagcacattaccttctatcaactcattaactcttaaattgaattcagtgcttgatgtaccttcaattactaaaaacttagttagtgtatctcaactaactcgtgataatcatgtgtttcttgaatttcataaaacatgttgctttgtcaaggacactgctcaagggaatatttaaagaagggctttatgtgcttgaagacagcgtcaaagatctagtggtaaacaattcaagacaacaaatggcctatgtttgtaaccccatggctatggtttgtactagtcattttgatagtagctatgtaacaaatgacaatgcttgtaatcaaactcaaatgaataaagctacaacttctgatatttccaatatctgtctagttgtttaccaatctagcaaagctactaatgtaaatatcaagcaccaaaagcttggacacccatccaaaccagtcctaagcaaggtgttacaacatgttcatcaaattggttctttagaccagttagacttttgcaaggcctgccaaatgggcgaaagccataaattaccatttcccatttccacctcaagagcttctcaaccattagaactaatacacacaaatttatggggtccatcacacattaaatccaaagatggatacatttactatgttcactttgtagatgatcatagtagattcacttggatctatccattagtgctcaaatcttaagcttttgacatgttcatcaagtttgaaagcatggtagaaaagcaatttaatcttcccataaagagagtataggcagattgaggagggaaatatcgaccttttgccgaatttgtagttgatcaagggattgtcttcacacatccctgtcccaaaaccaatgaacaagctgggagggtagaacgcaaacacaaacacataactgaaatgggacctactattctagcacaatttggtttggacttcacatattggtggcatgcctttcacacagctgccttattgatcaataggctaccaactcatgtgttaaatctacaatctccctcagagtgtttacttggacaaataccagactacaacattctaaagctatttgggtgtgcatgctaccctcatttaaggccctacaacaagcacaaattggagttcaggtcacaaaaatgcatcttcttaggatactcatcaatgcacaagggctatttgtgtgaaaatctataagggagactggtcattgcacgaaatgtgatctttgatgaaaatacatttcctgcaacctcaccatcaaaaacacatcaggtacaatctgatcctgtctctaatctacctactgctgtgtttcaaacttctcagtttcctaatgctattcctaacacatatgttcctcatgtggacaacactggttcatttgtcactgagaaaactatacacacaaccaaaaataaaactcttgtcactgccactattcatgctccatccacttctgcaacaagccaaccatctccacccatcgcaaatcagaaccccacaccagaacccactccgtctcccataacccaaaccagcaatcctattactacacttgcaacacagttcccttcaattactaatgactaacaaacaaacataactatacttactatcttacccaccaatgctccaacagctacatctaaaccacactcttctacaccttctacaaataaaccacacgtggctgttacaggaacaaggacacatagcattcgcacaaggtcacaacatggtatttccaagccaaaatcttacatggcaactaagcatcccgtaccagaaactatgcggccatctgaaccaaagaatcttaaggatgctttaaataatccacattgaaacaatacaatgaacacagaaatgggagctcttcacaaagaaaagacatggacattagttcctcatgatccatccatgaatgtcatatgatgcaagtagattcatcgtgtcaaaatgaacaaagatggttccataaacatatacaaattgaggatggtagcaaatggatatctccaagaagcatgaattgattttgagggaacatttaggcctatagttaagcttacaacaatgagaactattgtctttagcagtttcaaacaattggatgtctctcaacttgatgtcacaaatgccttcttcaatgaaccctcaactaaaactgtttacatgagacaaccacctggtttagaaaacaaggattgcccaacacatgtttgtaaattgcatgaatcaatctatggtctcaaacaagcaccacgtgcttggaatgacaagctgagacaaatcttagtctcatggggatttcaaggatcaagatcagacagttcattattcattcatggctcaggacacaacttggtcatcttccttatgcatgtagatgacattcttgtaactcgaccaaatgccaaactgataactaggctaatttttaatctaaacaaatgcttcactcaaacacttaggtcaagttcactattttcttggggtggaaatatacagagacaacacagggatgtacttgtctcaaaccaagtacatcactgactgattgttgaaagttcacatggagggtgctaagtcttgttctaatccatctattgcaaacactaaactgtctctaaaagatggtgaactatttcacgatgtcactctgtacagaagcaccataggggaagtgcaacacctatctctcacacgtccagatgtggcattcgtagtcaataaactaagtcaattcttacaggcccccacgacagtgaactgggaagcatgtaagagattacttagatatctaaaaggcaccatcaaagaaggcatttgtctcaaaccagctgctgaaacaactcttcatgcatactctgatgcagattgggcgagctgtgtggatgatagacgctccacaggaggatacttggtgtttctaggaggaaatttgataagttggttagttaaatagcagcaggtagttgctcgctcaagcacagaaagtgagtttcgtgcattagaaaatgctgcatctaaacttaagtgggttcgatctctgctagctgaacttcaagttcctttagttcaatgccatttgggttgacaaccaaagtgcaactgcacttacaacaaatcctgtgttccatgccaggtccaaacacatagagattgatttgcacttcatccaacatcaaatcatggaaaaaaagtctaagtttgttatgttcttgctataaataaagtttttgatatcctaactaagtccttaaccactaattgatttatttatctaaaatcaaactacaaatggtatctacaccccatatttagtttgaggggggatgtaaaagatgatgttagttagttcttcaagtggttaagctagttgacattgaaaccgtcaactaacagtttgttacttagttttttctattttagcttgttattgctctatactcgattctatttctccaattctggttttcttcttctttttctctctactttgtgttctattacattaactctttaaaataggaccactaattacccaacatgtaaacatgcaccacatcccactatctcataaagaataggaagtaaccaaaccattactcacatagttatctaaattacacctattaaccataagaaaacataataaaatattgttttccaacattccctctcttaaacagatgtgtttataaacattcaatttactctttcttaacttgatcttctaaaacacatactccaagcatgttctttagtttctgaaatatatgcagtttgagaggctttgtgaatatatcaacaacttgctctttacttatgcaataaataagatcaataacaccttccacagtgcgctcccttaaataatggtacttcacatcaatgtgtttgcttctaccatgaagaataagatttttataaagtttaattgttgaggtattgtcacaataaattatggtggcctcctcttctttgaagtgtaactcttcaagaatcttcctccgccaaacaacttgacaggaactagttgttgctgttactactctgcttcagttgttgataaagtgacaattgattgcttctttgaagaccatgaagctgctcttgaacccatcataaaagatagccaaatctgcttttctatcatccaaatctcctgcataatcactgtcagtaaaaccaactaaatctacctttttcccttatggtagaagaccccaaaatcagttgtaccgcacaagtatcgaaaaattctctttgtagcaagaagatgtatctcccttggacattctatatacctactaataagactcacaccgtgcattatatttggccttgttgttgtcaactaaatcagacttccaaatatttgcttatatagagtgttgtcaaccttcttttcttttggatctttgataggcttccaaccaacctcagttggagtactcataggattgcaattcttcatttggaacctgtctaaaatttcttggacatatttattttgagaaataaaaatactatcattagtttgcaccacttctatgccaagaaaaatagtgctttagtgcaagatcagtcatttcaaattcaagcatcatggagtgcttaaattttttaatcatgacactatcatttccaatataaattaaatcatccacatataagcaaataatgagcattttacctctatctccaaatttaattaaaagtgtgtgctcatatggacatttatgaaaaccttcctttaaaaaataagcttcaatacgactataccaagcccgtagagcttgttttagtccataaagagtggtttttaatttatacactttatgctcacttccaatcttaacatagctaggggttgatcaataaatacctgttcctctaggtctccatgtaaaatgctacttttacatccaactagaagataggccatgagttttgagcaaccaatgcaaacggccaatctaattgtatcatgtctcgccactggatcaaaaatttctttgtactccataccaagctcttgcttacagcctttagccaccagtcacgctttgtgcttatcaatttcaccattttccttcaactttgtcttgtacacccacttaacaccaatagtcttttgcccttttggaagctccatcaactcccaagtattgtttctttctattgctacaatttcggcatccatcgcctttctccactttgattctttagcagctacttcataagcaacaagactgcaatctgaaaataaacaaaaatgcgtgagtggatcctctctagaatcatcacaatcagatacctcataatccattatccatgccggccttttcctctctcgttgaggcctttgttcaatgggtgcttcattagctggtggactttgagtgattgttattgttggttgttggattgtctcttcaggctactgttgctgtcttttctcttcattagcatcaaaatttgttggaatttgttgctgaacaatattcttgttccatgcccaagttctttcttcatcaaagattacattgcggctaataatgattctcttggtgttaggattgtataacttgtaggcttttgattgatcactaacgccgagaaaatgcatttttatcctttgtcatcaagcttccttctctttccgtctagaatgtgggcataagcaatacacccaaaaattctcaaacgatctaccactggtcttcgtccactctaggcttctttgaatgtcatattttgaacaacaaatgtgggaattctgttcaaaatatgaatactccaattgactgcttctagccaaaaaaattttggaagtccactcctcaacaaaaggcttcgcaccatattgataatagttcaatttttctttctcgcatactccattttgttagggtgtgtatgctgctgtgagctgcctcttgattccatgagtctcacaaaaatttgaaaattcatgtgagttgtattctccaccacggtcagtgcaaagaactttgatggggctaccaacttccttctcaacgagcactttaaaacttttaaaggccccaaaagctttagtttttttctgcaaaaaataagcccaagtcatctagctaaaatcatcgatgaaggtaattatatatcctttacctccattataagatgaatttattggcccactcaagtttgaatgaatcaactccactggtctgtttgctctccatgattgtccttatggaaatggattacgatgttgtttgctaacaatacattcttcacacactttggcaggagcttaattaaaggaagactagtcaccatattcttttgttgcaaggtcttcaatccactgaaattcaggtgaccatagagaaaatgccatagccacgatgcatctttcaattttgctgataggcacgaatgagtggtactgtggagataaagtgagaacattcgattcgccgtcatgttaacttaagcaatcaagcccaaatttgcatttttaattcgacatactctatctttgatagaaattccgtaccccttttcttgtagttgacccacactaagtagattggttttcaaattctgaacataaataacattagaaatagtgtaggtagaattttctttagtttggatagttacctgtccttttctcatgataaaaattgtggagttgtcaccaaacttgacggtggtgcaaaatgatttgtccatctcagaaaatactttcttatatcgagatatgtggttgctgcaagtatccaaataccacatattttttttgagtttcttgtttgacatgacacaccatgaagagtgatatttcttcttcttttttttttttacaaagttagttctttctccactttgtctattcaaattagtacaacattcatatttataatgtccgtacctatgacatatgtagcattccacattagactttggtgactttggtctatttgattggtgatctcctcgtcctcttccatgagagtcatgtgaataactatcttggttttggtattgctgctgggttccacgatcatttccacctctgtctcaacctcagcctttgcttccacctcgtcctctatctcctcttggctttgaattattatctactgatgattttaaggcttgctcctccttctccttctcctgctggttgagtttgtgctcatgaactaataaagaaccttgcaattcgtcagctgaaagttcattaatattatgagcttcttcttccaaacaaacaacataattaaattttggcgtcatggtttgtagtattttttcaacgacggtcatgtcctctatcttgtcactgtggatccgcatcttgttcacgatcaccattgtccgagtgagatactctgacaccgattctcccgtcttcatttgaagtgtttcgaactttgtatgaagtgattgaagttgctgcctctttacctttgtaaagtcttaatattttctcttcatagaatcccaaatatgcttggaagtgtctttataaataatggtctccgagattgtgcgattaatagcttggaaaagataattctttgccttgagatctttcaaccgttgtgcttctagctctgctctttgtctatctgtcactattgtgacgactgctggtttagcaactccttcgaagacaacttgccaatacttcttggatctcagaaaattctccatcaacatgctccaatgatcatatagtggccatcaatacacaaaattgttgattgaataaaattgtcagccgcattgctgctacaaaacaaaactggaagtgaaatagaaaatatagcttttactatatatgtatatacatgtaatctcacaatctcactctttttttttttaaacctcactcgttttttttaaactcaccaagctctaataccactattactattttatatatatgcttatatatagaacaaagtaaattagaaaactttttattgcttttatgcacacaccaattcatacaacccaagctttttatgtagagcttttaactcttcacttatactaaaaaataggagcactaattattcaatatgtaaacatgcaccacatcccactatcttctaatgaataggaattaaccaaaccactactcacatagttatctaaattacacctattaattataagaaaatataataaaatatatttttttcaacaataatgttaatagttgttgtgatataatttttatattcattttgtgtaaatgacgagttaaaaatgtatgtgaagagtttggagagtttttacaatcaaacacacaaaagcttaaaagaagcaccaaggtatacttggtcatatattacttactttagctatcacgaaaccgttagacttaaaaaatttcttgattagttccaactgcttagttcaatttttttttatttaatctatttaacaacaaattaaggctctatcaattcaaaattatgagatatatgtaatttgatttgtaaaatattatacctaaacactttacatgtcgagtaatgctatatattttgaaaaattatcatgaattagtattttgagtgatgtgacaatatatttattaaaaaaataaaataaaaattaaaaaaataaaaatttatggcatgtgaggtcattgataataattttcatattcatgattgtaaagttatttttttggcaatttatgtgtcaaaatattttttatttattgtgtagtttttttctacaattaaatcgatttgttctctttgattttgtgtctttattgctcttttcttttaaaggaaagaattctttttcagttgtaaattttcttattttgaaaactttttgtaagagaagaaactctcttacgaaaagttagttttatttagaaactttgactattgctctttttctttaatgtgttcaattgtgtcttgataagatcagatcaagcacagtgtttttgacaggtatgaagtccatgttcatgatcaggtacctatttagcaagtttcctttttggtctgatttactactgcaaaaacccgattctgatgttgcaaatcaagatttttttaggattgtacagttgtggaatcgattttatggctgtctttaggattgttatgttctatcaatagaacctaaagagcagccaatcagttcaactcttttagctttcatttttgcataattttcttttatgaggagagagttctttttgtgagaacctagtggttcagctaggttttagtgcttatgtatttgttcttatagtggtcttagggttggtttgaacaacttggttgaataagagaaatgtcttcaggaggagacttgtacaagccttatttcgggaggaagtaagcactcccacttcaaagacgaagggagttcgctgtttgatggtggttcagaaattagattcgtgaagtgaatt

SEQ ID NO: 14628 - DNA, 4796 bp, Cannabis sativa
tttttttttttttttaaatatgatagtgtatattatggttataattttgttagtttttgaataatttgaaattttaaaaaaattggtagtatatatcctataattataatattaatatgaataatttatagtgtacatactcaagtttaatttttgttaccgtgtttaattttaactgtaataatacttaggttatatttttagaatcatggaagtatttaagtgtcaagtcattatttttatttctatgttatttttttattggtatatttatatttattaataaatagaaaatacaaatttaatgatctagactaatcaagtcttgccatatgatcattcacttgacacttctcactcagtacttttgaaattctaaaaatataacttaaatatttaaatcataaattactttattaataactataataactacactacatacattccttgtctatataaatttataagtagttattttgtatattaatcttcttttgacaagtctaattcaacatttgttttcccatttgagaaaaataaccttaatgaaattccattcttatccttatcttaattaatatatagttctcctaagggaattttcatatatatgagtgatgactttttccacaacatttttataaaaataatatcaaaacaccataaagtaatttcatttatttatttattttgaaatattattttattttaacctaacaaaaagtatatggttgtacatgaaatgttaaagaaaaagtgaaaagaaaatgatgagtgtggtgtgggtgctgagtagattatctaaaactccatatcagattttcactacattagggatctgaccccaaataggaatccaaagaactctaattttctttttctccatttttatttttgtttaattttcttttttctatttttacacgaattttatcaaattttttacaaataggttgaaaatattttgtttagattttttaatcataatgagttgagtattgctaatgatgctagtgttattcaacactactataaaaaacactttataaatagttacaatattttataataattattaattttttatttttgtaaaaaaaaaaaaaagagagaaaaacatcatcccatgttttttgttttgttttgacagagctttttcttgtttgtgggtgttttgttttgtttgccacttagaaaattctgtcttacaaaaaaaaaaagaatctttttattctttttttttacttacctaatgataattttattattattattcttattattattatgaaaaataggaccacttgtatttttcatcttatattcctttttctaattattatcattatttaggatgccaacaaattataaatgaaagttcctcttcatgcctctatttatacatataataatataggaaatttatagaatacctcctaaagggtcattttgttatggtaccttcatttgttttgacatttagaaaattttagtataattttttttttttttcataatagtgtacgttgtagttatttaaatttatttcttttcacaaaattccaaacaatttaccatgccaaaaattaggttagacataacttactacacgtacaatagaaaaataattgtgcatgtaacaaaatatgaaaatcatatttttaacattataacctactcgaaatattctaaaaatttacaggtgatcttaaataactataatgtacgtaatcataatcatgaaaataaataagaatttatcgaaacaccattttaaaaaaatgtatgatagacttagccaataatatatatttatatagaagtgagaaggtgtgggaggaataaaataatttgtccacttattatgtcccttctttatattattatatatatcatcttttatataataatctcatgtatcaacttgtcatcatatcaaggtgacatatcaaggtgacatatacatatattatatacatatattttatatatatatatatacatagaaagaaagaaagaaagagaaccttataacgcgtcttttgagcgtgttcttgaatagttctatgtaccttcttcttcttctctttcttcttctttcatttatatgatatatatatatatgtaatgatgatgatatataatcttgttcacactttctattgagaaaaaaaggtaagaagaagaagaaacaaacaaaagaagtcacatttcattatttattgtcaatctccattaatgagacctttctttctcgatctttgagctttaaagattgttgctttttcacttttctttttcttttttcaataaagattgaatttttattcaactttgaatcttcaacggctctttttcacttcttattaagagtgtttttttttttttttttgtgttggttttatagataaaaatggattcaatgaagccttcaaagaacaaattagctcgaactttagctaaagttcttcactttagaactgggattgctcctgtggattcggggatcgaaaaagttgggatcgaaatcaagaaaaaaggcgataaggatgatcgaaatgatgaagaagaagagtgtgaagagagtttggcaatggaagcttttttagctaagttatttgctagcatttcttgtgtgaaatgttgttatgctcagttacaattttgtcaatctccttatgatgttgatgggattcaaatggctgatcgaatggttgtttcggaattgaagaatttgtctgagttgaaaagatgttacttgaagaaacagtttgaggatgatccttctcctcgtactagtttggtattggctgagattcaagaacagaaaagtttgttgaaaacttatgagattaccgcgaaaaagctcgagaatcaagctaggttaaaggattcagaggccatttttcttcgggagaagttggatgaagtgaataaacaaaacaaagagtttgagaagaagttgaatcaaagtggacaagttttatctgttcttgacaatcttcacttttcggggttaaaccctagccatttcatcgcggttttgcgccactcagttaggtcaattcgaagctttgttagggttatgatcgaggagatgaaaaccgcgaattgggattttaatgctgcagcctatgcaatccaacccgaaattgtgtattggagagaagaacataaagttttcgcctttgaatctttcgtttcgagggaaatgtttgatggtttttgttaccctaatttcgttttgtcaaaggaacaatgtttaacttcaacaacaaggcaaaaggagagatttttttcgaggtttacggaggttaaatcttcgaaaacaaaggaatttctttgtaagaagccaaaatcaagttttgcgaatttttgtcgtttaaagtacttgaaactcattcatccaaagatggaagtttcattctttggtgatcaaagttttagaaatctcattcaaaacagcaatggcgagtttccaatgttcgattcgtcgacatttttagcctcctttttcgaaatggcgaaaagggtatggctactacattgtctagcattctcatttgagcctcaagcttcaatctttcaagtcaaaaaaggttgtcgtttttcagaagtttacatggaaagcatagctgaagaagtgttccctttatcacaaaacgacatgtcgttttgttcttcacaggaatcagattccaatgttgcttttactgtcattcctgggtttaaaattggtaagactcttattcagagcaaagtttacttgtctcaaatcctacattaaccgttggatgatgatgagtcttttgatccaacggtggagaatgaatgaggggccattttgggaaaaggcaaaggtcggaggactgttttttaaatatatatttttttggggggagagaataaaaaaaggtattattatttaataataatatttttttattattattatttctcccaaaagacaaaaattatggtccttcaattttgttaatattaggtttttagaatggatgggatcttagctgttttgcatatttttttagctgtaatttactagacaatgagtaagtttatatatattaaaaaaaacttttttaattatgtaaataataatagtattattattttatttcatattttatataaggttgagatttctatgaccccattcatcatttcttatgttgtctcaaattttgtattttgtatttttttttaatttgatttatttttttgttcttgtgtatttgatgcctttgtaagtattcttcaaatggcatcatttataataataataaaaataatttaggtaggtggctttatatatatagtagtctatatagtcatgaatctacttttaaataaaaaaaaattaaaataattgagtagttttaattatatttttatttattttggtggtttctactatatttaaaattttaagagatctttaggatctcattaaatttagtgttacactattattaaatttaatatcaaaaaatattttcattccaactacaatattagaaattatacaaaaaaatatttcttattattatattaaatttttaataaataaaaaaattaacattatactaattaataaaaattactacaattattatatttaactaataatttaaataaacttactaataaaaaataataatactataagatcgataaaattcattaaattaaaatattatattgcaataacataaatattacattactagagaacaaacattacattcatgacgaaagaaattacattaaattaa

SEQ ID NO: 14629 - DNA, 3842 bp, Cannabis sativa
cattttgagactagaattatggaagaggaaggcatttttttttcttataaattagttgactctttttaattaaaaaataaaaattgagagagaaagaactaaagagtggaagttaaaattggagtgtgtgaagcactgagaagtagaagatataagggggtttatatagaaaatggatgagaggtttgattcatgcacttagcaaatttagcaaatttggctggtaacattatattatataataggagcttgttttgcctttacctcactaggtgaccaaactcaattatatatatatacgcaaattataaataatttatactattaattatttgtagacaaaattgaagcaataatgttgtgatgaattagctatagctagctagggaccataaaacttgaaaagtttaaatttgttaatgtcacatgtcgaattatactagtcgtatctgtgtagctaaaaattaaaacaaagatccgacaagaagagtcacacacaacaacttatttatttatagaaaattaaagaaataaaaacataaatatatgtacattatataatttacatgtatatcaagatatataatgacgtgggatatttctcattttagacatgcatgctattgctatataacacatataaattattatttattatatatatatatatccaactacaaaataatccggttcttgagataagattcaatggctcgaaagtgtatgtgtgtattaaatggcgaaaacaacacacatatattgttgttggtgaagctgacaagttgatatacacaacaaagcttttccaacagcttaggtagctgacaagctggcctagctgctatcatcttcttcttaattttcttttatttatttttataattatttaaaatacatatatgtttttcttttgtttgtgcgtgaattaatccctatagttggagatattcaaattcaatgacttgggtttgaacgaaggcaacaaaagggtggtcagatcaggtcaggtcaggtcacccctctctcaaacaaagccagtttttttggtttaaattttgccacgtctttaaatatatgtaacaacagttgttacttagaaaaaaaaaaaaaaaaaaagaagccatgctgttattactgttatgtttcaaacctatcatcaatcaattatacacatggattttctttcataaaaggttttgctccacgtgtatgcatgtgatttattggttcactctaccccttcttagttgtcaaaaccgttagtggtatatattatttgtttatgaaattgggatattaatattgtgtgctgatgatcggtggtcactttccaaatatatcaattactttgatgtgctggactctcttcttctctttattccttcactttcttccatttggattggtgggagcgcgggaggttttcctgcaaaaacttcttcgattgatgcttaagttagaaagaattgtagtgaaagaagaaaaaacaagagagatttgaattagagagggaatttgcactgcctataaaatttgtttttagagacgattatttcagctgataataaaaaaaaatggtaacttaagcgttttttattagttttgggtttccgctcgttgaaaattggtatttatttgcagttattttataaaaaccgtaattataaaatactttaatatctatgccatcgatttttatttttaggtgtggatttaagtggaatgcgctagttgagggcctatgtcgttggctatttggtaataggtgaacgtgatggcagacgtatgtcacttatggagtcggttattaccaaataaccaacaacataactgacgacatggggattttataactttcttcgccttcatcttccccttttcgcataacagccaaccaagggaaaccagagcaaacccacgatgagtttgtaaagaagtatgataaatgtgagaaattttcaaatatttcttgagtgcatagagttaaaatgatgactttcccttacccatttgctaaatggggaattgacctcattggctcgctgcccgttggacgaggaggagtcaagtatgatgtcgtagctgtcgatttctttacaaagcggacaaaatctgaatccctcgcttaaatcaccctaagaaggttttggtctttatgataaagaacataattttctggtttaaaactccattaaaaatagtattagataacagaattcagtttaatagtgatataattattgaattttgcgagagaaataaaattataaaaagtttctcgtaagtggctcatccacgggtcaatggacaaagaagtagtaaataaaactctcaaatatgatatcaagaagagactcaatgcaactaaaggaagatgtgtagatgaattactacaggctttgtgggcccatcgaacaactaaaagaacacgacagtacatacactattttcactagcatttggcttagaggccatgttgccagtcggggttaatattgcgatccataaacatgaattatatgatcaaaataaaagccaagaattgatacaagaatccttggattttctcgaagaaaaacacaatgagtcataaattcacactgcagcataccaataaagaataattagatatttaaacaaaagagttcgagaaaggttattcaaagttggtgatttatttttgtgaagagtttttctcaatacttgagattcaacagcaggtatattcaatcctaattaggaaggtctttatgtgattaagacagtgatagggtcaggtgtttacaaattggcttggcaaaatgggtcattagtaaaagacacttggaatagtgaatacttatggtcgtattatcaataactatattaaaaataaattgtaatatcaagcaattatattatgtaattgaattattaatgaaatacatatttcttcaagtaacataaaatgtattttacattaaattattttagggatactattaactaaacaaacattaataacaatatttgatgtggatgaaaggttaaatattaatatacaaattctaacgaaatttttttgcaataaaattaggcaaaatacctaggtaaaattggtcaagaacagtataaaatcgatagatatatattctattttcgaagcaaaatataatagtaagtgctacaatgagatttctaagattaatctgaaaagtagtgataagctaaatgcgaatagaggaactaactacttgcttttaattttaaaaataacataagaaattaatgactaagtattttttttattgtcatatacgatgtacaaatttaaccacttgaggctagctcaagtggccataggagggtacgtgtgtgttggtggtcctggattcgagtcccaggttatgcttaaaaaatatatatatatatacacgatatacgatgtacaaattttccttattacttgacggaaaagggtaataagattgagatgttctatggaaagtgataagacttgaaatcattttttaacaaagtctataaagtgaaaagtcatgaattattttaaacaaataaagtactttataaaattataagtcatgaatcatttttgagtagacaaactcattaattttttcataagaaaactgagaaatatgtttgaacaacatatgtaaagataaatatatgcaaataaaattaaacattagaagataacagcttaattggtcgtccaactaaacaaaagttgacaaagttcaaaaactactaaaataaaacttgatcaacaaatatgatcatgaagattgtctcagatttaaagccattcaattaatataataataacaaaaaaaaaaaaa

SEQ ID NO: 14630 - DNA, 15987 bp, Cannabis sativa
  modified_base (2813)..(2814): a, c, t, g, unknown or other
  modified_base (13526)..(13532): a, c, t, g, unknown or other
taggaatatcatgaaaatttgtgttattcaagtctttaagcatcaacttaacttgctttaatttatggatcaactgaaacatagcagtcccatgtacacccctactccaagcattagccaatttttgattaatatttgaagcctgactccacattctaaagtacttaaataattttttctcataatttctttcctggtaaactaaatgtaaggcaggagagtgatcaaaaagttcttcattcaagaaaaatactccaacttcagtataggaataaagccaagattgattagctagaaccctatctattttggaataaatgcgatcatcaccttgctacttcttactccaaatgtaaaagttacccatgtatacatcttctaactaagagtgccctatgcaatccttgaactcaatagacttcttatacttcactctaacaccaattctctcctcatggttcaaaatctcattgaaatcacccagtactaaccaagcctccttagtactaattgatttaagctcagaccataaatccttacgctctttctctacactgaagccacaaacaaaggttaccaaaaaaccacagccattcttaggtttaactagtaaatgaaccatctaacttaagcaaaatattatattcacatcaaacatcttaggattccagcttataataattcttcctccactatgccacgcattattagtagtaaaataccacccggcaaacattcgaaggtacaaggcccctaaattcctagccttgatccttgtctcaaggagaccaaccaacccctactctttttgtagagattaacttcttaaccttgttttatttattaggattgttgatcaccctgacgttccagcaaaagatcctatccattgggaggcagaggctccccctccccctgtgatatccattgccttacctacttttgagcattctccacaatcagtactttttacttcaaaactattagcaattatcagtacttatcccagaaagtgatgtttaccttgggtcctgggagctctctcggttgtcgcttgccaaataatgtgaggcttgtcttattctcatggaaggtcatgctttcgggaccttctctcgagaagtggtatgtggtgcgtggtgcacaccacgtcaccactttgatccttcatctgatggtaacacctgtctagctaaaaatcaggacaacaggcatcaatccaacataatcaattcttacaatttgtttgttattaaataaaaaaaaaattgattacaattagataaataaacatgtatatatatagatgattattaaaagtttctaaaagttgtaaaaataaataataattatttaaatattacttattgacggtaagaactcgtcaacgatgttaatggccagaaattctatatcatgtgaatatcaaaaaataagaagatagatgaactttttgaaacttaaagaaaacttgcagaataacaacagtgaaaagtaagtgtattgtattatcaacttgttagctagggtttcacaaagttttcaacccctttgagtgagggtgagaatcaatttataggggagctcttatgcctcaggctacatgtcgtccccatggggataacttagtacatggtacactagtcagatggaaaaggtcagagtaggggttgcaaggtcgtgcctacaatgtactattggtcgaatgtactaggtgtcccaagtgagtggatccactactcgctcaggccttgcccctacttatttgcaaggcgtcgtggctgagcatgcgcgatggtccccacatagtgaccaagttttcgtggggccaatgtgggtcccggtatttcccctccaaggtaagtctctagtcattcatatggtcttactaaggatcacgcattcgaatctaatctttcaaaagagagtggtcttcgtctcttgtggtttacaactcatggatcgaaataaccctaggtgcatggtttggtctccggggaccctaagcgcaggggttggactccgagaccctaaacacaagggttggacataggcgcaagagttggtctccaaggaccctaggcacagggcttcctgctgtaagggtccttctcgtcattccttttcttgctcgtccttccccaaatctcgacaagtggcggaggaatcatcatatgcgtattctcacattaacattacttatttcttctctcgtggtttacaactcatggaccgaaacaaccctaggtgcaagggttggtctctggggctaggcgcaggttcttgtcacatgggtcatccttcttgtcatgccttttctcttgctcgtccttccccgattcccaacaagtggtgaaggatttgtcatatgcaaattctcgtgttaacattacttattatcatatttttaaaattaataaataaataaattaaaaaaaaagtaattaagatattttaagcaaaataggtaataagtttattaaaaagaaattaatcaaatgacataacggatttaattttaattattaattttaacgagaaaataacaaaaacacaataatttatgctaaatacctacactttagatataaaaactttgcatatgtatacgttattaataatgaaaataaaaaatctcaacaatctataaaataaactaattgattaattagtatataagtgcatgtataataaaatcttactttgtagtcccaataaaatttataattaaagataaaaaagttgtgactaattataaattattattgtgttatgactaaaaaatttatggctaaaatattagtcacaaaaannacaatttgttgtgactaaatatgtttttagttacaatatttattgtaactaaaactaaattagtgacagcctgtaattaaatactatgttttagttacaagtatttttttgaagtcacatttagtcataaaaaatttaaatttatattgtgactaaaaaattctcacttaaaaataacatttttttgtagtgggtgttatttgactctctacatactatttgaaaaagaattatgaaaaatagtattacatgacgatgtacatcttactagttttctaaaaaaaaaataatgatttatctaccatttgtcaaacattaaaaaaattatctaccaaaaaaaaaaaaaggtatgcagtgtattgcgagtatacaaaaaagatcaaattaacatttaaaaaaaaaaattaagcatgcaaaaaatttaaactctatttttcagccatgtaaatttttcataattaaaagatgaatagattatctgttatagtatacaacttttttgataatgcttaccaagatttatataattcggattcactttgtaaattgaagaaacaaaaatatatccatttttgtttatttactttgggaaaactgaccagtttataagaaatcatactcatcaatatttatttcaattgatatattctattctatacatgaactcatcaaatatatatatgtggtatatataaaacaaacaaaaaaggaaaaataatataaaaaaaaacatcaaattttgtcttgatcatgacctgagaaattatcttcatttggcaaatcaaatgggctccaattattaccagttaagatggctacatcttgatgagcttctgatccgagaaccggtagctgtgttgcttgaatggcttgactaaccatcatctgatgatgttgaagatgatgatgatgatgatgatgagaactacttgaccataaaacctcctgttctggcaatggtggcagcccaaaatgatcacttacacaatgctctgttcggtcaggattattatattgcttgtgatgatcaaacgactccaaaccacagaagttgtaaatctgctcatttccagtgctcaattcttgtgccatttgaatgttaacattagtagtatttgaaatgaactccaaattagattgatcaattaaatgatcatcacaacccaattccgggatttctaatccattaatgttgttattactcttggaattatctggcttttgattcaagaagttggcataaacaagagcaagatcaatatgggaaccatcaggctgcagcattgaattagatgacctattggaatattcatctaagaaactcccattattattattgacaccaccatatgaattatgtccaaccacaccagtactggacacattattagtagttccataattcaaattcttagacaaaagggttcggccgtccgtggctgtcgaaagcctcagagactttcctcttctgttcttcctgcagccacctccaacaggcacattcctgagtgaccctcctttagtccagtatcttctgcagcctttacaaaagtatcgaggttgagttaagctataattgttgtagtaacaaaacttggtgttggaacagccacaccttggacaattgggagatatctcagcattaggcttccatatacctctctccatcatcagtaccattaatgtaagtagttttcttcttcattcagacctttcatcaaacacttaaagatcaaactccctctctctctgtaaacgtttagagagaaaatgaagcagttgggcaaccatgaaatgacctcaaaagggttatatggggtaacagaattgccttctccccatgcacgtgtggagcttctctcctaagccgcacatgacatgatgacactgtgttattattatgatggttaaggtgggtgggggtgggggtggtggtgcatgatcagtctctgccccggcggctgatacaaggtgtcggtgtttgtgacacgtgtcgaaaatgtataggtagggatgatagagttgtaggaagcaaaaccctcgagactctaattttaggtggctttgaggagcagacaaccctctaaatctatttactattaaactatacatattttgggaaccccaaagtgcttccctttccactcactcacactctccgatccctaagatgttatgtccttaaaaccctccttcttacctgggattatatatttgatattataataataataatcaaccattcactttcattttctgcccaaaagtaatatagctagctacctagcaagctatgtagctattagtaattaattaaataaatgataatatagtaaaaattgggttgagaatgagaagtagtgtatgaaaagaaagaagaaaatttaataaaaagaagtgggcgtgcgtggaagtagtaatttgttaaaggaggaatgtctcataataagtgggtagtacagtactatcccagctagttaatgtatacgcaacttagaagggatctcttggatcatgggcttctcggatctgtagcctctcaattgaataatatagtcaataaatatatatatttatatattaaataatataatcaaaatcttatttgcagtgcaatattgtgggaatgtcgattcaaaaggaaacaaacgaaacatataccatattatattaagcaccatagcagaatgatgacgcaacaaaatattagcaaaccatttataaatgccatataaacaaacaattagatatccagaatcctatcaccatcagaaagtgggaatttgatatttataatggaatttcatcatggtatttatcatatatacttcaaagttacttgcctataaccaatttttgtattaatgatataagcaaagagttgaattatatataacgagaaatgatccaaattctagaaccttatattggcgagaatattcattgttttttgtcacatacgaatgtattttaagttaattcttacgttttgtattttctttttttaacactagggatggaaactaatatgtagcttcagtttatttattttaatatatatatttatggttgaggaaaagctttgccattttatacatttaaacataaatgtacagtgtactaatgattactaatgaagatttgagatttcaatttccatattagctagctcaaacatgacgagagaaaggcttctaaggtgaaattgcatcacccagatatgtattaaaaaaatctctttttctgcacttacaccaactaaattacacacctaaagccgaaaatttaactgtaaattattattcaaaaaatgcacttattactaggaggggactaaaaatgacagaatataaaggaaacaaagtagagagttcctaaaagactgctgagccacaagaaccaaaataaataaataaacatttagtatcttatgttatgactgtgcaataactctactgcagctgtgactactccctttccctctctggagatgtcaaaccccggttcttcgatcttcctgtttagaagcttgtcaagctccccgcgtaacttctgcaaaacaaaagacaaaactttattagacactgctgcattaattgatgaacaatcaaaacagatggggcatctgtaaatttacagcaagaatttgggagccacatttacccgaattaagtctagaacactctttgatgcagagaaatggagataaccgtcgagcatttcgataccttcacctgttttactaggaattaggttaccgccaaacaggagtaaggcgtaatctgatatatttgttgagtcccggatgaaaatgctggttgttttcactttctcactgtaaaccatgtaagggagagggaagagatgaactgccgcgttgacagatgcagggtggatatcgactttccccacttctttggtgtaaaacgcactccgttttcctcttcttttgcactggacaacatttgggtacatccctgcgcaaagaattgcacaaaccatctccaaatcctgaccatactggttgtatgcctacaagcacgtaaaacatagcatgcgattttcatacagataggcataaaaattcagtcactcgacaggaaaattcagagccaaagtcaggttaaagagactaaatgcttacagcaggacccctggatttgtccacaaagccaatacccgccaacagatctagaaactgcattctcatatcctccatcatctgcaaagttaccggagataaaaagttctcccaacagaatgctctatcatttccgttacgctttgcttctttccatccttcaaaagctttgaggagtgctatgtggtcactgcaacaacagtgtgaagatttaaataactgaaaggttcaaaaactcaagtatgtccatacgtactgtcatttatcagaaaggggagtgtgactcagctgaatgacctaacctgcaagaatcaccggcaaaggacctttttgcagcatcagcttcctctttcctctctatgggcatgacaaacggatcacgatgagcaagagcagcagcaattgttaaggcaggattcaggcattgaaagatagaccccatcaatagcatcttcccaatgtttgggtccaatggcagagtgcaaagatggcgacctgtaagtgaaaatatgttatattgtgatcagcaccctaaagatgaaattagtagaggaagaaaaaggttaaaacttgtggtgtatatataccaagtggagtaagctcctccctatcatctaaagctcctatagttttaagaagttcaattgcattttggacggcaagggaatctggtggctgaagtgcctttgcaagaaatgatccagcagttccaagctgcaagcttttaatctggaggcacaactcttgcagaggtgttcggagaatttcaggtaactgatactgaagcatttcatcgtgtataatttttgggtacaatttataacaaaccccaggttgcacacggccagcacgccctcttctctaaaattatctcaaaagaaaagaaaagtatataaaaatacattattgtgggaaggataaaaaagtgattgccagtctagattcttatctcataaaatacctgatgtgctgaagcttttgaaatccacgagggtaaaagacatgccagtttgttaagagcatcataactagtttcctttgccttgccacagtctatcacatacacaacatcatctatggtgatactgctctcagcaatatttgttgccagcacaatttttctacaagacagatataggcaaatttagaatttgagcacaaataaaaataaatgcagttgcaaaatccatctgatatcaaagtgattgtagcaggatgattaaatcttcagattaagaaagtattttatttccttcatctttcttgcctctagccactcactatttcaactgagtaaagttgaaagaaaaagaataccgtaaggaactttttaacataattaattgctttcatatgcttgccttttgttagggggtggacgatcaaatatttcccgttgattgatagtaggcatagatccatgtaagggaagaaccataaatttgcttggatctccaaggaatctgtttcccttaactttgtcaagtagcttagaaatgtcatcccatcccgtaaggaatacaagaatcgcaccaggaccttcatggagacatatatgttcaatacttgcttctacctacataaaataaactactggtgatttgtttaacctccaaaattaaaacttaaacaaactgatatagctttcaatatttcacacattacaattgctctaccctgttcaaggcttaaaaaaagcctcaaagaaaaggaaactcaaattggaaaacatatatgaaccaaaaatgaagcaaactcgctagactttagaacaacaaaagtaaagttgggttcatagaaagcatgttaccagacccaaatcaagttgtgaaccagaccacgcttcaagagactttcttgtagatgtgctataagttctgtattgagaatcaatattaacttcctgcaatcatagaccaattatttgtaagtttaatattgtttggaaaaaaaaaaaaaaaaactgcctagtatcatcagcttccatacagcaacaaaattattattgtaagaaattaaggaaattccagccatcattaaatttgttaagataaaaatggaacgagagattgcctcaaataattcagttaacgggtccttcttggaatctttttgtcttcttcttcttgaatttccatcgaagttaccagactctgactttatactatagtgagttttctctaaaacgtcttcaagaaataagtcggttacaggaaaagtaaagccctgcaaataataaagaaaatatgcaaaattaacaatcagcctagaagaacatcaatatgtattcttcaagagaaagataatatactggtatatgtatggttggggcatttccaaagtagttagagaacaagtcagcattgatcgttgcactcattagaataagacgtaaatctgggcggcgaggaagaagatcacgcaaaattattagtaaaaagtcctcattcatgcctctttcatggatttcatcaacaagcaagtggctaacaccggttaattgtggatcctggacctgcatgaataacggcagcaattagtgaatataacaaaccagggaagaagcagacacaaaaagattctgtaaattactatgaggctaaactttttataaaaacatgtaaaagacaaacccagaggatggtgcttttggagtattattcctaaattttgttgtgctaactgtaatgtgtttaagggtggtacacccccatcttccccatgtgattagcatatatcagtttccatgtcacataacacaagtatttcattttaagaaatccaaaaaacaattgttattcttaatgttttagaccagatgaaaaaattacgcacataagtaatttgaagttcatgaaacagactcaagcaccaactgtgagaaaaggaaaagagatccaaggaaactgtacagagaaattgacatgagattgaattaccaattggcgaagtaatactccagttgtgcaaaataagagtcgtgtttgggatgaacgcttagattcaagccggatctgatagccaacactttcaccaagactttctcctctttccgaggatatacgagcagaaacagaaatagcagatatacggcgaggttgagtgcaaactatattacaatctgcaccacgcagacatgatatctcctcttctagaatgaattgaggaagttgtgttgttttgccacaacctgtttctcctgaaactaccaatacctgtgtttaaacaagatgagcaaataattaatataaaatatgtaagatatacaattgaaattatttatgttggacaaagaaatgttttttttttcagaatgaagaaagtaataaaaaataatgattataataaattgttaagagtcccacatcaaattaaaaaaaaaaaagaaaaactctgaacatttagaatttgcaaccatcaacttgaaacaccagttttgcatctatatcatggatgaatagcaatttccctactgggagcatggaaacatcgtcatcatacctgattttctgcaacagctttcagaaactgagacttcattttgaatgccggaagtttctcccgaaatgattgcattgtttttaagctgtcacttgtctgcattaaaaatgtatatatctttaaaaatgaaattttgacttggaaatcaaaaaaatgcaaatacatataataacacgagcagagggaatgcagcagccaactctatcccaaccaaaacaccttcgcaaatataattaattgaataataatcaagcggaaggtcactagtattcctacaaactccatcattgaaataagtcattgccctgatccaactggcctctgttttcagggtcttaaaagcagtgtgttttaacatttaatggggttgaggttttactatgaggttgtcaaagtattctcaaaagcactttgaaagaaattgatggggttccttagtaacatggctgggtcaactgcatcaacataaatcctggcttgtaaccaggaaagccgcggaatgagacacaatgctttcacatcacatgtcaaagattcatagagcaatcattcatgcttataattcatgttttcaacatgcttgagtatgtgtcatttattagatggtttgttcagcagcaactggtgattggcagtcttgtttatacaggagaaaattagttgctactctgctactaccaatattgtaacattggcaccaataatctagttatttaattttaggtaaatgtcttaaaaatatcaaatggatacaatgagaaatatttataagataagaactagaataaagagccagtgcatggtaaattaaagaactagagagatcaatatcaggaatttgaagtttgaactgtaacattttttcggtaattctacatgagctttccaaactttcctaaagcttaagcactaggccatgggccaaagctaacttggattttgatgataaactatgttgttaatgtcattttttaatactggtagaagatcaccaaacctctctggataaaattcataccatagcatgtatattcaaatggttctgctatgtagaaaatgaaaattaatatatgcttatgtaatttttatttattctttgctgtgtgctttaactcgaaaagatttctggtataaagggatgtactggagttaatgatctatctatttattggctagcatacgagtttggtagcatcatcagctttggtcaggaggttttttggggggttttgtcaataagcattatagtatggatatgttagttgtattcgcttatgatatgtattctgcattcttgatttcttattgataaaagagaaggcaacacagattatggaatataaaattgacacattgcaatatgtaccttcattttttcctgcttctccttaagctcaaggctaagtttttgcctgatagaatcagtctcaaggggggagacaagttgagtcatatctccatcagcggaagattgtatgcctctttgagctgttgagcctgttgcttctaaagagctatttttaggtactcctacccgcaactgtgagttatccagcagatttccaactcgcctttcaatttctgtagtcattctaatctgtacaataaataacaataattaatagtgcattgaaaacaaaaagccaaaacaatgcaagaaaacattacctctttctgagtagagccatgacggtcatcaagatctgcccggtaatctggcaatggaactttgctaacaacaagagccttgcccttattatatgcatggctttctttgcagaagcacaaaaaattataataaatgtaagattaacaatacattgactgcagttatcacggcaaccaaaacactataatttttcaaagccagattgctaagtccatgccaaagtaaaagctactcaaaaaatgagtacccaaaaaaaagaaaagagaaagaaacaaagacatacatatttttttcaaatgaaaaacacaaaacagtcagaagagagcttacaagtgaaacccaagttgatgagccatgtcagctagagtttgctggtctgctcgactaaagtttcgcttaattatcaactcttgttctcctcctcctttcatttgctctatcttaccccaccattcattttcatcaagagcttccatctgtatatccaaaaaaaaaaaatcacaaaaaataagacctttcactctataaactcaagaaactgagccccataaatttttaatcattccaaacacgaaagttaaaacttttgcattcactgaataccagcaagctcgatcactcatcactttcccaactttcaagccaaaaatcaaagcttttcggtttattgacataccatacagtcaagctcaatgaaaggagagaaaaaacaatcaaactaatccactatcctaaactatttttttgacaatcaaacaaagaaggttttttcacacgaaaacacttacaacacaagttagtagttagttacctccgaagctttttccctcagtttctcagcacgccagacagggtcccaccacctctgttctcctcgtccaccaccacggcctcctcctccgcctccgcggcagccagcacctccgccgcgaccgccaccggagttgcggccgccacgggagttggggccacctcgagagttggggcggtaagacattgagggagtcgagatctggaggtaatggcggcgaatggaagatagtcgcgggggaaggaggtggagttggttgggaatggagagtgaagagaagaaggagcagtagtatgtgatggtccgcgctgtaggggatcttagtgagagatttggaaagatttttaacactcgcccattaataataggttttgacattttcttttctaaattgaaatattggttgtaaattggttgttttaatgggaattgtgttggacaccaatatcttttcataattaccacattcaaataatgttgttccataaaaaaaaaaaagattattttataaatacacaaaaacaacaaaaaaattacaaaaatactatttcacagaattttaaataattttacgatttttttgattttannnnnnnaaaatacaatttttttatgttgtactcttgttaatttgttgttgattttttgttatctgtaagttatttttttttattgttttgatgttattttcatgttatttttatatagttttcttattattttcgtgttgtctctaggaaaactgtaaaaatgtaaaaaaattctgtaaacgtaaaaatataatttttttacaaaaaatagtattatataattatccaaaaaaaaaaagtgtttgtcaattttttcatcttcataagaatataatatcctcaaaactatattccttattccttctaaaatatatttatctttctaataagtcaatttttgcaaaaagatggtttttcttgaaaaaaaaaaatattttatatgaaaaattcaaataatagttaaaaaaaaatatagggagaacaatattagggaactagttacaagtaacttgttaccttaaattgtttttattcatattttttatttttctcgtaaaatattttttttttttgaaaaaaagtcatatttttgtaaactttgccaaaagaacataaaaataaaaagttcccttctgtaatttttaaatttcaattgtatgtgactagtgactaatgactatttatggtccaactccaagtcagcttacttggttcaagttttagatcatgctatttcttatgatgttgctccttggaataaattatggaagaataaggtattggagcaccataagactttttggtggagcattctctccaatactcttctaattcgagctcttctagctaagagactgcagattaaagatttttttctctcatgtctgtaaggcgagtgaaaagacaatagagcacttttttctccattttaactttgcttttcacttgtggggatcttccccctagggtattatgtcggttattgaattaagtgctcgtgtttgggattggatcaaatttttattaggccttaagtcaaaggggatcaatgtagatgaggtattcctctatgcttttgtttacccaaaaagttgggtggatgacgtggatactatttttgacacatggcacgaaggaaacaacacctggggccctgctgccaaggataggacagtgttacatgcacattaagggcacccaattaagcatcaagatccaacaaagtcatttctaggtgttatccttcaataaataggtcataatgaccctaaaatgatgaaccatgaagttgaggatttcacgtggacatcttggggctcaactttcgtctagtacaaatactgagcacccaggctgacatcttgtgcgtcgtctcacatcacttttagttcccaacaacttcctttaggcgatctgcttagccattgccctatgatacatgagagacatgtcccaatcaagtttcagagtttggagactagtctacaagaaacggcactcgggcactatgaagccctaataggcgcccaatttgatatttagttgatctaggcacactgcggctagggtttaggtttttggggatatctttggaccctaattcctcaaatccatcaaggaaacaatgtcaagacatgatatttcatcaatggaatcccgaaagagcccattcccaactatgggtgcctaggttgacatttcaacttgagcaccgatttcgtttcaccagtgacgcccgtgcaaatttgacgaagctgaaattcgttgagtacttttcaccaaaaagaagattgaacataaacgagataaattttagagatgttgccccccacctaggggtctagtgcatgccccccagccaatgagcacctagattgacgtattttaacttgaggcactccagtacacctttctggagaagtctcttgggcatttcccttattttctcccatgataaagataaaaagaaaaagaaaaaataaagaagaagatgaacaggagagaaaatgggaattagaatgaaaaataaagaaaaaaatctaatataagtaaaaatataaaagataaaacatgtaaaagagggttgttcaacttttttatcatgattttttaataaaaaaaattgtcacaaaagtgacatatatacataaaacatattattaaggtaaaatggaacaaattttttttagcaaaaatagttagtacacaatataaaacataagtaacaaaaatataataaatatgcgtgctacactaaaaataaaataaaaatggaaaacactgtacttacttaaatttccctatattattaagttttcaaaaatatatgcaatatgtattagtttggtttaatttctttaaaatatctatacaaatagatcttaatcgtatgaattaaattgaatttacgagtatttatgaacacccttaaatgaactaaattattctcagtatagatgtgtaaactctacttagttatttaaaaatgaaaaaataaaacattatgaagaaaaacaaacaa

SEQ ID NO: 14631 - DNA, 7665 bp, Cannabis sativa
aattgatgcttctctaaaaatagaaacattacaactattcaattcttcaatacaatttttctggcaaaaaaagaataaggatcttcaatacatttcagcccgaaaaaagagaaaatcttaagaaagaactaaaaatgctgctgcatatattatgattcaatttatgaactaaaatgtcaacaaatgacaggaccccaagcattatcttttctctctaatataaaagcacatgataacgagtaagagatcatagttctatcttatacacacataccaaattaccattccaacttttcttttaaaacaaaacactttccaactaaatcttctaatggtttagtaaggtgtgaagttaacccatatatatttgcctattttaatatataaatcaatgaataaccttttaataaaacttaatatcttcaagaaatttcatttcaatactaccaaattctgttctccagtaaaacagtaaacttcactttgagatgtacactacacaatgcataacctacaagcttttctaatgagatagaccagttagtccctgctacggtgactagttacatcaacatgtaaaagcaacagaacagatacgaagacaacttacagaaaaactcatcatctccagttcattttgcacttcaagcccaacaaggaagcggtgtgcctggaccatttatttccatcggcagaattactaatcatgagaaagagcaaggtgcagtaagcaagggatagacgaagaaaataacagcttcagaaacaattggtggcaagtctctaaaatatgcagatacataaatttcactcgatgcacaagctatttccaacctttgaagctttgagttcgaactctggctcatcatttgaacttaataggcaacaaggcagattttactaatcatcccaagcactatcagctgatccctctcttttgatattcgatgaagcaatcatgaacctatacttgtcctcgatgtttaatgaattgggtcccatcattgagagcttagaaagagccatcctagcttctttttgagccactgcagcttctttctctttccttctagcaacctaatagttaacaccaccaagcgttcagtaaaaagaatgtgtgcgtcccgacatgtatgtcatgcaagtactcattaacagtataaatttgtaccttccctgtcgcaaatgtaacaatatttccagattcgacttctgctattgctttctttatttgtgcaacaaggaactaagcataacataaccaaaggacaaatgtatggtcagatgttgaaagatagtaagcataagaataacataacagcataaaagataaagtaccatatcacgatcagtgtaaaatgaagtagcttgacccattgatcctgctctgcctgtccttccaattcggtgtacataatcttccatgctctataattgaggcagccacaactgaagcttcagaatttctattcacattgaaattaatagagactgaaaataccaggctaatgaggtactaaaattttatggccacaaggttaggtttgcaagcaaatttgtgtaattgataatattgatagagtgcactccacaaaatgaggtgagtacccaagttttctagcaaacctttctgattcggtttagtttagtgaattttgagaataactcaacaaagaagctttattagccaaatgtacctttggaagatctagattgataacatgagcaactcctgagacatccaaaccacgagatgcaacatctgtggcaacctgcaagaaggacccaagtacaaaacacgagggtggtaggatggagaaggaaaagaattagaaagaggcatctacaatttatacatttatatatatatatacatttgctgaatagacatctacaatgttaattgattcaaaatgttgcaatggcaaaggttatcataaaatatcatgatctggcatgttaaaacttagcgcatcattcctctgtaaaaggtaacaataccaaaatactagtagtgccattcctaaaattgcgtaaagcagcctctctctcattctgtgagcggcctccatgaagagcaacggcttgtaaaccttgtgctaccaaagcttcagcaacttcatcacatcttgtctatatgaaggaccaaaatcatgtaagactttagaatgcatactgtaaagaacaactactaaagtgaaaattaatttcctaaaagttctatagaactttctcagttagtaattgattcaattatagtctcagattgcagacatctgaacataaagttaaatgcatgcactcaaaatggaaatatttgtggctgaacatgatgcttgcttgcttataaggcaacacaagaatatacacacacgggtcaaaaaaaaattgcattttgttataataacccagaaacccatttaaaagtttgaaatgacggtaggtaataaaataatgatgattgatcagtatagctgtgaagtacaaaataccttcctctccacaaagacaatagttaagggaaaaggatgaccagatctttcagcatgagatgattcctctacaagaagagctagaagccgatcaagctacaacaaattaagcaaaaacaaatttaatgcaacaaccaaaaattagataaaaaatgaattagaaaacatcggatcacattataaattaaacacagaagaataaaggaaacaaagacgctttgctattgtgtagacaactctctacataatatatattcagacaaattctctagtctttgtttttttgctcagcccctgaaaaatccccagacaccaacaatgaaaggaaagaatacttaaatgtgttagtattttgtttcttcaaaggaaaaaaagtgcgtgtgtgaaagcacttaacataatatctaatctttttgctcaacgatccgtaccttctcactgtcaggaaccttcaccagattttgagatacatttgctgttgggctactaacttttcctaccttcacttgcacagggctggataagtattcctgaaataataatattagtgtcaatgagagcaaacagaaagaatatgaaacttgtctccctgaattgtcaaaaaaagtactttcataatagaaacttatcaaaacaaatccatttcagaactggatgaagaaaatagatgatgaattcttctacgaaggggctatgcctcagaattaacatttagatattcacgtcaacttatctataacagaaacaaaatacaatgattaccctgatgaattatgaaatactgcaatcagcatcaaatcaaaggtttgcatgtttaaaccctttgggggaagaaatggaccatatttatccaaataaattaaagtactcacactagaaaactctagaaatgttatatctggacctagcttcaaggtgggacagccagaggaagcttacggaggaattatcctctagaatgaaagagaaatgaaatttacagtacataacgtgtaaaaagaatattacaggcatttattactgttttaaccaaaatttatcaatgcataattatttaagtgccatgttttaaacccccacccccaaaagaaaaaatacagactgaaatattcggtagaagaaaaccacaagacagaagtcctaacctgtgttagtgtttcaatctccacaggcatggtggcactaaacaacaaagtttgatgcttttcaggaagactcctcatcacctgaaatgatatgatgaactctcaatttcttccaagagctaaatgaattcccatacattgttaaatttataaagagattgggggacagggacagagagcatgaatagccaggctttgatggagaaatgtgaaaaatggaacaaaaacagaaactcaaatgaaagaaaggacagaaggttggaaaggagcttacttctcttatctgaggctcaaaccccatgtcaagcattctgtcagcctcatctagaacaacaaatgaaactcttgaaagtgaactatttccttgctgcaaatgatcgataaatcgtccaggagtagcaacaactatgtccactccagctcgtagctcagacctctgtttaggcatccagcagtggaaacagtcaaacacataatgatatgggctttttctcgaggacagaaataatattcccatacacacccaaagaaaggtgtatctcaaacttacgataaaagagaaaatgaaattgaatttaagggttcacatcctaccacaaataaaaagatatcaattaaaaatttaattaataactcattaagcaatagaccagcataatcccccccacaatattctctttgaccacacagggaagaacttaaacaacagttaataaattgaatcaatccaagtcagtcacctggtcagatatatttgtcccaccaacaacaattgcagttttaaatgactcgagagatttgctaaaagccttaacctgtaaagtaaaaacagaaactcattattatttgtgacacatattgaatgcagagtgacatcacaatataccattgccttgaacatatatatcacgaacgataacagtaaaaatccaaatggcgaaagaatgtttacagctgaaacaaatagaatctacaaaaagtaaagtaggcaattctgcttgaaaataggaactaccacaataagacacctgaaacggttctactcacataagctgctataagattagatgaccagtgactctaaacaggttcaattgcaattataagattagaaatttctctcaattatttctatacaattacagtgggcaccagcagttattttaataattattaccacatcttattaatagctcattggtttgctccctctaaacatcaactatcatcagatgactccaaacaaatttaactgcagttataatttttgagccacttatgaccacatattactaatatctcattcatagatatggagtgccaaaaacaattaggaccacacatctagttggtttcctccatctaaaaatcaactagaatacctccttctcaatttgttgagcaagctctctagttggagctaataccagcgctagaggcccatcaccacgacgaacgggagactgagccaagcaatgctgcaaaagaaaagaaaattttaaatataatgtaatggagtatcttcactaaaaccttaacttcgtaagaaacaaatgtaacaaaaggtacaatcatatcgaacattatatttacatacctgtatcattggaatggcaaatgcagctgttttaccactaccagtttcagcacaacccaataaatcccgaccactgagggcaactggcattgcttgagcctgaatagaagttggcctggtatattcatgataagctatatccttcattatactagggtgcagacactgaaagcacaaaatccaaatttcattaaaacccaacaaccttgaccaataaaaagaagcaccaaaaaaaaaaaaacagactaaagacacaaggttcaaccatatcttcaaaagattcaattggtgcaggcgcaggctctgaatcgggggcagaagtaacatcaacgttgagtcgacaacgaacctcttcaacctgcacaaagaacaaaatttacccatgcattcaaacaagataaacaagtgtcaaatctttaattgcttatcaagaaaaccaaaaaatagtaattttaacgcggaggaatactagatgaaacaacattcacaactaaaaccctagagagaccaatgcgaaacagactttaacaagcaataacacctcacaaatgcccaaacaagaaaatatgaagaaaaaaaaaagtagctcaagaaaaaccctagcaaaatgaattcaaacagaaaacatcaaacgcaacattcaatcccgagaacacggagaaaaaacaatttcgctgaaacaaaagcaaagaaaaaaaaaaaaaagaagattgcaatgagaaagtgagaaagcggcgaatgaagaaaataacctggtcggggctcatggtgaggactcgctgggagggattccagagaggaaaaacagggtcaggcaagggagaaagaggggaggaggagcggcggaagccattggagtaggaattggaattggaggtgtaggagagattagtgcaatcagtagcgagggtgagtgttggtgaggtattggatttggaggtggtggttgtggtggtggtggttgagctgatcaagttcctcaagtgtggaggtacgtaagacatggtttttttcttaccagagaagatagagtgagggagctatagagtgagagagaaagaggattatgatgttgtgttttgtgttgaggtttctttggtttaacttgagctagaatagaagaagatgacttgttcttttttgccgactgcctaagcattactttaattttgtcatttctacttacccctatacatattacatacattactaaaagattgaaattgttgtttttcctataataatgaattccatttttattttttagtttttgaagaaaacaatgaaatgtattatgtgaaattgaattctaatcttttttgattggttgtgtctagtgtattattataaagttgagtgaatagttggtgatgtgaaattggaaaaatgtgagtttttctttttattattattccaacttgtagcttcttttttttttttttaaaaaaaatggttttacaatacttcaagagtaaactcagtatatctctaacaatacactttcttgggaaaaatttcaagaggaaaaaaagtggaaggagaatttattaatcaatagtagtatgtctactaaacagcagatatacaatctggatagctaggttaccaaacataatgatcagacatagaaaaagttagctttgccaataagtgtgcaatactcttaataatcctaggacaatacatgaaaaaaaataacataagagtgattacaataagcaaggatacctctaacaatacaccctaaataagaacgatcaactatatggttgagaatagaagtgatagcagtattacaattagattccaaaaccacaaaagaatacctaagacgaattgcaagttgcatactagggaaaatgctcgaagcttcaggaataacaggagcgaaacaatcaggccaagtctaggtttcagtagcaatgactaaacttgaatcatcttgaataacagcaccaaccccagtctttaaagacctaataagcccaacatcacaattgattttgaccataactgtcaacagtttgcaccacttatcatcgtggaaattttgaatgctccttatatcattaaagttcttaagtttgttagcagaaaataactgcttatactccaatcaaataatcagatgtcattcaatttaactttttcattaacctatttatttcttctatactgaattctccaaaggcgaactatgagtttttcaaacatgatagtaagcatacatcttacaagtatggtagtacaattaagtaggagcgctaatcatcgatataaaatctatagcttctataatgatatagaagtgaaatgataattttctttgagtttagcttaacagagataaatgaaaaaactcttattttagtaattatactagtttactgaaatattatttataggaggctaagtgttttaagaataaaat

SEQ ID NO: 14632 - DNA, 7373 bp, Cannabis sativa
cactttttttttaatcttacaggtgaaggtgtggttgggtgataatgcggatcactactacgtgctttccaggtttttgctcagtagaatgctgactgttactaaggttttaaatttcgtacccgccttcttttacaaaatttttaaattcatctacgttttttatgcttgattgaaatttcaaattaatggatcaaagtttgcattaaccgattactttgattgaatcgatgtttagtgcatttgattgcatagaatatatttagacgcaagaattattgttctattgagtttcatcagctttgtagttttgggtattgtatataggtttgtgctgtttcccctctttattagctctctcttcattgtttttgttcacctaatcttagttagaatagattacaacttaatggtatgtgtcgtttgatgggatgacttgtgctgatttcagatcccaaatcatgtagcaataaaaatcgcacttgagctcaagaagctgcttatagacaacagccttctagatgtgtatgtcctacgccacatcttctttttctcatttgtcgaatgatcatttttcattttgtttttgacttaaaaaattctttctgtttctttttcagctctcagtctgatttggaagctaatctgtttaaggtatgtgctgcttaagtataagagtcctgatttcttttgcttttccaatatgttaaatttgacaagagtttaactgggagatatttgcagcttatggagcggaggggttatggagaggagtacattaatcgttacaagatgatgaccaggtcagtgttccattcttatctaggatatcatcaaattctcattggtttccaatgtagatgatgttcatgtgaagtttatatttatggtcattctgaaataatcttacgtgtgtctaaagacaggtaatcccaagattgacatcgttaattttaaattggacattaggggataagggtactaaaagtaaatgaaatggtaatttcttcatgagatgtggtattgctgtattttatgtcacaggtttcatcatcaaagagtgccactagtcattcttgtttgtggaactgcatgtgttgggaagtccactattgctacccaacttgcacagaggctaaatttgccaaatgtcttgcaggtacttatgtatacttatagatgctctcctactctttgacttgagtttgatgtctttgacatttgtttcctatttttcattttcagacagatatggtttatgaattgctgcgcacatcaacagagtatgtcttaaatttattgaatttcttaagcttagtctttacttatctacgaacaatttctgattctatcagtgttttcggccttgtaatgcgagtttgtttgtcttatgggctgatgggatatcatatttataattttctggttgcattgccagtgctccattggcatcaactccagtatgggcgcgagacttcagctcctctgaggagttaattactgaattttgccgcgaatgcagaattgttcgtaaaggtagcatctttttcttttgggctattaagtcaatgattcttcaccattaccattgcttattcacagaaaatttaagcatgtgatgctttcaaaattactggtcagtaacatgtcttctgtgtttcatgcctcacaggtttggctggtgatctgaagaaagcaatgaaagatggaaaaccaataataatagaggtatggttatcctttctattttatggtaatgggaagataaaactttttgctggattgatgatgaattcttccaatgttttctataatctcctttacgatttggtggggaagacaagaaactataagcacttgatgaagtgaggtgccgttattattattaatatatatttgtacatatataaaagggttgactacttacaaaaaatgtatctttatgagttctttgcaccctgttctgtgtattgcatttgtgttgagttagttctcgtactcataattttatttacttctctttacatttgttagaataccataacaatgaacatttcttatgttcttgttcatctcacttaaaagggttgactacttatgaaaaatgtacctttatacgacttaattgtgagttatttgcaccctgctctgtgtattgcatttgtgttggagttagttctcgtactcataattttagttacttctcttcacatttgttagaaaaccataacgatgagcatttcttatgttcttgtgcatctcacttaaaaatagcatgattccattttcttttcaattttttgattgcagggtatacatttggatccaagcatatatctaatggatgatgaaagcaaattaacatctaacttgcaagaaaaagataagcagacaagttcagtatctgttgcatcaaatgatagtaaaacacaagcggaaaataatatttcaaatgcttctagaagccatgatgaagttagtgagcagcatattcattcacaagaagaattttcagctaatgaggtgaataacgtctctgatcatctggaagctattgatataacaggaaatgctcaagagaatacaggttaatactgctctcaattctgctcaaaagtacagtttcacttcaggaacttcttttctttcctcaaaacataataatatatgcatgcatctgtttgtatagatttatatacaaatctaggtgtgtgcatgttgttaatttgtgtgtaccattatatttgtgaagagcgtaacctggaggatgccacttctgtaactatcattgtcattgtgcagatggtgctactaaagatccagtaacgaataaaaattcccctgcaaagaaagaaaagtctggtcctgaagctataattgtaccattagtattgaagatggctgaatttgaccataaggtggttcctctatcacttcattatttttttcaacgacttgttctttgcatatacttttgttacatgtgcattctatatctttgtaacaccaattaggtaatcatgtgagttcttaccctggttccttcagattcttttttcaagtgtcatgttcatgcttgagtttacatagtgcaaataattttctaaaggtaggaaggagagtatttagtactaatccacattaattttgcttttggatgttttttatgttttccaactcgtaaaatggtcttagaagcttgtttatcacttgattctctttatcaaccaatgtagagccagactgctttgaaacttctcaaatattgtgaaaaaactagagacacggacacctagtcagctgaggaatcttaggtcactatagaggaattcagtcaactactgatggatcttatgacactgttgaaggatccagtcagctacagagtacagatgagattgatttaggctatgtttggaagttggattttggtgaggaaagaaaatagtaggaaaaaaaagtggaaaataaaattaataaattctcatatttgatatggaaagaaaaattatatagaaaaacactcaggtgatgtttggtttactgtaatagtaatcataatagtaatgaataggtccattacattgtttgcttttccattttaacttttgtaatccattactatgtaacggttattacattgagtaatgtaatgatgattacgtaccaaaaccaatgtaatcctcattacaattacacaattacaaaagaaaaataatatttagtagaaaaagtcaaaaagtctaaattgccctttttttagtattttataattataaagtaaaaacaatagggttattttggtcaatacaaattttattccattacattctcataccaaaccaaacacaataattctgattacaatattcattccaactacaaaccaaacattgtaatcaatattcttattccttttcattaccattactattactattaccatcccattacaccaaaccaaaacaccactcaattcaacaaaattttccatatcaaacttgaaaaattgatttatttttttgttctacactttatttcctacattttccctaccgttttttttccaacttccaaacatagccttaatgttttggagacagaaactgcatggcatgctgattgctttgtttttactgatttttgtatagctagtctaccattattttgtcttctctccacagttataactaagttgttcttgtgacaggcattacttgaggagtggatatcaactcgtacatttagggatacaagtctagtccaggtatatctatcattggtattattgtccatgaagaattttgaagttacggtgtatattaaattgtttttatcattatatattatcaaagtaaacaggaaactgcgtgttattacttgaaaatttgtatgaagataagttgatgtgtttgctttactataacaagtttgaaattttatttaactttctcagttattccacctttatattgtccaggataaagataaactagtagccaatttgaaaaccattcaggactatctgtgctcatttaaatcacaggtatgtggtttcattttcttacagtatcacatttcagcaattttggaatatttttctttcattttgagaagcacagattttcatgtgtaattttgtctgaagaaaaaaggtatttttgtcgtttacccccaagcagggtttatcagtggtcaatgtatcagctactacatttccacaaactttggattggttgcatggttatctattgcaggtatgctttccatcatcaatagtttaaaatgtgaatatacttcttccatctttatagttttgtgttatgtttcccattaataaccaccgtggctggaaacttgcctaattttttgtgatcacaatattcacatattcttagctatacactagcttaaaagtatcttttctactattgttatattaataattagtgctctccattccagagcattgaacaaggtatttcatcatcgtccaatggaaatgagaagaaggttggagctacttaagctgaatacagatgctagctcaaggcagaggtacgagactaaagctctatgtactttcgtaacaataaatagaaagaaaaaaaatgaaaatctacatgtcctgcagtatagtattacagaaaataaactttctcgatcaacatattgcttgctgtgctaaacctttgggtcatcaaactttccccgtaagaagagaaactgacatatccatggggtttttattgtttacgaatattattttataaattcatcacgttgcatagattaaacttaatgttgatagttgttggaaatagaaaattagtaccctaatattagtgttgttcctttggttataagatttaacaatgagaaaagtggagtgtaaaataaagtgagataaagagtggtactagcaccctcagttgaagataataggcaacttaaaactagaaaattacatcaccgtgatgttgttgatcattttcctctctaatataggtacccatgtatgaatagaacaacggttcacaaaaaggtggatataaataagtctatcagggtactgaaagcagcctacacaagtcagctggatgcataaaacctaatatatttgaagagaagaagaaaaacaaaaaggaagaaggggaaccatatctttgacggcattgcagtgacctattgtaagatttaaaataatatagcatttgtataatttctgaataatgtcaaattattgagtgtatgaccagtttcaagcatctggatattactttattagtggtttatagacgctaatgagttgggacacaaaagtagatttaggtaaattgttgttgttgctgttcttttattttgtaatagatacgacgaatacatttgttaaattatattacataacaagctccatatcatcctcttgtcatgtttatttgttctcatagctatccttggtgttggtgatagtaatactactattctgcacgttactgccattttcaaattttatctacaaaaatactaaatatctccatttctagactactttaacaataactacaaaacaaataaataaaaataatttctagcaatgtttatatttttttaaaaaaataaataatccacctaagcttttgcacttgttcatgaagcaaagacaagcagtgttcagatcttgatggctgattgagagtattaaagctgggttctttggttttaagtacgagtctataacagtcaatagtctagctcattgtttagcaaatgattccttgaacaccaaagttggtggtgactggtatagggttattcctttttttgacagtcaatagtctagctcatctctcatctttgaatgctttttcaaacaatcttttcttgatcggtgtagtataacctttaaacacttggatggggagggacaatgtttagttgctactgtatgttgagcgatttggggatctcgtactgagctggtttggattaaggagagtgactgttcagatattattgcatctgctaaggggtatcttaatcaatggaggaatgctcaaaactcataaagagttgtcttggctttgtttccaagcggggatggtgcatagcattgaaagttaccaactgtgaatgaagttaaatcaatgttgatgcagctttgtttaatgaggggcatatatgggtttggaatagtagcgagggatgagtatggactattgctagaaggtcacacagttcacgatctcgattgcgtcgaaccggtccttgtcatggaaacatgttactttgagactgattgtctctcgggatccaagctttatggagtacaacgtttatgatttttttgtttggtattattattcgagattgtaaagcttcactttatgatttgaaggatattttaacatgttttgttaaacaatcagcgaatgtgattgttcatgagtttgtgcaagcttcccattcatgttacctaatttggttgcagaagttaaaattaatatagttgattttctattcaaacaatcttattaatttgaccaaagggtataacctttttagtgtaaaatgacgtatcattaaatattaaaccacttgttctttggagttattaatacaaagaatcaattttgactaattataacactttattgtagggattagctattgcaacctttttttttttatttaagcgtttatatattacaacctgggactcgaatccagaacttccaacacatacgcactcttttatggccacttgagtagcctcaagtggttgattagctattgtaacttaataatagtaaccaaaacccattttaaaattgtgtgcattaaacaccaataacccatatatgagaagatgc

SEQ ID NO: 14633 - DNA, 21589 bp, Cannabis sativa
atgaggggggtagtttaggaaaatgaaaaaagttggcatataggaacaattttaataactatacatttaggaaaaaaataaaatggcattttaagcatagaatttcaaatttcccaatggtaaaaagagcattccaatactttaaaatacaaccaaataaaagaatgaaatgaaaattattttctttccatttcatttcattacttccaactaaacgtcacctaaattcaacaatcttaataacatttttaacgaccataaaagttcaagtaacataatttaatacatgtgaaagtttgagaataaaaatcctaattaacctaaaaaaaaattattacaaaaaaaaatataaattgataatttatttacatatttatacaataaattactctcctaacaaaaaaaaaaaatataatttttgattgataaaccctatatagttataggggctagttttggttaaagattcaatttttctttctctcttctcttcgagtcttcttcttcatcttcttcttcgtaatgaggagcttgatttcgagcgctaaattggtgagtggtgctcgctccttgtggtctccgccatgtgggagtcgccgcggttacagtttgattccaatggtgattgagcactcctcccgaggcgaacgagcctacgacatcttctctcgccttctaaaggagcgcattatctgcatcaatggccctatcactgatgacacttcccatgtcgtcgttgcccagctcctctttctcgaatccgagaacccctccaagccaatcaatatgtatctcaactctcccggtggccatgtttctgcaggttttcttcttctcctcatctttttttcattgtatgatctataattatagttagggcaattgttgatttgggggttaatctttggctgattttgtttattgggtatataaccatttcgtatcaggaaagaattgtatgtggagaatggtgagagggttatgaaatttgtgtgataaatgtgcaaataactctatgataacgtttgattatataatttttaagcagtgtataactttttgattcttcttgttgattatgagtttgaatagtatggactctggtttattatgggttttgctcttttcaattcttcaattttagaaccagctttgatgtgactaatgaatatcatttcgcttttgttagaagtattagagtgcttaattgcttaacttttggccccttgaagtatttttaccaacattagggagttcttgtgctttgttcctttgctgtacaggtctcttcagttcaccctttgattttttctatccatttgtactgaaatttcgtttttttgggggttgagttaaccaacttaaagcctagcctttacatagttacctcctattccacaaaacggatttgagaaactcagcattgttgcttacacctgttactttaggtcttgggatgtttaagggattcaataaattagaagagcattagatcttttgagtttgttatttgtcttgctccattttggtgttgaaatttttgggctttaagaaataatgtcttggcactatttaattccaccaaaggttaacattttcagctggcttttggttttgggaaaactaaatactaccccatgatgttctgttaaaagtaaaccttttttaaatacttcttcaaacttgtgcgtaaatgtgtagaatgtggaatgtggtaatcatggaaatatagtggtctttgtggttggaaaggaatgataaagtttttgaaggtttagaagagactttagagcctttatgctatagtgtcaagtattgggtggctggattggtgtttgatactaaagaacaaagatttaatctttatctaatcggttagggattagtgtacttggttttaattttcttatcatcttttcttttataactttcgtacttcccgtttcgtaccaatattatcaagtccttgtttctgttaaaaaaagttttttcactctcctaggtggtacatactctgatagttaactagtaggttagaaagttgtagttgtagttgtagttttatattgaacattatcatcttcaaattatggctagtggagattttacactgacaggggtcatcaatgtgaggagaagatctaatgatttcatttaataagcaccttacagtgttcgatatccacattttaaaactaccttgtcacctcaagcttgaagaaaagctgaactattgtctgaataacaaaagaaaatcacaaaatttggttgaagatagcatcgacgtgtcattatcacatttctgtggttcatttgctgttacaggtcttgcaatatatgatacgatgcagtacatacggtcaccaatcaacaccatttgtttaggtcaagctgcatcgatgggttctcttcttttagctgccggtgccaagggtcagagacggtccctcccaaatgcgacaatcatggttcatcaaccttctggtgggtatagtgggcaggcaaaagatatgacaattcataccaagcagattgttcgagtctgggattccctcaacgagttatattcaaaacacacgggccagccaattgatgtaattcaaaagaacatggacagagattactttatgaccccacaagaggcaaaggagtttggcataatcgatgaagttattgatcaaagaccaattgctcttgtatctgatgctgttagcaatgaaggtcaagctaacaatgaaggtcaagataaagataaagataaagaagataaagtccccagtaaggattagagggtaagatctcagtgtggcacatcacttatttgaagttttataattgacactgctggattttcactctatattcctaagtgatttttatttattctatcttacttcacaagtttttagctatagattcaattgttcttcactattattatttgatctttgagtgagttcattttcatggaactcatgttgccctatatagcacccatttcaactctcttcaggccaatttttacagcaaattgaaggttgtaatatggtttatgaaccatcttttacatctgtgtaactgtatctttagattgtatatcaccgacgagcaatgaaagaaactgaaaggaatgggcaaaattagattagaaatatgatctttgatcaagtatgaaaagtagtacaatatgtcttttggttttgttttttcatttgagaaaaagaataaggttcatatggatgtgtcacttggaatagactccaatcttagtattctctcaatgaatgtacttcttttgttaagcttgtttaaccattaggcatgttatgtcctcattgatggatcaaataatttgattctaatgtatatgtatctatacatatatatgattttatttattcagttaccaaaattctattataaggtagagcactcatggcttaatgaatagtgattagctaaatgtagatacaacattcatagttttagttttagtgcgtatagctataattgtttattatttttatagtgtgttttgttgatttatgaatatatatatagaatataatatataatattttattatttatgtgataaatatattatttaaatgatattaggagaaatataaagaatccgacgcatgagttaatataaatatgtgaggtaaaatagaaaaatagaattttaataaggtattttaaagagtagagtggaaaagttgttgagagtgggcttgtaggcaattttagttatagtagatattctattaatttttaaatttttttaaacaatttattatgtcgaaaataatattcaaacaaccatgtgcaattgattattttaacattctaaattattcataatattttgagaagatgtttgttataactacactataaaaatattaaaatataatttctctagatattgaaaaagaaatagtgtttattatatgagcaatcttattatatagataggacttataataataaattttatgttgtacccttttacaatatatagtagtgttacaattaaaatcattagaggctatgatcactttgattaaataataattggcttgaattatattaagagaaacttaataacaaaaatacatagataaataattaagttcccactaaatttagcttaaaattaatgcataaagtgtcattaaaatcattatatctaaagtgaatagtagagttaaaaataagttatactaagaaaagttcactcatatattcgaaaatgcaataatttttacaatttatttattttattttcaatttctaaaatatatttttaaatttaaacttttttagatcattaaaaaaaaaaagttgccaaaactaaataaataggccaaaaaaatcctaaaattcctattatgtcctcttcccgtactttgccaaagcccaacccttctctctctctaagctcttttctctctcacaaaatctactctttctctctcttcgaccgcctcattctctctctctctctctctccgctttctcacactgtatcgattccgtaattctgatttgggaatgctgtgacccttgccttttctccctccttcgctgatgacctagcatctccggtgccggacaccttcgccggccttccgcttcgggttaagattcattattttataataaaataaataagaaaaatacaagtctctgtgattcggtggatttctctagggtttttgtggctggttgcttctttcgatttcgattgaggtaatagaagttcgtgaaattctagggtattgtttcttcggttgaggcgtcgacgccatggctccggggcgtagacgcggagcgaacaaggccaaggctaagggccagttgagtctcggtgatcttgttctcgccaaggtcaaggggttccccttttggcctgccaaggtgtgccttttttatatttattgtttctctaccatttttcttttttctttttaaatttcttactttaatccatttacttccatgaatttttaattatatttgatgggattttctttcggcatcatagctcattcttttccaatggttcagtagtttagtgtttatttatctaattttgtattttacaaagaaaaaaaaaatgctttcttcagtttatgtcgctctctcttatttattattttaatatttttaattggattaaatggggggaatattaggtctatggttttggaaatctcatgtattagtggacttaggtttcggagtagagtattactgggcactcgctgtgtactagtctgaatctatgatacttttcgattacatttataattttgtttgtttgttcatttacttactgttgcaatttgggttctttccactgttggttgcttttcaaatacatattttttgtttatactttacgattttaaggtgcatttatgttggactaatgttggattcttttatattttggataaagtttgtttttgtgtttgatcaaacatgtcctattaggctgtgatattgagtggatcaattctgttgagttcgtattgcctcatatcgttttgaggtagacatattggttttggatttcagattagcaggcctgaggattggaagaaacctcctgacccaaagaaatactttgttcaattttttggaacggaggagatgtaagtggtttaccagtttttcatttattatctcattagttagtgtgtaatgagacactgaagtaacagtgttatctatgtatctagtacacttaatctttaagagcaagcaaaacaatttttgtggtagtggtatagatgataacagtaaattttgtgcttatttaaccccaagggatggtctagtggtagggggagtgttggaaagtgctggtaggcatttgttttgacgttctattccccagactgccggaagcaaaaaatttccaacaaaattgaaaaaaaaacagtatatttggtgcctattttattctttgcattttggcaatgttttgtgtaaatgctcttatacttgagttcttagtttctgtcttcttggaatttatatatggttttctgcttgattattttgattatgggtacagggtagtaagtatcttgtactctaataatacaagcactgatgttttttgtttaaataaataataataaattttatgatagtaaatagcatggtgtaaattctcttgtttcatctttttatgttaaagttgcattggatagtgcgtgagttctcttactaatgattgtgtattttcttcaataattatctagtggttgttgtgtacatattttaggtttagtactactttgtgcttagttggttgaattaataagttatgttagctccttccattttttgtgctttgttgccattgccattcattcttaactcgtctgttgtatactcgcaattctacaatacgttacgttcttacttttatcactgctgttacttgtttcctcttcagagcatttgttgcacctgccgatattcaagcatttactagcgaaacaaagaataaattatctgctcggtgccaaggtaaagcaaagcactttgcccaagctgtgaaagaaatctgtgaggaatttgatgagttgcagaaaaaaaaatcaagtaatttgacggatgatagtgaaagattggaacctggaagtgaggctccatcagttgatggggctgatgataatgatgttgagggtgacttaaaggatgggactggtatcatagggtctgatggagaagctgtgaatgaggaagtagatgattcttgctctaagttggagcgatgttcacagagacgaggtgaaaaggactgtgaggatgtacagccctctgctggtggtggtacgagtgatgtcctgtcacctgtaaaatcttctgagactaaaggtaaaatgagtgatgctatattgtcacctgtaaaatcttctgagacgaaaggtaaaatgagtgatgctatagaaccaaagatggagatggttttgaaagctgcttcagatagttcacctcacctggagggagtttctggttctggacagaaaccgttatcaaatggtcacaagttgaaaaagatgacatctggatcaaagaggagtgaagttggtggtgttgaagtacataaaaacaaaaatgcttctagttccagacgaaaggaaactcctgaagataaagcagattctgatgtgtgtggtgaaaaaaaggcaaaagtcttctcaaaatcaaaaagtcatttaaaggttccaaatgatgtgcgccgccctggtggggactccaaggaacatatcgaggacaaagttcatggaagaacaaagaagggccctcttagtgtggcaacaaatgaagttttgcatcctgcaaaaaagtcgaagcatttggattcaagagatgattcatcaacaggaacattctctaaaaccaaaaaatctttttctactagtcctattgtcatggatagtaagacagttataaaatcagatttgaaaaaatcaacttcattagtgaaagcagaaaatcacgtcacatcaaaatctcaaaatgcatctggtgatgaaactgtgttgcctccgacaaagcgacgtcgccgagcattggaggctatgtctgaatctgatattaagatggaaaaagatgttgctgttaagaatgatgtgtcgagttctaataatgttaaagctgtggtaactcagtcacagaaaaagaggagggctgtttgcctttatgacgatgaagatgatgagcctaaaactcctgttcatggaggatccgccacaattattaaagctccttcaaatgtttcagatgatatcaagagttttgatgtgaaaattgaaaaatgtgaaaaaactctagaccatggtaaggattctactgaacatttggaaagtcttacaaaagagtcctctaaattgaatggatcttcatcacctgacaaattacaagctgatgttaaggagcatgctagccatcaaagtaatgaaaatggggctgaagtccatcctcgtagcgatgaaaagcaggttgaaaaggaagagaaatcagaatctgaggcattgtcgtccaaggagttaaaaccaattttgatatctcctaaaaaatccccacacatgaattctgctatcaaaccaggagatgaacatattaaagcaacaaaacccaagactaaagtctctagttctgctagtgcgaaaaaggtgtctagcaagggccctgtttcagctaaggacagttctcaaaatcatgtaacaattcaaagaagtaagcctgcttcctctacagaaaggtccaaacctacacagaaaccacattctcggatcaatgatgttgctgtgagagaaaagtcaacagagcctggtcaaaggtgtgcatgcttgaacctctttcattttctgcatcatttccttccctctaattttattatattttgttgtttcccattaaattttggtgccattatcagagtggaaactggcagagaagaccgaagtagtttgatgattggttctaggacaccggactctgaaaagtctatgaagcatcttattgcagttgcacaagctaagaggaagcaagcccactcacaaagcttttcttttggcatttccgcttctgcttttcccactggtgatttccagggaaggagcccaagtcctactgcggttcaacattttttttcgggaagtggcaattctatgatggttgatatccaaggatccgctgctttaggttctccaccaaccaatgttcatgagtctgcttcacaaagtcagcatgatgttgaagaacttgaggagcaaagagctagttctggaaatagggttgttggaaactcactaagtggtggcactgaggcggctgtcgctcgtgacgcttttgaaggaatgatagagactttgtctaggactaaagaaagcattggacgtgcaactcgtcttgccattgattgtgcgaagtatggtattgctaatgaggtaggcttcatattatgtactatctcttttgattatttggtgtatttgaattggattgtacagaaacatttcatagatttggaggaatcatgggtgggcggggctttagtctgtggctgtgataaatatatattttgcagctggtaatatcctctgtttgtttcctaatacatgttctctgtggcaattcatgctctcctatgattattcacacatataattttagttggatttgctgatacaagaaacaacttttaggttattgagatgttataatctggggtcacacaatacaccaaataattacttcttttggaattttgtgaagtgcagaagggcaattggcctcttacagttatttgatagagaatcatatggaagcgattgtaatttctaactcaaaataatactttttaagtctgattgaggtgttatttttcttttattatttgtaggttgtggaagtacttattcgaaaattggaagctgagcccagttatcatcgtaaagtagacttgtttttccttgtggattccataacccaatgctctcacacccaaaaaggtatacaattaatagttcacctttatattttttcacgaggtgattcagcttggagtttgagatatgtttctacacatcattttattattgctaattattaaaatattatgtaggtattgctggagcttcatatattcctacagttcaagcagcattgcctcgtttgcttggtgctgctgctccagctggtactggagctcgtgaaaatcgtcgtcagtgtcttaaggtaattgtcctttacttaaagatttggcgggcagttgtaaatatgcattaagtcattttgttaaccaggttttacgactgtggcttgagaggaaaattttttctgagacactgcttcggcgttacatagatgacattggagttccaaatgaagatacaactgttggatttaccttaagacggccatctcgagctgagcgtgctgttgatgatccaattagagaaatggaaggcatgcttgttgatgagtatggcaggtctgaaattaaattttttctcatggtttggtattatttatatgtatctcgatgtcttttgtctgctatttaaaatttctctttataatgttgtctccctttatctatgcacttcctttattattccttgataatataatgtttaaagtaggttttgataagaaacatttatgctgtttgaacactgttcattgtccattcacaaatcccctacctaaccatttgtgctattcttgagttgctagtgttgcaacattatggaacatggaccatgctttcatgcttcgaaaatcaaacaatttgattgcgcactgtttatgctttttgcacatagtagaatgctatttaaacatcatggttagagttgtggctttctttatgtgaataaaactcatgtgaataagctactgatttaacgactttattttgaacatgttgtgtcattatattttgcaggatgttcattgatgtaatttggcacccatttatatctgacttattttgcatgtgtttcagtaatgccacatttcagctgcctgggtttttaccatgtcatgtatttgaagatgatgaagaggaagaggatcaaccaagtacttttaaggaaaatggtcaacaggaacccacccgtgtttctggagagatggaaacatgtgcggtcactccaaatgacaggcgccattgcatcttggaggatgttgatggtgaacttgaaatggaagatgtctctggacccccaaaggatgaaaaaacatcactggtttgtaattcttttgaaacagacacattgccggtttgtacttcttttgaaacagacacacaaaaccttatgtttgacagagttgcagaatctgctccaagcatttcttctgagttgcctcctctcccagagggttctccaccacttcctcttgattctcctcccccacctccacctttgcctccatcaccaccaccacctccacccccatcatctccatctccaccaccgccacccccaccacctccaccttctgaaccacctcctcctcctttgccaccttcttgtcccccaccaatgatggtttctcagccttcactattaccacaacagatgctgccacctcaatcatccgtacattcttcaccacagttgccatttcaacctcctgcgcctcatgaattcagtggtgcagttactgtaaggcttctggcccattgtattttcttatataatagcatttggctgcaacctttttgacagtgtctttttatgcagggaaaccaacttataccaagggctgggaacactcctcatgggggtcctgcagatggttctgttaaaagtgagatgtttgcacagcagccacattgctatgttcctacaggtgtgtgtggcccacgagatccttctggatttaatccttcaaggcaactggaacatggacataatgatatgtatctaaacccacaagtttctcaaccaaaccaacaatatccacaaagtactaccccttacatacaaagacctatgcatcctgtgccacctcaaaatccttcgggccatttttcttattcaaagcctgcaattcagcagcatcctcagcattcctaccaccatccttaccctttgccatcccatcccgatggtcgaaggccatttgttgctgatgaacaatggaggatgccttctggtgagtttaagtcagatagtcagcgtggtgtatgggttaatggagggatgacacattcaggaccaccctttggccaggaaggtatggacttccattctcgtggcaagtttgatatgtatatcagagagactcatcgatagtagttgagaaaatttatgtttagatgcctgtattttcattcatcacattggctggtgtatgcgactgacacttgttttaaaaacatctcagatcaacataatactcatagttttgatcacaattgtgtttaaatgtggattgcgcaaaatttatgcatgtattatgcggtgttatgtggcgtgaaggaaattgaaatgcttctacttgtataaatgtcatgtttgctgtgtggggaaaagttattattatgtcgtagtgtatgactttctttgagtagaaacttaacttttatacatggccagaaaaactaaaattacaaaattaattaaagaggaaattttattgcctttgaagcccaaagagaagttagaaacatgcatttccttccaaccaaatggtccataaagttctatgtgttttatgtaactgatgttatcttagacttgccaaaatcaatatgtcttctcaattgttaattccttgcatttttcatgaaaaacccaagtaaactctgcttcaatcaacttattacatattttcaacacgtaggtatttgtacaaatgttttgacaggtgtgtcgttgcaggttattatcgaccacccttcgaaaggccacccacaaataatttgagttttcaacatcctgctcccagtactgtaccaactggtgctccaatttcaggtaactttaagcttgatgtaatggtgttgaattaactgctctgtttatgttgccgcgaaccaaaagaacaaaaaaatcagagataataaaaacatagttacacacacacacacatatatttattaatttcaccttaatgttatttgttttgcaggtcacagcgtcccgcagatgttgcctagtagaccagatatgtcggctcttaattgttggaggccagcttaaggtggtgaacctttaacattttcttgtaaattcttctgtgaataaataacatcacattttacaattgaagaaatgtttggaacttcaacaatcatgttctttatttgtttaaacttcgaaatattcataccggggtttgacttaatgtttcaatattattgtaatgtttcattgattcttacaacaaaatactattgatcacacatttactgtcaagtcacacagcacatttgatgcttttttcatttctctttgctgataagtttggcatttcttttccaattgtttcagtgctgttgattgaagaacaaagggtaaagcggttttcacattatgtttggcgttgaggtaacttgtgtacaaagtccaaccacaatttgaaggcagcattgagaaatggaggcccttggcaggattgtgtatattgtaatttttcctgacaaatgtatcccgagaacatttgcttccaagtgtaggctcatgtttctgacttggttagtacacctgtttctctattaatgtaattcctacttttaaatcgagtaggaattaattttaggcaattgatatgagctttgtcaaatttagctgctatttatcaactttaatcaataattcttcaaatgcatatccctgattttccttattttttggcggttatggattgagaaatgagcgtacttctgaaccttataccttttggcttgtataggcacaaatggttattaggtggtgatagattgtcaacttctgctgctgaatctttttcattaatctagattaactttttcataaaaagagattatattggaatgtttttctggttaattgatgtggtctgtttttagtttgttttgggtaatcctaagtcatttgatcttgtgttttcttgctgtttatcaatagatagtttgtgcttatcttattcttagattgagctaacattaatttttgtcgatagatagtttgtgcattaaactaacattaatttttggtatgagctctattctggatatgacttttcatctttctgaacatattcttgattactgcatatcgtcttaactgaacaaaatttctgcaataataaacccaattctgcaaattacttattagtttagcggccaaaatttatcaggggacttttcttatttgcttttgacctaagatttgtgtcttttggcttcgaatattttgcaagttttttttggaccatgcaagagtggaatacttcgattgttgattcaaattgttgtgagttaccattggagatttggctggaactgggaaacagagttttgatagaactgtagtttaaaatgtgatgattggtgcttacttacagttattgaaacatgttttacttttttttaggccgaaggaggcgttagtttcggaaaataagagaacttcactggtgttgttgcaggttttggcataaaggatttaaccaattttgatgttattattgtggtacacttacaaagttagggttctacttagcagataagactgcttcataaatttgaggtaaatatttttaatttttacatgatctctcttcatcagaggacaaaggtcgttattttttttttgttagtcagtcgagtacagtttaaatgccaacgttatatgtttccttgtaaagttatgtcaaatattttagtttttagtggtttttcatttatctatacaacaccattattatgtattattattcatgatttattacccataatccaggattttcctcaaataatttgtgtttgttactgaattgctaccatagtttaacacatctgagattattttattatataatttcacgtttgatgatttgcattagcagcattattattttatttttatttttcgtcgagaaataatttaactagattaaaatgccaattgagagttgagacaatgaatccctttgtaaatttaagtttttctttttcttttctcccacccatggccaaaagaatagaatgaaacccaacaaaaaatgtgttgcttttcttgaatttttgtttttattcactaatgctttgattccattttctatcttctatattccacatattcttttttatatgaattcgaagaacatatacataccgttttgggagacaaaagaaaaagaaagaaaagaaaaaaaaagtgggaccatgcattgcaacttaacctcaattcttcttcagcctggatgatgataatgatatagtataaaactatattatatgattggtttcggtccctcactcactaaaacgggtaaaaatctcttttcaacttcacaataaaaaaacatgagatccacctgaaaatcatactttgttgtttttttgtttgagtactttaaaatgtccttaagaaagttggcattttgacttttcatataccttgtattttatttggacaataacatgaaaacaaatgacataataatgacattattaagaatttggcattttctcttgcaccaattttaagctaaattaagatgttgcatatgatccattaagcaaattttgtagaagaaagcattaagcgattatattatgctacaacatattaatattattattaagacaattcaataaattatattgattgcgaaaattgattaaagaatagtgataaactacatataacaaaataatttatagaatacatacatacgaaaatctatcgacattcttaagtgtatacaataatcttctctgagaaaaaatctagtttgaaatggatgctgccaacaaactgtgatcaattgcataatgcttttgtactacacctcttcttggcttggcttctctctctaccttgtaagtacaagaaaattccaatcacaaaataatttgagaatgattttatttgatatatccctatttttttaggggttggtccactttcacttcttttgttttctatatactcatcatatctggttcttgaaaggtcctgaaaaaaatggtaaaacaaatttataaaaattaatcaagtgcagctttgcttcttcgaccagtaattggctttggcaacccatcaaatatcggttttgcaagggaagcagttgagaagccttgattatcagatttctgactccatttcgaaggtggtcggatcgacccattactgtctggatcctgcaaactaggtgtactcgatgactttcttactccggtaaacccctcagttaatattgaatctcccaggccaacaggtatagggttcaatccaccggtttcatctgttgccattgttcggccagctgctttgggtctaagagctaagtgctttcctcttgatgctgaaaatccaccgctgctgccaatgttattatcctccaacatcatttcgggggtacgtgagaagtcagcttcggatttctggcgccttctaatgagcttgtcacaactccatctctcagattcaccttctttagtgtctgaaatagatgtatcagctatttcgccattatcatctaaatatccactgaccaggcttcttgacttcctgtggtggtggctcaaaggtgggtctgaaactcttgtaaacagttcatcctctaaataatttggaactcctcttctgtagactgacatttcaattgaatcactagagtttctatttttttctttaagcccatagtaaccttgcaaagagctcatggctggtgagactagacgctgaggagacatatatttaagggattggaatgaatcgaacagatcacggtgcatccgcttcggtgggctgcggtctgtactgttcggtctgtaaaagtaaacaattccttaagcaatgacgaataaaaagtggaagacatattggccaacttgattgtggaaacattactaaaataatatgaatatgctatcatggcacaaagatttatgcatgaaggccaaaatccataagaaggggacattgcatagtacgcaagaaaatgaaagtatttatgcatcagcaagtgtggaaatctaagttcaatacctgaagtttatattttactgcaattggataataatggaactaagttctaaaacaatattttggccaactcattatgatctcagtacagaatttaaaaggcaaaaacatgcccaatcccactgtactgctcactattaggacatctatattaatcttatctccctctgaaaaaaaaaaccagaaacgacctaaaattcaatgcaacttcctaacaacataaaactaaactcagagccaagcatgggaatgaaaatgaaaccagctaagcatgatatcactcttaccacttcgatatacatattctagagaatgaagaggtggcaagtaagtctaaaaaagatgcaaaattttacagttgcaaataaattgagcatacaagaatcctgacttccgaccgttaaagaaaatggtattgtactctgttctgcgcagaaattagtcaaaaaagcagagtacagaggaataattaccctggtgtattggaaccattagataaacaaggggatggagggtgcctcccaggtagtggaatctgaatagatttgagggcaaacatttgaagatctgtgacgagtccattcatcttttttatgtccgaaacctgtaaaaaaagcaccaaaaatgatatataaagaaggcccttgtttccaccaagtgagaatattaaactaatgcatagccagtggaaaagaaagctaatgctttaaaggggcattgagtatttaacaacctcaacacccatttctactcattgctcaaaacatctttaatcaacattgaataaaaaacaacttaaatccatacaaaatccccagaatcgaccaaggcacacaataaacgaaaaacccagaaattaaatagcccgaaaagcccaagaattcatttttttttctctatacatatataaatgcacaatcaaatcaaaccaaatcgtaacgatcgagaacaaacaaattaaaatctacagacaaacataatcgaatctatacctcaacaccgtatttgatggcaacaccagcgagagtgtcgaattttgtaactatgtgttcgatgtagccaagagggggttgagacgaagaagaggaagaagaagaaggagaaggcgttgaagttgtcgtcggatgattatgattatgatgaccattagtctcaggctgctgctgatctagccgattttgatcaatatcgcaataaaaatcattactataattcccaaatccaaacccatttccattaccattcccattccgatatcgtttctctctttccatctgcatctccaccaataaataaatcaacgttccaccggtcaaaaatctatcagaaaaattcaaaattcaaaattcgaaaaagaaaaaagaacaaattgggggaatcgagtgaaacctagatctagtaaatatgaggccaagattcgactaacagctttttaatactttctctctatctgaatcggctttgcctccagattttccgggaaagattgatgaaacatgcttcgccttgccttgctttggtttctctttctctttctctctctctctcctctttctctttcactttctctctctacaatggactttgaagctaaattataatttatttgcaaaattaattattaattaaataaataataaaaacgaaactaattaaataagattcgttaaatgaccatattacccccaaacctcaactactgtcggtcaccattttaagctctctctctttgccattgttgtttcaaatcagagcttggaattccatatcttttcttaccatttcaatcttcagaaatctttttttttttggatttttatttttgtaaaaataatctaaaattttctataagcagatcaacaaagtaaggaaccatattatgtatatatattcatgttaagacagaagtaggggttaaatggtcattttatgtattgaaaatgattaggctgataaagtttcataaagaagcctttattattattattattattattatttctttttttattattttgtatgtttaagaatcaagattttattttttcttgatatataatatcttttttcatttaatgataaccttttttcttaaaaaaaaaaattaaataaatgataaccttatttgataccatttatatattttatttaattccttttaaaatacgttttagctaaagggataaataatgatagccatcaatataaatttggaaaaaaaaaatcatttttaaagccatttataataaattggggtgatttttttttttttttaacattaatgtgtatacaacacaaatacaaaaataatttttggcaagaaagtattgaaataaaagctttaatcatttatgtaaactaattttcaatttcgttatcactttcacttacctaatttctcttttacaaatttgacttttgtggactacaatattgaagaagcagccaagtcttttttctttttctttttttttttttttctatcaatttttcacaagtaaaataaaacaatttaattccatttatgtatatttggcgttaaattatatctcctttttttttttttttttgaaaagaccctttattctttgataagttattattcataccacttttttttactagactacctactactagtagtgtaactattttatacataaaataaggtaatgcattaaatgattattcaatgtaaaatatatcactttatttttagttgagaaagagcaattataacagatgtatcacataaaggatgtggagacatgttgcatcaacttaattattaaacataataatagtaataaatcttaaatcactttaatttttgcaacttttatttatttataataatattatatgttacatatacaatacaggctaaatttacatatttccttagagtttttattttttattttttataatcgtttacgttatagttatttaaaataatttacaatattgaaataaaatttatatatttttattgcacctaattatttttttttatacttgtgttaagtaattatttaaactttattttaattttataaaaatttacaaatagttttaactagttacaatatatgcaataaataaaaaaaaaaaattaaactaaattcttttcctaaaaattaaaataataaaaaatttaaccattgtattatttgttatttgaaaagatgagtgaaaccattttagattaggttgttgttgtgtgactgtgtgtaccatatttgctcaaacggtttgtcatctagtaatagagataaagatagagattgttttttgatttatttatttatttatttttggtttgaaatggagacaaagatagttcatggctcgcatactcatacacgctttgcttactcattcactaagtttggtcaaaatgacagatcaaacaactttttcaactcaaatcaaaacaattgacatttttgtgtttgggttaaaaatcattgaagaatctttaacttcactattttagtgttctttctttatattcaattaaaataagaagacataacagagacgatttgaataactatttgactccaattgataattgtatgagcacatgggaaaaaataaagagaaagagaaacaagggtctgaactgaattcttacttaaaataattgaagctagtaggagatgagtggacctaaattagtgagacataaagatgtgaattaattaaactaaccaataaaagtcaattatgtaacaattgctattagaaatctgagaccaaattgaatagtgggtttggtaagttaacagtcccaaaacaatattatatttaaacaatattatggtgaagtagcagtgatattctttacagtgaaattacattatattattattaaacagatgaggttttgcctcataatcatattttgattcacaacacaaccaagaaccaagcaatatataatcataattggtaaaattcaaccatacaaaattgcaagcattactccaaacctgcacagattttgccaagtgttaatataattaaagttttggggggtttatttaattagcttaaacacaatcaagtgaagacagagtattgttggttgtgcataattaaaatataaggtgacaccacactagatatgatgaacaaaaataaatagccgaaaggtgtactttaatttataaaaaggaaagattattaccgtgtgttaattacaactttatcccagatatcgtagcaacactccatcattacccagcacaaatcctttcttttcatccagaaacctgtagtgtaaaccaaaaaatcatggacattaatgactttctttaatggaagtaatgttaagcaagtactaactttttagtgtcccacgatagttagttgcttaacaattctactttcttttttccctacctcgttacttgttacaacttctagattggtgattattttttatcaaattctgaacctttctttctccactttccttctattggttgctaatctattttatatatattatatatggaacagagtccaagaagggtaaatattctttgtcgttttttatcagatgcataaatggtggaagaggttctttacgtcaagacctttgagtaccaactaatatgatgaattattttgtttaacaattcaacaacacctttcacacctatataacacgaatacccaacttaaaagggcaacacacctaacaccgacacttcaaaagatagtacttttagttttagcggtgtttaataataagggaattttaagtaggtctacctcacatgacaatgtctatattaactatgaaaacgtgggtcaaaatgtttctcctcctaa

SEQ ID NO: 14634 - DNA, 11523 bp, Cannabis sativa
tgaatgcagcacatcatattaccagtggtaatgcagtaagttctcacctttttactctcagttggattgagattctatgctgttttgtgccttagcagaatgttttgacattttcattttcagcattgtatgaacccatgtggagtctctaatctagttttggcaaatgttgtaggacatgatgctttgtggtggatcagaatcagcgattgttcccatatgtaatacagccagtgctttcattcttgtgtatttgaattttgagataaagttttgaatttatgatcatatcaaactaagtttgagattttaatctctgcagctattggaggttttatagcatgcaaattactctcgcgtcaaaatgatgaaccaactaaagcttcgcgaccatgggatactgtattattccattctagtcttcctttcaaaacttttactccttagtcttctggttttcttagttgtttaatcttgttcttaaaactgctaatttttgtagactagagatggatttgtgatgggagaaggtgctggagttttgttattggaagaattggaacatgctaaggtagtcctgatcctaatcttatatctatgcacagtagccattggtcaagttttttaagcttaaaacttctcttatttttttttttctcttatttctttttattacttaagaggagaggagcaactatttacgcagagtttttagggggaagcctcacttgtgacgctctttgttatgatggtaactaaccaacaacttagactcttcttggcattgtctaatctggtctctgagtaactggcttttattcgtatgaggcatctaacaatacattactcttcttttgtagaatcagggagagaaatatctctttgcatggagaacgctttagctcaatctggggtagccccagaagatgtaaactacataaatgcacatgctatatcatcaccaaccagtgatatggaagaaatcagagctataaacagatgttttggaaagaatccaaatgtatgtttgaatcgtaaatgtacatactttcttctagtttaagaccaccagatttcggttttggtgactgtttcgacaccattcttttgcagctgagagtgaactctaccaaatccatgataggccaccttttgggggctgctggtgctgttgaagctgttgcaacagttaaggttgaatctcttttactaaaattctcgccatttgtattttgtgttatcttgggttttgtttttgttttttttttacatattatgctcgattttcatatacaggcaatacaaactgggatggtgcacccaaacataaatcttgataatttcgatgagggcacggtatgtataatgagttataagtatgttgagagttaatgtttcagtgttgttttcatggttggattatgtgattgtgatcagggcatgaatgctctagtgggaaagaagaaggagcgtttggacataaaggtagcattgtccaactcactggccttcggcggacagaactcgtctcttgtatttgcgccttacaagtgaatttggggttaaacaattataccctaattatcacctagtattttcactttcaaagaagaatgaaaattaaaagacttgcttttgtaagctttgttgttcacaaaatgtgtaattctatcattgatctcccaataatagtgttgtgccaacttgttcttcagttttcgacttaatatgagagcactataaaccacatatttcaagaactatttcatggttcaacttctccatactagttttagcataacaaatgaacatgtttagttttatttgtgtcctcaaaatttgtactacgaaacaattcataataaattacaatgtccattaacatttaaaaggcacccactcgtgaaagtttgaaagttggttgtgtccacaaaagtcattctattcaaaatttaaaactgacaatagaatgaaaatgacagaagatatcaaaaaagaaatttctgataactttaaatggtatttatggtacggtaggttttctatttttgttctttctttggaaaacagtatactatttaatttgacaacaaagggtacctctatgaactcaattacaagttaacaaactcagccatcaaattaatcctccatgagcctcaagcattcaagtctggaaagtaaccccgcacccattcctcaatagtcaatatcaatatcccgttgaaaacttcataacctccaaaatcgggataaggcagcttgatcaccagagcttgtttttaacccagaagaggaggaacactactccaagaacaatggcaactggggcccacttccgaattaaagcctaaaagagcagtagatgaaaaaaatctacaatgttaatgggaaatccaaatgcatctgataggtaattaaattgaatcagaggatagaactgacctgtcgattcagatccctcgccttatcagcatatatgcgtgattcagatgttaatcgactggacatttggctaacctctgcaaaattgaatttgagagagatctaatcagttcatattgtacaaaaacaatttttcatggagtagaaagggaagatgcatcatgtagtgagcaagggaactgcattagtgtattgcaaaacattaagaaaatgctacttatatgaacaatatcgtattatagtgcatgtgtttaatataacttgatgcatattaatgacatgattatgaagttatcgaaaaatcttacggtccaacttttcaccgacgccaaggacttcctggacgtttcgagtcattatttggtggacttcatagagctcatcattcaactttgaaatattccgttgagtatgagtgtcctggtacaatttctttgttttctgtatgaatgtatctataaacacataaaaaatgataacttagacacagtaagaccactgtagattaaggaagagaaggaaaaacatcaataacaaaaacacaccaaacttaatgaaggcgtatggtctggcagcagtttcaatttgccccaccccgttaacacgctcaaattcattcttcaagtcttcaaggtattgataagcaagtttctttgggtaggcacggtcgcacattgtcaagtaacagacacgtccttctgttatatagctaagaaactaggttaaggtaacattgagaattggctgcagtcaaaattggaatacacgtaaacaagttatggagaaagttacaaatgaaagtccacaggaaagcttgcaaagtgagctcatgtgcatgggaatatctaaaatcaacacacacagtagtcatagagcatggctgaaatacatctttactggtgtagatcgaaccaaaatcaattagtaaagtttcaactagaatgagttgatgcaaatgcaagcaagactgtcataagttctagaataaatttaggaagaaccgacatctgctgcatgcataacccaatcaaacaaattttcctagaaagtaatctgtaggataatccaatgaatcagaaccaaatttttctataacaagaaaaataagaaaagaatgcaagaagcaaatatgggggaaacagagacacaacacacaaggatactggaaaatgtaaggtccagtttcaactgacatccttgacggctcattgtgacctcttgagaggtttttgaacaatgctttgacttgctgtttgtagaattcaacatctgttatatcacggccatcatcgagcccctctgctagtggaagaccatcagtaactcgggcaatcatcgttagctttaccatcttgagtacccaaataccttgctctagtacttaaactgcaataggtcaacagttacataagatcaaacttatgtagtagtactaatgtagaatagatagagcaaagaaaaaacaacaaagagaacagatctagagaaagaaagaaaatgagaatataacttctagggagagaaggagcacagtagataaagagtttaaatccaagaatttaaaactactaaaattatcaattcattattcaaaaactaaatgaaatttaataaatatattatctaatgattaatccatatatttacgcgtagcattagcatcaaatacacactatagcacaaattatcagaactgcgaagtacaaactaaacaacaatattcaagaaaacttatcacgattcacgagcctaggccatcgtagaatttgagtaaagaactcatgtggggatatttattcaaattaatgatcctccaacctaatcctcagtatagctatcaagattacactgtactgtactactctgacatcaactccattataatttcaactgttcgcaattaacagcatttttgtacaatcaaatttgtttgtaaaagaagaaaaggaaaaaaaaaaagtaagtttgtaaagaaagaaaaaaaaaagagaaaattctttgttaaaagatactattaatcgtccttgactaagggtccacctaaatcgagtctatcctctcgagaaccgagctcgtcggaaagagtcctcctctgacgtatctgaagtgaattttcgagttgaggaaagtctactactcaccgcgtcgtccctctcaacggcgactagaatagccaatgtggcttcgccacggcatgatagtctcaaccgcacttctctacagccggaatattgccgaacggcaacttcgaatagccatacgaggccaatgttggcgggttctagtcggcgacacagcgcgtgacagcgagcggagcttcagtggagcttgctaaaaagtccctctcttttataataattaatctagacccccaatgcataattgcagaaatagccatcacaaaacatagcaaagatggtagaagaaattggattatagcctcgccaatacacttcgcttatttacaagttggcttggcaagcaagttgtaatgatttgagtccaaacccaatctatggattttccatttcaccatctgagaaaatgcaaattaaatatgtattcccttcttctttgtgtacagtaaagcagattttctcacgccgttaagatccaattctcataataagactttcataaaattcaatgatctattagaataaggcatccaagatcaagcaaaaacgaacccaagaaaggaaaaaaaaaaatgacccacgaaaagtatccaaaaaaaaatacgaaacaaatgatcaatttaacatgtaattctcattttccttataattaaagaaaaaaaaaagtattatgttaataagatatacctgggtatggcattgatttgagggagaaatagaaggaggacgatgataataattttgattctgcgcaacaaaagaagaagaagtaaaaaataatttgagggtttttttttttatgagaccaagtgagacaataaatgcaaagccgcaggctgcgatctcttatgtccagttatacgcgtcaatagtcaatcatatttccaaaggtacaacacaccgatgcatcaactcattttttctactaaataataaataaaattaaatccacacctcatatctatttttttttttttctacagaaaatacagtagtaattacaatttttgctgtgaaaatatattttattttgggaattactcataaattatttttaaattttttttttttgaatttctaaagtgattgcaccactaattacaatagagcttttatacgattttttgttacaatttaagttgcagcgcttgttgcaataaaaatttctatgtagaatttcgtaaaaaaataaaaaaaaactgttttgaagaataaaaatgaaaaaactagttttattttttttagaagtattatttttatttttaatcgttggatgaaaaaataattttcaaaatatttggacatcaatacaaaaaaattgtgaataaattataaattattttaaaagctatataacaattaacaaacatgtccataaaaaaaaatctagatttgttttataaggcggttgagacagagagatttacaatagcacacctcaactcaacttgtccgtaccacttaaacaacctccttcctcaagttgtctctcttttgcaatggtaccgtcaaaattcgattttagcaatcatgcatttgaatgatctcatcaaccacaatttcaaatgaacggaaacaaactaaagtgataacattttgtatatttcttctgtacgtaaaattactgttgttgaaattacaaattgagagaggaagaaacccatgatgtactgtcacaagatatctaaaagaatatgctgcaattttgaatggccatataaaacaacaatataatactgatctaaaacacttgtgacaaactaaagtacaatactactctctcaactctattattttaatcatcgatttctggcaatgctactctccaaaaattccatgagtttaagtcttcctgcacatacgtacataccttcaatcaaacttgggattgtcactaaaaaaaaaaaacaaaatagaataatggctttgcttacctgctctatcaatgaagttggaggaaacatgttattcagagtgtgtacagaagtgtatggcttcacatcaatcctatgactaatggctatgtcaccctgccaagttcatagttcataccccaataaggaaccatattctattatcaccatccatatcaaaacaaaagtataatactctcctaaatacaaactgaattacaaattactctttaaactcaactctatgagactgactttagtcatcaatttctggcagtggtactctccaaaaattccatgagttgaagtcttcctgcatacacatacattcaaatcaaacttgagattgttaccgctgtctttctcttcttaaataatggcattgcttacctgctcgcttacctgttctatcaatgaagttggaggaaacatgtcattcacaagagtgtgtaaagaagtgtatgacttcacatcaattctatgactaatggctacttcaccctgccaagttcacagttcataaaccaattaggaatcattccattaacacaaccattaccaactcttttatgcaagaatacaatacagtagaataataccttaggattgataataaatattttcccttttggaatcccaatcttcctgtaactcagctcatcagtgtctctgtttccaaaacccgcataaaatggattgtaatcattagggaacagcttcttaatatcctaaacatagaaaaagaatattgtgtcagaagaagcctgtcgaaatgcgtttaaatttgaaattagttacaggctttttgttaactttaacctctagacatgcaatcttgaattcatgaggtgctcttcttattactgcaatgaagaaaacaatatgagaaataaactaatcaatccaagcatactcaacaatgaacatctacaatggctgtcctaataattatcagcaagaccatctcaccttcgcggtacaacgaaggaaataatccatctggtgagatcacaacaggtccatttggtagagtgcttccatcctatatgcaaagaaattaagaagataactttaacttagctcattcagttctagaattaactgcaatcacaagactccaaaccaatattagaaagtgcaaaaccacctattatactaagagaactttaagaatctgatactaaaaacatatgccaaaacagtgccacattatgcaagcaatgcctgaccaagtaaagaacaatcataccagaaaaaaaaaatcaaacatggtacctgtttaaggttaagtaaaaagcttctagttagatacgcctgaacaatagctcgtgcactgagaaatagtagctggtatccattttcctgttgtaaaagccagaataatattaaatcaagttcagtagggataagagaggttcaataacttttcttgcgtaaatacccaaggaaatcaattcctacacaaaaataaattacaaatctacaaatgatcaacaaaaatatatactttttaaaaaggcagtaattcttttattacaataaaaaggttgcaaagctatgagaaacagaatgtactgaagtatttgaactgtgaaaaaattgttcttgttgaccagcactaaaactacatctataataccaagaacttcattgcattttagttacatattcaaaaacatttataaaacaatcacggcatttatagttcattatactgaaatttgagatcttggatgatcttaaagagctaaggagaataccttaattgcagagaaaagcttagccaccccagattgtgtccaatctttcccaaccaaaggcatgaattgacctaaaacatctgacctggagaaaaaagtcaccagtgaagtgaatgagagactaagactaaatttattacaacatggcctacatgttacacaatctgcattaatactatgttgtgacttaagtagttttcataagcatgtccgactgtaaaattagaaagagaaacgaaagttgtaaacagaaattgatgatttctggtatctatttacttgtaagcatgtcttactttgttattgtaccatcaacatcagaaattacaattcgtgcattccacttccataaataaatgtgtgcgtcaacctataacacatgaacagagaatcttaacagctaaatactagaaactgaattaagatggagcaacataaagataaataaaactcaaacctgttgtcttccaagaacccgagtagagaaactaaatgtcacaatattttgaccttctttcaggttcaaagatgctatctgctcattagtgggaatatttgtcctcacaaattgtttgcgaggagattcatggaaggtttgggatgtcggagtacttggggtcgtttctgcttgtgagctgtgtaaaacagattcagaatcaacaaattcttcctcgtttgacgaagtactgttggtgtgctcaagtgttttgacccttctaaatggaataggccataggcgccacctgcgtccagagggagtggatgtcaatccagaaccattctcagcctttcgtgtgttgtcctgttccacaggaattgcgtccttgagatcaataggcaagtccataccaaatgcagctactccaagagctaaatgagcagctttttcccatggaaaatactgccctctaaatctaatgatcagatttccatccttaataattgatgagccagaacgtctaaaatcctctgccaaaatgcgatgtgcatcaaaagcttcagcagccgcatccaagcccatgcctgcattaagtttgttcccacagagcgagatctcgaaccctgcaaataatgacatggataaacaaaatgattggtttagaaatttatatttttccttaaaaagagacaggaaattctttgagaagcttacttgtactggactgaatttgtatctctgtagaagttgtttgaggttcctctttgtctgtaggtctctctggtgtaatgtcaatagagtctatcccaataattgactgttcatccttcaactctgaatttttagtaacagaatgaggagataaactctcttcatcttcagaatcatcagctggttcatcttctagctttatattcatacttgtatcgttgttaagtggaaaagaagtacatgaaggagatgacccatcatcatttctgaattcagcagtaacctcttcggcgtcattagcaactataatagtatggttagactgtgaaatataagcatctgatgatgaacttaaatctttaatatgtgcagaaacatctgatgattccgaatcatttacttgcaatgcatcttctagatcactacgcgccaaaataattttttcttccattttaaaattttgagtttcagtagatagaaaggcatgttcttcctcaccttcacgtacttccagctgctgctgacaaaaaacactttcctcattgttaactatagagagattatcagatgtatcatttggtttaggtgcattcagcttactaatataatccagccaagaattttcgtctgtactgaactcatcgttgacatcacaaaactcagaactttcacctgggccaagatgaaactgaggggtgcttaattgaacattttcagtatcctgttccaatgccgtgatgggggctgttaatatatgaccatccacacttaccaatacaacttctgaatttaaattctgggatttaacaattttgtcaccatcgaaactctcaaaacggctagaaccatactctgaatcatcaagagaagattcatcatcttgaaattcataaaacctcccatcttcccccaaagaatcacgctcctcttgcaattgaactacagcagaatcagacacactatgctcgagtctacgaatattattaacatgttcattttccttgttgttcttatcaccatttatgctactactcccctcattaaattcttgatcattcttggcgaccccatttagctcactccctttaccaacatcaatctccttgataaaataggcctcaccagagttatcaagatacatatgaaaattggcatcaaccccattgactgctataccaacaaccttctcagtacctttaagaacaccctgaaatttaccaaatctaacataccatggtgtacttcgaaatgttccatcttgctgtcgaacaacaatgacatcaacagcaccaccaaaaggatgaaacggtgttgcaacagagtaaacaccaccagcaattaagctcccaacttttcctacgacattcatttggtttagctaagaaatccctttttttcagaatctccccaaagaacaatccaagattaaacaaaactcaaaatctgatcacaactaatgttctcccccttgatcatcaccgtcattctccagtgccacctatgtaacataaaacaaaaacctcaacttaacaatcgccagaatctgattaaaaaaaatctaatcatcaaaaaatagaacagaagaatcaaagaagtcacgaaatttcctaaacccagtttgaaaacaatccaagatagtcataaagactcgtacattcaacaccaaattcaaaaaaacaaacttcgacaatatcaaaatacccattatcacagtttctcagcaaccaaacaaagcaccaaacaattttctttcccaaaaaagacaactctaaaagagacgaagaaaacacgcaagagtgaaaaattatcttggagtaaaaaaaacgactaattaaagataaatggagtaatcggagtccaaacccactctataaattttccatttcaccttctgttctgttccgaaaagacatccaagatcaaacagaaacgacccaactcaaaaaataaataaacaattgacctgtgcaagagatacgaaataaaggaataatttttaaacgaaggtcccatttttcttatatattcaaaggggatagagagataaataagagatacctggagctgggtatggcagagggagaaaacagaacgagaatggtaatgaagatgatgat

SEQ ID NO: 14635 - DNA, 5063 bp, Cannabis sativa
ttttttgttaaaaatatagcaatataccattttttttaggactccgttatagaggttaaaaccgatagtcgacaagacatttaaattaaattaggacaacagatttagttacaaaacttacaaataacattgcaatacatatgaaaataccaatacaagtgtgtgttttttatttgtttacaattttgttggtgaagtagcatatattataacatattataatacaaatagattaatcaatcttcacgggacaaaagggattgttgaggttgagaaggtatggaattgtgattattcctaatcaagcttgacaaaacccaatatagaaaacctgatatgaaaaaactgaaaaaccaagcattgttatagatgaccacaaacacatcagaaactgaagaaacaatcccaagtttttgcaagaaccctggaatcactggcaaaatcccaaccaccaaagctgccaaagccaccaaattatagccacctgagtagtaataatccccatttggacttagtgaatacaagtcctttatgtccaactcagtacccctaactagataatagtctgccaaaattatggccccaattgggcccaatagagcagaatagcccactagccatgtatacacaaagctctcactcgacccaagaagcctccatggttggaaagcaattccaagcaaagctgttaacagtgctcctcttctaaatgtgaatttagaaggacttagattcactagtgcattagccggggcaactacattggctgcaatattggttgtgatgatggctagactaatcccaaagatagctaagatctttgttgtgaggcctcctattcggcccaacaactcaattgggcttgatatgactttaccaaaaatgacttgggttgatgatgttactgctaagcccacaaatgtaaatacccccatgaagattggaagcccaatctgacccaaaacttggtctttttgagacttggcgtatcgagtgaaatctggtatgttaagagcaagagtggcccaaaagcttatatttgctgtaagggaagggaaaaacaaagcccaaaactcagatgaagagagcttagacgacaatgttagcatgtggccgaaaccacctgcgttaacgtaagcccaaatgagtaaacaagaagttagagcaatgagaattggagccgagtacttctccacttcccgaatcccctccattcctttccacacaaacgacaactgagctatccaaaaaacaacaaaacaagcgaactcgagtggagatgtaccgagccaagccacgggattggcaaacgacgtcgttttcacagcttttggcaagagaagaaagattgcttcaccacctatccaagtctcgattccataccaaccacaacccaccaaggccctgagcagggttggaatatgggccccacggattccaaaactggaccttgccaaaaccgggaatgatattccgtaccgggttccggggtgacccgttaagactagtggaactaagagaattatattggctacaaccaccgttgcgattccttgccaccaagccattccgaggtcaacgagactaccggccaaataataggtcgggaccccaacgacaagacccacccaaagactcgccatttccaacccagaaaacgtcctttgagaacttgtcgttggcttcagatcgtcgttggtgagtgtcgggtcgggcttgaactccgacccacgtggtgggaagctgtctgtagactgatttgaacttgaagccatgacagttagtaaagagcatcttctaagggaaagtttttggaacttgaccgcttcgcggtgatggttaatctttatttttggtaataaaggagaattaatgagtggtgggttttgggttgttgcagatagaaccaaagggtggggatgaagatggcgatgtgagctgagacatttggaaatggaaaagttcattttttttttcttctttttttgggaaatttcagatgggctttttttttctactgagattgaaaatgtttggttggtattaagtcaccattacttgtggacaaaaaagattcgtacacagtactcttgagtctgacatatgagttggatactatatattcattactaatttatgaataatatgatacgacttactttttaaatattaattttcactattatttaatttatatatctatctatcttggatcacgagctactgactcaatcaaaataatcaatataatgattcgtttctattcgatcttcttaaaagattaaataagttttacaagtggatcttaaataattgttagaattgtttggatcttattaacaagtggactctctaacaataagaacttaattttaatctaaaatttcgttgtatagttcctagtgctaatgccgaactaattaaggggtttgtttgtattgtatttctgtagttctgcaaacatttttgtctggattttattttattttcttaacacaaattcaagagatgcaaatcactatgcgtcgtttctgaaatcatggagaaccctatagaagaaactgaagcaacattaaatctattgctgagtttgagtcaaggattataggtgactgctatatagccattttgattacaatatgatgtaacgtgtcattttgtatacgaagcatatgtactggaagaatctgaatctgatacttaacaaccaaaattattttgttcatagttaggtacaagttttaaaaagttggatttgtggattattgaggcaaaaaaaatagttcactcaactaatttctctaaacaattataaaaacattttggaggaagaatataatccaatatagcacctttattttattttattttattttcttgcttaactaatcatagctcctatattggatttgaatttttcttcttttttttttccctggaatatttatattattattcttgctgtaagaaaagaagttgtactttaatgaaaataatttttcaataatgttcttatcatgaggaatcttctattattattcttaccttatttttcttttaatttcctttaggataaaagatattttatgattatttctgtattcaccttgtatgggcaaacacaccctcaaattactattattttatttttaaaatgtcattttatatgaggaagcttccactaggctaagtgacgtttttcaggaaatatagaggaagtaacttccttcttataaaaaaaaatatatatgtatatgttaaacttatcttattaccattaccaaagtgatgtttttgtttcattacaaatactcaacgtacataaacaaaagttttatttgataataacaatacatatccataaatcatcatcatatatatacatataatatctttcaaaagaaaaaaaacgatgatgactaaccaaatctataaactaatatatggtaggtagttggattttccaaatcttcattggaaaaaataaaataaagcgtaatatatgaactgatcaagctcaattttccacttgccaattgcaaaaccacacaacgcataagcaaaacctaccaagaaaaagattcaacacttgctccaaatttattggaacgaatttccagatccttgagttttgactagtgcctgttctccttctataaaaaccaagttcccaattttatttcatttaatttcaaaaataaataaatcagtttaaaaaaaattaatgaattttcattattaatggagtctcactctcattcttctgaaaatctctcaaccactgtattcactcctcttattatttcagccacgggcatagtggccacaaccatagccatcgtagtttaccactttatagtggttcggttctgtctgacccgaacccggatcagagaactgattgacggttcaggacccataatcggccgacccaaaggagggttagaccagaagcaattgaaggcgatcccgatcctcaattattcaaccggaccgggtcaatcgggtcaagtagagtttcgggtcgaacagagcgagtgcgccgtgtgcttaggggagttagaggagaaggtcttggttcggttcttgcccaattgccgtcatgcgtttcacgttcaatgcatcgataaatggttgtcgtttcaccccgactgccctctatgccgttcgctcgtttacccaatcatcataaactcgcacgtgtctttgcacgtggaagatcccgtaactgaacgacgtcgtgtacagccagtgatgatgatgcctttgatttcgcctgtgtgtcgtgaaaacaagaggccacgtcgttttgtgttgagaaggtcttcatctgtggatcaatctcatgtttttcttaacatattacagagagaatttgactatgatcagtataacaataataataatttgaacaaaacgacaactttagcggttttacacaggtcgttttcgcaaattcaacctaacgaggtctatgatagtagtaaattgtaataatagaaatagttggttggttattgttagacattccttgcagcttataaaattttgggctgagatgaaaatggtaaattaaataaataaatgtttctttttataaacatatagtaaaatggtcatttagatacaaatttaatgataaaattataattataattttagataattaattttagctttctattctccttttattctctcgtgttcgaaccatttcgcctcctagcttagtaaatgtcttttgttttttttttttttaattaaaataaactatcatttctcaaattgagtaaaatttcaatagttacattgtgtttttcttttcatattttttaaattgcactaaaagaatcttaattttcaaaggatttctatattataatatattcatatttcagtatattactttaatagtgtggtatattattttttttgtggagtggtataagaagagcgaaagacaaaaatattgaagtatattactttaatagtgtagtatactatttttagggcattttataatttcgtatatattattttaattaattacaaaatatgtgcaa

SEQ ID NO: 14636 - DNA, 8230 bp, Cannabis sativa
tgggctatatgggagaatcgaaacagaaagtggaataagctccctattatgaatggggctcaggtgttacattgggttttcacagcttatccggcttcgaatagcaacccaagtgatgatttgaagactagggtggcctccccatctaattcgacgcattggaaggctcctaatatgggcagtatatgtgcaaattgtgatgctgcgattaatcctaatcagattggagtgggtatgggctttctgtggcatgactggaacgaaaaagtgcttactgcaggtatggtatacattcccagttgctgttcggtgactgtggctgaggcttgggccattttggaagctataaaaggacggccgagtactgataccagaccttttgagatccggtcggattgtaaagctgtggtggaagcgatcaagaaccaggataaccaactgagtgctgcaggaacacttattcatcaaataaaggctcgattggaggattctaatgactataatatcagttttgtaaatagaaaccataacgaatgtgctactatgttagctaggaaatgcctagctactaaaacctcacagttttttgctcattttatccctggatggttggccaaattttgtaaggccgactgttctgatattttgtagttctggttcttcttaataaaattcatctttcaaaaaaaaaaaattagtgactaatcatattttttagcacatttaatatgaaactctcacatatttttcaaaaattatagagaaccacctacatgctttcctttatataaatatatttattaattatattgtttaaaaaaaattaacttatttacttattttattgttaagtaaaattcgttagatatattttttattaataaattaaaaattaaattaaaatttatatatttaaaatataatttaattatattaattttaattttcattattattatttaaattaataattaaataataacaactttaatacaacattgcatgttggtcatagctttgaatggtaaattattctgaatttttaagaatttataaaatgttctaaacatttaccatatacaaaatttataactgttaattatagatatccaaaacttaaaatagtcctactttcagggttacaattcgcatatgctaaagttaaaatgtcaaatcatcccatttgcctaaaactgacatataaaagaaccctcttcctatccaaatgatcttcttctcaggggtatgaagctaaaaaacaagcatagtatttttgatttggcttgactctaatgttggattcttgaacccagaacagaaatagggaacaacactccatttttcttctcagaaatgttatatactatatagtatataataatgcggtccctcagtcagtagtgtctgattgaatataatgaaagcaattactggaggtaagccaaagccaaaaggaaaaaaatccaagataagctggtggacttggttgtcgctttgtgtcttttctctctcggttaggtatagggcaacaccaacaatacccacatacaagattaatggccttgaaattaaagaagagtctccatatgtatatatgcacaatcatatatgatactgttttttaattgtgaatctcaaatttaataagatatgattggcttaaaaaaactgtcacatcattcgagtaatttatcagtgcacacgtatcattactgtaagaatattatgataccgtattttattattttacatttaaatattagatcccaagtttaacattagcaattagctacctctaagtaacatatatcaaccctctaaattaaagatatcacgaccaaataaaatcaacttttagtgacaaacccaccaaacctgatactctaaactaggaaaagtacaacataaaagttttctttcttttttttttctttctttttttgtatggaaaaatcataacataaaagtttgagagagagggactagtaatccttaatagagattttaatcatttgtttattttcggtctaaataaggatagagttttagttagagatgtgttggattctgatttctatgatgattatgaaagaagtttacatgtggaagagttggatggaatggtccatatgggtatggcccatttttgctatttttattttctttttcattaattatggaggttggaaaatagagaaaacttgtaggtgtgacccttctgagagttaggccataccaataaaatgggacccacttagaaggcagcaacaggggctcatttgttatttgatttgtgtatttagtttagtggctttgagccactaaaaccttttttattcaactacaaaaacaacccatgactaatgactttagtattttgacataatactgtttgttttagagcccccctccttaaaaagttgcgacttaaatgaaatgagaaaataagtgaaaatattagtgattagttatgaaaaagcattaaagtaagcaacatgtttggaattatctcttgaactgaatgaaatgaaggcactaatattattaataaaaaccaagacaaaagaatgggatcaaccacaatttggaatatagataaaaacaggcacaattatgtgatacaatgttaacagtgttttgcaggagtgttaatggtggtgagatgagataagagcaggggaagttaagaaggcactgtacaactacaactgccatgttcagggattccttggagtagcattaaagactatttctctctctctttcacctataccagccaaataagttttactatgtatggaaaaacaatggaccagaaagaaaaaaagaatataaagaaaggaagaaagaaaagtaccagaagatttataagttgcatattggattgatgttttgatgatttttatttttcttggttgaatgagaacatgggttctttttctcagacactgctcatgatgattttcataataatcattttcatgcttttatcattaaacagttgcaacaccaccatcatcccccacaatgctgatgataatgatgcttctgctgctttgtcaaatgcctatgcaccagagaactttaatgttcataatcatcatctgaatgtgattgagaaagtttcaggaaaagatgagaataatgaagaagagcctaaaagttctttagtggaaaagttcagggttttacttgggctaagaagaggcttccaagtcagaagaacatcaaatggtgactatggatatttttctccagccccatctccatcgctctttggtgaagctgaggctcctgctcctgctccagctccggtgcttgctcctactcctgcgcctatgcatcatgttcatttgattccccatgctgcaaaacatggtttgaacaaagttcatccagctgacaagattaaaaaagatgatgatgatgatgataaaagaaaagtcaaaaggattcttatggctgttctagtctcagtaggagttgccactttggtttgtgttgttggtctcatgtgggcttacaagaagtacagaacagatcaaaataagcacaaaagaaaaattactgtgtatggaaaaaaaggaggcagatccaagtgtatgagcttcaacaaatcagctagcaaggtgagcttaaatcctggtcttgatctcttttatcgtgattcattaggaaaagatctagagcaacaaccaccatatgagccttctccttatctaaagaaaatttctgaaactattgtcacatcatcaccaaatcaaagcagaccaaatgatactactacattgcctgagagagaggagtctgtccaagaatcagtgaaatctgaatttgagaacatcagtagttctagggaaattaagtcagtacatgaagatgcagattcaaccaaccaagaacataatagcctcacttcctcatctggggttaaagttgttcctatagaatatcattcctctgatgaagatgatgatgaatcttttcactcctttggagattcgaactcgtctaatgccattcgtctttccaatgcttcagtaggtagtttcagtgatgccttagagaatttcaacccaaatgagtggaacaaatctactttaatgtcccctcttgtgaacttatctcaaaactcttctccatatccggatttaaacacaccaagcaaagatgaatgtgacaaatcaccaactgcagcatccaactccataagtcaaaagagtttaagccctcctcctcccccaccaccaccacctctgcctcccccacgtgtaggttttctttctttttgctcaactagagctgagtctaaagcttcaagctcttccacattgccaaaccaatcatcttctaaagagccaaattccctttctgaaccaaacaaaactacaatgcaagttaatgagttggcttctccttctccacttaggaacccctcaaaaccaccaccaagctcacccggaattcctccgccaccatgccctcctccattgttcagagctagtaatgcattttccaagggcaccccacctcctccaccaccacaatttgatcagctttcggcattgggaaaagatggaacaccgcttccaaaattgaaacctcttcattgggacaaagtaagagctgcaccagatcgttccatggtgtgggacaagctgagatcaagttcatttgagtaagttatatcaagcgtgtttgttctaccatattatgtcgtattgtattatattgtatattattatattgaattgtattatatattgaattgtattgtatatcatacataaatatataatactttgatataaatcaaataaaatataatataaaacacaatttaatatatcatatattgtttcctatttagtttaaactttttttctcttctgtgaaatgtggaataggttggatgaggaaatgattgagtcacttttcggatacagtctacaaaactcattaaagaatgatgaagcaaagagcaaaactccttctccaagcaagcatgtgttggagccaaagagattacagaacataactatactctccaaagccatcagtgtgactggtgagcaagtatgtgaggcaatattacaaggtattcataaaattcttgattagatttctgatactatcatcaaacatacaagaatatgctgctttcatttgtagtgtacgtgtaaaaatgaaagtctaaccgaacactgttgaatatagcttaccccaagaaatgcatacagtaacataaatacacatatcactcatccaatccaatgcaagttttttttttatccataaccagtataatacttggttatcaatgaaatattagtttaactgaacgggagaaaaacacagggaatggcttgtcattacaacagctagaagcacttgtaaagatggcaccaacaaaagatgaagaagctaaactctccggctacgaaggagacatcactgaactggggtcagcagagaaatttgtgaaggccatacttaccataccttatgcctttcaaagagttgaagcaatgctttacagagaaacttttgaagacgaagtggttcacctcaaaaactcattttcaatgctagaggtaaccatgaatgaattaaaataaaaaatacacataataacataataatctcacaaaccttacagatttcgttgtcatttcactcaaatatattttaatactgtgttaggaagcatgcaaggaactcagatcaagcagacttttcttgaagttattagaagctgtgctcaaaacaggcaaccgtatgaacgtgggaaccattagaggaggtgccagagctttcaagctcgacgcactgctcaaactagccgacgttaaaggcaccgacggcaagaccactctgctccatttcgttgtccaggagattatcagattagaaggaatcagagtttcggatagcataatgggaagaattaaccaggcgaataaaaccagaacccctgaagagaaagaagaagattacaggagaatgggactagaactggtctctggccttagcacggagctttacaacgtgaagaaaacggctgccattgatttggatgttctcgccagctctgtctccaacctgtatgatgagatgtccaaactgagaaggcttattactaaggacttgagaatggatgagagaggtgggaacttcgtaaactccatgaattcgtttctgggttttgccgagaagaggcttaaggagctacagggagacgaagacagagttctgtctactgtcaaagaaattacagagtactttcatggtgatgtgagtaaagaagaagccaacccacttcggatatttgtgattgtgagagactttcttggcatgttggacaatgtatgtaaggagcttcgtagttcaaattcaaaagctcaccgtagtccgaaccctctgtctccgttcaaatagatggctttgcttctttcttttctttttttcttctttattgtgcgttttatgaatatgtaattctcatcattaatcaaccagaatgtaatctgattttgttttttgtgtaaagatttggatttttttcttaggttgaattgtttgtcaacttttagtagtctggtattttatttttgagctttcttaagtggagaaacaaatcttatgttgttgtaagttgtaaccaatgtaaaaagtgatctttaatgtttctttttttttttttttttctaagcaaaggaacaaaatttattaaaacacaaccaccgaactacaaagcaagctgccaagaacacaaaacactgaagtgttaatcaaaggcaaaacatagtttccctttcgctgagattagaaaaaaaaaacaactcttaactcttgacaatcaacttcatcgatttacttagcaccttagcttagcagagctacaaataaaattaaagatacatctatttctattacaccacatacaaatatataatagcagcaactatagttttcaaaacagcagccacaagggcctttaatgggttgctcacaccaagtcatccaagcctccggggccgaccttgagttaaaatggaacataggttaaaaaaaaaaattagactcttactataaagataaatggtatttttgaaaattatttaaaaaatatgtatattttttaaaatgtattttttttatttgggcccctaaaatgagtgggccctaagcacgggcctagcccgcctatgcctaaggtcggccctgcaagcctccatgtccacaagccaaatgaactgaccaaactaattttgcacatccagaatcaccattttcgtatatacacaatcaaagataacacgctgatcaattttgttagaggtcgcacaaaccagtgagctacgagaaaccaagtccataaattttctaagatgatcccttgtgagcaaatgattattaatcgcttgccaaacatgaagcagtgtttgggaacacaaagtctctgctaggtagatcgagaataaaaaactctatcacaagtaagaagagaaaggtaatatgttttaccttataatgcccttatctctcagcctccatcaaggaatgatgatcaatgtaatttctcaggttaagaagctttataaaataccagcaaaattcacttttaagagtaagactccaaaaatcttagtccttcaagtagacaacattaatccatctcacccaaagagagtcttgttttgtagagtgagctcaaatgtacttagccatgagatccatattccacttccttccctaaacccaagaccaacatactttttgggtaagcaaacatgctcccatgaagttagatgaactttgctacgatttcctttagcaccccaaagataatttctacaaagcttgttaatctaagtattattcgtgtttctgaacagacgacatgtggcgtaaaaggggagagatagtctcataatctcactaattaaaatcactcaataaaacccagtcgcgaaaaagtttcactgatccgggaacaagtctagatcgaggggtgtgcggaggtctacctcgtcttacttaagcttcccagacacggaagacatattaccactttggaacccaaagtggcccaaactcaaagtctgcctaaatgatcaccagacgggtactcaaaaggcctaccgcatacgatgtccacccaaaataatcgcagacgtctaccttggatgcaaagttagatcgcccagtgatgtcgcccaattagtta

SEQ ID NO: 14637 - DNA, 5597 bp, Cannabis sativa
tgatttttttatgcaatttaaattttattacattcttattcttactgccattcttattcctattcttatattttcattcctctcaatgaaagactaccttaattcatttcaaaactataacacgatttaatttaatttaataattactgtacaaaaataatttaatcattcataagtatcaccttataacagtgttgaaaattgttgctatctattaacaatgttcgcttcttaatgactatctaaattttattatttgaggaaattacactacatacatcttttaaattgatgactttaatttttacactctctttcaaaatctattatgtttacctcttttttcaattattctaccaattttacccctatcatttcacgatagtctctatttttctctaaacaaaattttgctccaactttcctacaaacctatatatctattttcaaagaacacaatctattatgtttgaaattctatcttaattatgtgagggtgtgaggataatttgagtacaatactcataaaaaggaggtatatttgaattaaattttaattggatatgaatttagttaatgtataaaaaaaaagtattcttcaatttttttttccttattattgggtaatagtagtacctaacacattttaaacgtgtcaccttgcatttagttaacaaaacttactaaaaattattacattaaattttatgaaactcgatacttaattgcactaataacgatattaacatataataagagactagacattactggtgccttttaacatttctcgtaaatatttaggttagaattagaagttgactttaattcaaaattttgttgaagccgttatgattcaaatgtgtaatcattcatttaataacaaagttttaagttgattttagtctaaaactaataatttatttattcattgatagcttttccaatttccctaggcgtgggtagcaaaggggccagggcccattagataggcccacataacggaccaatacgaaacgacgtcgtcagaatgcttttcttagctaagctaagagcgtcataacagttcaaattgaaaatgggcgggcgagtcttcttcttcttcttcttctttcttttatagtttctaatccaaaacccaaaaaacgagaaagaagaaacaaaaaaccccaaattcatggcgaaagaacgctccaatttccgattggaagcgaacgagaacgaattcgagaccgacagtgatgtcgggattcattttcctcctcctcgaacgcctctcaacaccattgccgatccagctcagtttcattcccgtcgacattcctattccgatagaaagatcgattacggcaatgcaactcctccaaggccgagtcgtgtagtttctggagctggagcaaaggtgaagactgcctctaaagctgcgctgttatcatcatcgttgtcttcttcttctacttcgtgtgaggtcgaattgccgcattttgagctacagcacgattctactttctgggccgatcataatgtacaggttctgattagaattcgacctttgagtaggttggagagtcacgctacttgtttgaggcaggaatcaccacacactttagtttggcttggtcatcctgaaactcgatttacattcgatcatgttgcttctcctactatctcacaggttattatacttctcttagctcaatcagttgttaacaggaaagtatttcatttgttactgtttcataacggtctgtttcatcttcctcctgtgtaggaaaccctctttcgggttgctggacttcccatggtggagaattgcttgtctggttacaatgcttgcatgtttgcttacggtcaggtaattgcatgaatgaataaatgaatgttcttgtttcaataatcttttctctctatctttatgtttttattgtatttgattcttttacagactggcagcggcaaaacctataccatgatgggagagatatcccagattcaagaaaacctcaatctagattctggtctaactccccgaattttcgaatatttgtttaagaggatttctgcggtaagatactcactttttcttttctttctcaattccttgacactttgtacatcttcctcttactcaaaaccaaattgccaatctatttgtaggaggaagaaagcagaagagaggaacagttgaagtacagctgcaaatgttcttttctcgagatatacaacgagcaaattactgatcttttggagccttcctcaactaatttgcatgtaatcaatgcttttccacttacctatatcattatcaggtgaacttgaactaatattttttttttatgtttgattgagacttattcatattttcttccttcttgtagctcagagaagacttgaacaaaggtgtatatgttgaaaatcttacagagtacgttgtcaggaacgttaatgatgtggtcaagcttttgctgcaggtttgacttttacaatgaagttaatttcatccaattcttactaaaagttacaacttacaagttttaatcttgtttaatgttttgtttagggtgctgcaaacagaaaagtggcagctacacgtatgaacagtgagagcagccgatcccacagtgttttcacttgtactattgagagtcgctggactaaggattccttggcccattttagattttccaggttgaatttagttgatctagctggttctgagaggtaagtttcttttatatgattgattaattctggtttgatttgtgtgtatgttttcccatgcttccaagtttgaccaacttgttaatctaggcagaaaagctctggagcagaaggtgatcgtttaaaggaagcagcaaatatcaacaaatctttatcaacccttgggtaactttaagttccattatgttctatgtcaacacattttcagtatctgtctcatgacaatacaaatcatttttcacttctttacttgatagaaacttttagcatatatagctttccttgtagaaatattctttggaaacagtgattatcagactaaacatgtatgaacattcctacagttctcatttaaaaaccaaacattgacgaagtcatttctatttatgcataaagaagctaatgcttaacgaatgacaattttttgcacggggtgctcagtttgattgacttttgtgtatgattgatcggtcataggattgaaactaattgtagtgactaaaatgattatatgttgtagtgactaaaatgattaatgttggcaattccgccccccttttactcagaaatttatctctcctttccattcctaatatactctcttgttggagttcatgagttagtgttttgattagctttcttaatcttttctttagcttggtgataatgtctctagtggatttagcacatgggaaacatagacatgttccctacagagattcaagacttacatttttacttcaggtaagagaaaagtaccgagacatgaaaatgcttataattttttctgctctttttccttttgataactcaaatacaataatttcaatggatgtaggactctctcggtggaaactcaaaaaccactattattgcaaatgtcagcccatctctatggtgtgaaatgattctgaaattctgcgctgttccaatttttattttgttcttcattaaatacaagtaatttttgttttcatgcagttcggttaatgaaacacttagcactctgaagtttgctcagcgtgccaaacttattcagaataatgtaagtactatgtgactgaaacaataccaaaccaagattcatcaactttgtgcctaccgattgattctacaattagctgatatacttaggatcttatagaaagtgttgtagaaaatatttattgtagaaactaatcattattctgtattgctgcaagatcttatttggtatttatttttgcttgattctggagaaatattccatattgttttgcctctctgtttatcgaagtgtaaacttactagtgacaaatgtacaaaattattgttcagtatttttaattttttataatcaaaagtcatagaaaaaacacataattattgtcgtttttactcattttctcccataggctaaagtaaacgaagatgcttcaggtgatgtaaatgcccttcagcggcaaatccaacagttaaaggtatgcgtgtgaaaaagcatgttcatgagaattttactgttatttcataatggcctggaattatggaatgtttttaaactataatagggtcaattgtcctttctaacgaagcacaactacattgcaaagtctttaccaagttctgtgccaagtgctcaagaatctaggttcagtgacttgtctgaggaacatgattctctaggtgataacacagagtccgagcatcaagtgtttcatcctgctcaaaacaaggtaatattagctctcacctttatacatttccttcaatcatacatactgaggacatgttcgctattagtactgacactcatagcagataaaaacattggaagctactttacttggggcgttaaggagagaaaaaatgtcagagactgcaatgcggaagttagaagatgaacttgaaaacatgaaatgtttggtacgtatctcatgccaaggacttaccatattcttatttttcagaagtttttgatcagtttgtatgttacactgtttgtcaacgttgtaaaagtggtttgctgttatggggttaatttgttgatactgcatctctttaggcacgccaaaaagaagaggatgctcaacacagcaaaactatgctaaagtttcgtgaagaagaaattaaacgtcttgaattgttgataaatggaaagttttctgctgaagagtatcttgtggaagaaaataaggttttaaaggaagagattcagctgcttcgagcaggaatgaacagaaacccagaatccacccagtattctgttgagaataatagacttcgagagcaattacaaacgtaatttctatgaatagtctacatatgctagaaattgtgctatttgttttttttttttctttctggatcattggatgctattgacaatttgcatcaattttcatgtcaggttccaaaacttttatgaacatggagagcgagaatcattgttaactgaaatgtcagaattacgcaatcaggtcatattcttttttttttctttcttcttccagtcatctttgatatgaaacattaaattaaattactttgaatttgcagcttcttggtttgctggaagaaaaggttccatcatgcagatatactaaaaatcaggttaaaaataactattctattggttgtgtagttatattttaaatttcagaggctaagagttgatattattattgaagaatgcaggatgaggatgcagcaaaggagttggaagattgcaggattatgaattccaaattaatgaggtactttttctttttcaatgtatgtatatattaaaaatacaattgcagtaatgcagatcacaattgactttcctaaataataatgatatcaatttttgggcaactatcatttgcctatttttagaattgattaatttagtttaa

SEQ ID NO: 14638 - DNA, 14163 bp, Cannabis sativa
  modified_base (4955)..(4973): a, c, t, g, unknown or other
  modified_base (7494)..(7496): a, c, t, g, unknown or other
  modified_base (11123)..(11125): a, c, t, g, unknown or other
ttgtgaacttgcacccaaactcttagagaattaaacacaatcggcccgtcgacactcggagtccaatcttgcaaagccaacgtataaccacgaacacaccaaggaccgtttgcaagagcccagttcctgtcattaccattatcaaacccaaacttgaaaacatttgaggtcttcacatcatccaccatggccacaacactaaccggctttttccaagttttagccacaaaatccaaaacagtagggatatccacaatcatgggagcaattactttcccgtacaaacacgatgaagctaacgccttaaccgaagaagggcacggagaaagcttgacagaggtttccatgcacgtaaagttctttcctttaagggaagagttggaggcaatgattggctccataaatacacacaaacagagaagtaaatggaccccaaagacacactacctacccaaatctcaccaactccaaataactgtaaaaaaggagaactttacacaagaaaaacactcaaccccacccaagtcaaactcagacaaacaaacacaagataaagaaacaaaagaagccaaagagatagactgaccacgcacgaacagagaaagaacaaagggaactaagcaagggccagcttaccaacacagaaacaagaagcgtgagacttaagggtgacacgaaagaaggacgactcaaagacgagagagagaaagtagatgaccatctctcctcgtcacaagttttagttttaaactttgataataccattttaattcaattagcagtacagaacaaaaattaactaggcatgacattattacattgttttttaccaagtcaaagaaggagagaagttggaagaagttcataagaggaattattgaacgttattgaaaattatatttctttggctgaatttaaggatcaaggctgtggagaattttgttcaagtttaacaaaatgagatggtgatgctctagtttttaaggtccttcgcctttcaattctcttgtaaatgctagagaaaactttattttgattgaaattcttctgtatactatctaaactaccccatcaatgagattcttttctttaatttgccaataagtcgtggtaattatataggattatgtttcaacaatgcataaaaaccagattgtttggtttcatggaagagcataactgctgtgatcatatcttgcatattatttatgaatgctttgattgattcatggtttgttatgtgcagttcgaagacgatgtttacttaccaacagatgaaccacatggatcaattgaagccagcctaagccgatactggtccaaactgtagtggcttaccctggtatgctggagtgcacactcgttcatcctcacttctgggaaatgaaattttcattttcttcaacactgtcgaacccaaaatgtaagtatagttaataaaagagatcacaaactcaacttgaataaacctggattacgtatcttggtaagttttatatgaacttgtaacatgtttgaattgtaatctagtgagtgttggtatgaacacatggagaatctgtttttgaagtgttgtaaaataaataatttgtttaaagtatttactagtgctgcatagaaacaataataatgtaatttgttgcaaaaaaaatatatatataaataaataaatctaagcagacttaacaacgagagtaaaatgtggtccaaagaagtttaaataggattacggcataattgacttgaacaaatgaaaatctcattctgattcaatttgcgcacaagtatgaagaaaacaattcctctcaaactccacaaacaagttctgcaagatacttgtaatccttgataagacttatcttcaagtttctaagacattctttcaatgtcatgaagaagaggaagatgtagagctgggtaaaatcatcttatctcatggacaaatactccccagtccccactatcccaaaacacactagaacaacggagttgcgcgtaattgttcttaagattatcatggctcataggcaaacattttgtccagaaataaaaactccaccattgctgcatttttactttcacgttgactccattctttacgttaacactgactcactgagcacagaatttcagcacagttgcatgatttctcctcagaactggataagttaagtaagtactatgggtgtatgcatcatggaaatatctcttaaaaagtagattactatgggtgcatgcatggaaagagtttttcatgtgacaataaccgcgatacaattaagaagagtttctcaagttcttcaaaattaacagaactaatcatcctgaaaagtattagtttgttcaatgtgccaaagtcatattgccacattgaacaaaaagaggaaggtgatgaaatttcataaagagattgttagttttggaggagttgcaaagaaaaaaaaaacataatagagctccttttcattaacgtagcagcacagaaacgtgagggcttcaactgtttcgtttgggcttaatgcccattattggtccaagcccaacaaaagatgtataactttctttctttgtttcttctttttcttgctgaatgtaaaagtaagcttaataaattaataataattatgaaatgatctccgtccctctgttccgctacgcactctctcgccatggattcgcaagaaaatcttcaacccattaacagaccagagcgacatcaaaatcccaattcaaagacttatcttttggtttcaatccttatactcttcgtagcaatctccttcacttttaccaaaaccgactactacaaaattcaactcctcagacataaattctcatcacactccaatattttccaagcttttctggagtttcttgctccaactcaaaagcccagaaaaacccaaactccaaaacccatttctaagcctccttactgtgtcctatggatggctcctttcctttcaggtggtgggtacagttcagaaagttggtcatatatcttggcccttcatgaaaatgtaaaaagcccactttttagattggccattgagcatcatggtgatctagaatcattggatttttgggagggtttaccagtttctaccaaaaacttggcagttgagcttcaccaaactgaatgtactatgagtaaaactgttgtgatttgtcacagtgagcctggtgcttggtaccctccattgtttgaaactatgccgtgcccaccaggtgcttaccaaaatttcaaggctgtgattggtaggaccatgtttgagactgacagggtgaacgctgaacatgtcaatagatgtaacaaaatggattatgtttgggtgcctacggaatttcatgtatcaacatttatagaaagtggggttgatccatctaaagttgtgaagattgttcaacctattgatgtgaagttctttgatccacttgcgtataagcctttaaatctagattctacagggcatttggttttaggagcaagaaccaatagtttgaattcaaagtttgttcttttgagtgtctttaagtgggagtataggaaaggatgggatgtgttgttgaagtcatatttggaggagttttctggcgctgatggtgttagtttgtatcttttaacaaatccatatcactctgatggagattttgggaataagatagtggactttgttgagaactctgatataacaaaaccagttactggttgggctcctatatatgtcatagacaaccacatagctcaaactgatttgcctcggctatacaaggcagccgacgcctttgttcttccatcaagaggagaagggtggggaagacccattgtggaagccatggcaatgtccttgccagtaatagctaccaattggtccgggccaactgagtttttgacagaagaaaatagctatccattggcatttgatagaatgaatgaagtaactgagggaccttttagagggcacctttgggcagaaccttctgttagtgagcttcgtgttttgatgaggcatgtgatgaacaacatggatgaagccaaggcaagaggcaaaaaagcaagggaagacatgattagaaggttctccccagagattgttgccaatatccttgctgatgctatacaaaatatacttgagaagtccaatgattagccccattttttctttattattttatgttttcatttgtgagacactcctctaaaagacctacacaaagtaatgccacctttttatgaaatgcatctgtgaatttaccaaagctttctatgaaatgtgggtttattaatctgcattagctttcttctgagttctgagaagctagctgtgccttgtgattatgtacttctcatcttagaggtagagagaggtaaaaatatatgtactcatagtttcatactagtcacgtaatatagtggaaccgttgagcaaagaaatcctcaatttgcctcttgactgttggtaaactccagattgaaagctccttgaagttgaactacaattaaaaatcactcataccatacaacgttaattatgctaatatgactgacaattttgataaaaatttgattatgagaaacattccctactgataagtcgttattaaatcctcatcaattacaacttcatcttggtttgtgacttcataagcttggacgcaaattgatttgacaaaattgtaaaccctcatgtttgctactggttgaatttggcattttaacatggaaaattatctttgttttataaatgataatgatatgatacatcaagttataatttacaaaatcatgaaaataaaatcacaatgtgacattaggctgatggtttgattgaccaaattgataaactgatgaacataatcagattgataaatcatattatttataaactggtgagatacaatcaaaacccaaatgatatttccataaaagcctctataatatatatatatatatnnnnnnnnnnnnnnnnnnnaaaaaaaaaaataaaaaaactgcaactctttttagaaatagagatatggaattcagggcatatagaacagcaagaagagaggaacaccatcagatattcagtaagatgaacgatcataatgtgctaaagttgcaagagaaattattgctatgtcaaacagatatatattcagtaagatgaacgatcataatccttaacattaggtttcaaggttactgaagatatggtgcgaaaaatgctagaacttctttataaacaggcttcttaaaatcaacagcctgcacagattattggagaggaaaagcaaaaatgtagtcaaatataagaagtgtgtaaataaaaaatcttttgaacttacgataaagtatactcaccaggtcaattgtttgttctgctgacaaccatgaccactcaccaaactcagctttctcagttccatcccccaagagattgatttcttcatcctttccagtaaatttaaacagaaaccttttttttttttgacaatgcgaacaaaataaattagagctagcttagtatcatttatttcttctttaaattaacacaacaatttttcttttgacaatctagagtaacaaatactaaagttaagatgaccataaaacatacataacatgtatattcgaaacacaacaattagttattgtatcttgatggcagtgacaagtgagaaaggcataaaatagactaggaaccagaatgtttttcctatttttgcaagaacaaaaggcttattttcaagagtatacagttgtttgtaacataagagcaggagtgcacatgcatatatttatcatcgaatgcaagtgctggagataaaattgataaaatggttggtgtgtggcaatagttcagaagcgataaccaggtctcattttgtcctgaaacaatgaattaactaaatgaaagctgatgtcctggctgcagcctacaaagcatgcaatgcatcgaactacgtagatgaaaaagagtcataaattcaaatcttatactaaccacttctgtgcctggcctttccaatctcctccccactgatgcctaagtttttccctgacttttggtgggaagtcataagtcaaccaatgaggtacctaaataatatagtcattataataacaagaacgttgttaatcatataataaggcagcatgagcaccactcccgatctttttgcctggtagaagcatgctaagaacagaatataagccaatgcataaacagcagagaggatgtatagaagcctaacttataaacatagaggaagtacagaagcctatcctaaattttcacacattattaaacttgaaatcttaaatgcgaacaactaagctaatctatattatataacttttctttggaccttcatctcaatcttatcatagagtttagtaactataacgtttgaatgcaataactatgcaaacagcaaaatgatcagcgctctacttctttatccaacaaccaaatttaataagtttatcacaaaaatagactggtgttttatgaccaaacatgatactttcttcagtcttgaacagaaatgctatcttaattcttaaagaaaatgtctagagcactaaggcatcgtactcaacagtatacgagttgtacctctgcaaggatttcagcagaactcactcctgtctcttctcttaattcccttatggctgcacttctgggatcctcaccctcatcaacacccccctttcaaacacaagagaaacaaatattatattattcaacactgattcagagatattataaagatagtactcaatgtttgagtttgaacaatgtgataatttcattcatctctttcagaaatatcaggatccccaagttttagttatctagagatagaaagagatgaatggagtaaaaatagctcacttcatcctagatcttccatttaaaaaaaaaaaaacaccagtcttatactttccctgtgtacaaactcatatgatggttgtttccatatgaattgagttaatatcaaaagctcatatatactacaatgaaattgaagtaattcacaattttccactgccaaaccatcaagttcatatctgtttatacttgtactctacttcctgtgtaccttacaatgtttgggaagagtgaactaacaaaattaaattcgttttgacatagtaatttaatcatatgttcttcaaagaatcattatcgcacttgaaacaaaacttaaacaaagggtttttgtctatgaaagctttccctacaaagaaacgagagaataaacggaaaatgggcaagagcttaaattatcaactaaaatgttttatcccaaataattcaagcaataacgctgcaaatttctttctttattcaagcaatccattcctataattacctgaggcatttgccatgaatctggtatatctaaccttgatgcagcaaaaatctgttagaaaaatggaaagaaagaaagaagaaaatcaaattttacctacacaaatataaacacacacatatatatatnnntatatatatatatatatatcgtatgtgcgaaatacgtagcatggataaataaaagacagaacctttttggaatcgttgatgaggcatataccgacgtttcttctgtaaccttcaggaggagcttccatggcgggagatgatgaggaggaaaaggaggattggggtgtagtaatagatgaagagaggagtgggaaaggtgataaaataggggatttaagagggtagctgaggaaaggtgaaggcgtaggaagtcggagaagagttgaggaagaggaaatgggatgataatggtgatgatgatggtggtgaagaagatgaagtggagaacttagacttgcacagaccgatcggcttaaacccattccattcaatcacttcaattcattcttttcctcccaaaacactcattttttccattaattttctatgcattaacaaattctagaaaacataataatttgagagtagaattataatttaataattttgaaataagaattgcactaaataagttatttaatggagatacactaacaattggaaaatatctttctatttttttggatagggaaaaatattaggaaacttcattaacttattattatttcttttaatatttaggcaatgtttgattcattggaatcttaatggtaatagtaataaatagatccatacattttttttcttttgaattataatataataagtattgtaatgataattatataccaaaactaatgtaatctttattacaattacattctattataaaaaatatataatattttaataaaaatataataataaaagttaaaaaatctatatcatattttttattattttataattataaaataaattaatatagttactttagtcaatacaaattttattctattacattcttataccaagctaaacataataattttaattacatgtttattctaactacaaactaaatattgtaatcaattctaattaccatttttattccattgctattatcattaccacttcattacaccaaaccatatatcaccttaattgcattgtagatacatgtctttaacttttgttattattagacactaacgtcaccttaccttattgtggtgttaggtaccttaaagtaccgaatagaccttttaatatttctatcaagatgcatattgactattattgctcatcaattttggataaattgatcacaagttgctctttttgatacactattctaaattacaaattactcttttagctctactgctttagaatttaatactcattttttatcattgtaataaaaaatttgagagtgtttggagggaaggaaaatcaaaataaaaattgcaaaattcaagaaaggcaaaacaaaaacctaagaaaatattattaacaaacacaaatgaaaattttattataagtaggaaaacattaatagctctgataccaaagtgtgtatgtatatggtttaaaaagtataatggagtgaaatgtatggtaaaaaagtataaagttccatcttaaaattgagtgagtaaatcatattcttacaaaatatgagatacactacacacttatgtaaaaccagtgacgagcacactctaggggttatagccccagtaaaaaaaaatgcattaaaaaagttaaatattttttttcttttgataattatagcacaaaaaattaaaaaaaaatccttacaaaattaaataaggtagacctaatttttttaaaataacaattaagctctcacataatgaaaatctaagtccgtcactgtgtacaacatataagtattacattcaacttttaatattttaaaataatgtaaattattttaggaatgaaatccgtatgacatttattattttagaaaagtgaagaaataatatagtatggagtatattctcgtgaaataatatttataaaatgtatcttttaaaagatttatttaagaaaaaaaaaatcaagtcctaacaaacatacttaaaatgttttttttttcttcaaagcataaggtaatattgacatacctaccaactaatctttttaatttcttcaatcaattataaattgacccaatatgtggttatcagtgtttctctctactcattaagaaatgattaaaatttatatcggttacaaaaaatatattgttatatagtagaattcagtgtatacttagcttcatattcttcttgtgtgtaccaatactaaaattctttctctgtttttatagttttctcattttgagtggtttaaatctcatgacagatattcctcaaaatctagaagatggggagctatggcttccttctgatgtgttcgatgaaattgtgtcatcaaatgatattagggctaatctatcccctaaaattcacaacaatggtcctagtgaaatcactcatgtccctaatattcaacctctcccatcatcaagctcaattctcaaatcaaattcatccacaccaaaatactctaaggtaatatttattttactttgtatattctcgtaatcattgtttatgatcttgtataatttttagtttttttttttttccgcaaataagatatgtatagcataataaataatacaagatgataataaaatacattatgaactataaaagacgataatatatattgatatccgacttttcaataattacgcgttttcaagtctcttattgttattttattttttccaatctatttatttgttaattagggattttacattttgaaagataaggtgtttaagatttgtcctaaaaaaaaaaaaaaaatttgacttgtaagaacaaggtagcactatatgctggcggcgcataaccctagttgattttttattaatctcccgttaataagttgctcatgattatgaatttttatttttaatttttatatttgttttatgaattttaatgaatggaaaatgattcacttcaacattttgtttttaccggattgatttatcattagtggaagaccaattttctgtaaatctagatctattcaattacccctttcttttcttctttattttccataacaaaatatcatatataccccttatttttacattatttattgaaaaaaaaaaatgatttacacttcataaaattttaagtacactcaaatatctttttttttaaaaaattataagtatacctaaatatttaaaaattactcttaaatatttttaatgtttttttacattatttatattaatatgaatacttattttaatttgtattttcataatttatcttaaatcatgtataatttttatacaataaaagtttatataatttttattttaatttatttgttataatatttaaaataaattttatttttatcccataaatatatttttttaaaagaaaaaagataaataaaataataatataaattaaagatatatattttatatagaggtaaatactatttttgatcctgtattttgcaaaagttattaattagaccatttattttgttaaatgacaaatggaccctatattttccaaaatggtacaaataagatcctgaattgattttttgtcaaaatgaaatttaattataatccgatctaaaaatgttatgacaaaactgtttacnnnttctgtatctgttcgtattaggaattgtcttcaagttggttttattaaaaaaaaaaaagttgtcaaaaattaagctcagtgtcctatttttactattttggaaaatacatgatgtattttatcatttaacaaaacagagggtccaatcggtaatttttacaaaatgcagggcccaaaatagtatttatcctttatataaaataaaaattaatatttttataagtttttatttatttattttttaaatctcaccaaacataacatttatccaattaccaaaattctattatggggttatagcttggtagttactaagtgtaaattttttataaattttttgggtacaaataaattttccacttaatatttatgaaaacaagaggcatatctagtattttttttttttaaagaaaaatgggcatcttaaggtgtcaaatattataataggtgacatattgttattgatgcaatttaatatcgagtctcactcatcttaatttaataaataatataaaaaaatcgctaatcacttgtaacgcatcagatcggtgtggtattgagctttcttttaatcatagtatatttacaaaagataattgtagaagttcctaaaaaaaggataatttcaaaagacacaaaaacaacaaaaaaaattacaaaaatatgatctgtatgagatttttaacattttttttacggttatttagattttatttacataaaatacagttttttttatgttgtactcttgttattttgttgttgattgtttactatttgtatattgtttttttttatgttattttcttgttatttttatgtaattttttttattattttcttgtatttttatagaatatcgtaaaaaatatatatataaaaaaaattaaacctaaaaacataattttctcatgtaaaaattggtgtttgatataattgttgattttttattttttaaggaaaaatgataagttggtagatttgctatatatctaatctagctataaaaacaactaattttatgcataaagagctaatttaataaatataatttattagttaaatttgttgcggttgttgattggttaatatggttataggaaaattgtaatggtttggatggtgagtctgcaggagcaacaagttgtggggctgctcctttgggacaacccaaaacagttgctcctcgcaaattccaacccaaaacaattgctcctcgcaaatgggttgctcctttccaacacttccagcctccccaaccagttgcttcagtctgttacattcagtcttgggttttttttgctcctttcccatacttccaaaatcccaattttcccaacaatggaagcccaatgctgcagcaacaaccttttccaatccaggtaaaatcaaaactccttagttatttgtgaaaatatagatatgcaatttatatatttaagtgtggggatgaatactttaataaataattatttgcagtggcccagctatcctggaatgatgtctaataattttgatataatacaatattttgggactggggtgtattttcctttctctcatgctgctgttgcttatccacctacttacaacaactcaccaccaccaccacccccatcaggtaaaccatcatttaaaactctttacaaattactaattaattgtttttttttttgagcaaaattaattagttattttgattgaattatatatgtccacaatcaatgtactcaactcaatcatcatatgtggagtaactcactattttttttgtttgatcatgttctaattctgttttgacattatcatctgcactattattttctgaccacaaatttattatactattaaaattcttaaatcactttggtttagggaagtttaaacaaaaataattttcttctttctaattattgggattttgttttgtttgttatttttaggtggaaaaaccaataaacgaaaccggaagaaaaatgtcaacaataattcagtggatggaaagggaaagaacccagcttagatatgaaatgtgtttgctcaaggattaatcatacttatgattttaatccaaattaattaataaaaataaaagaggcaacctttgatgttgcaaataattgtatctccattaagggtaggagaactactataataaataaatcaaacttatttgagagaatgttttattattatgttaatgtcttttgttttacatatttttaatatctaagtatgtaggtaatcaaattggacgagcatctccaacaccatagatgatcactattggagactctaaacaataaattttcgtttctaatttctacttgggcacaatatcttctagttagattttagaaagaaataaaaaattgtgcattttttttttaaagggactaggacaaatagcaacaaccaacaagtacataaaaaaattaaacacgattatgatttttcatggtttgaattttttgtcaatatattggatcgtgtaatttgattgatttttcaccataataatatctagcactatatatagttcttagggcttctccaaggaaccatcaaaacactatatttagtgtgagattttctccaagaacacggcatctacggctgcatattaccgtttgtactacagtgcacggcatatatgcagcacactgtatttttttttatatatttaataattatatatatattattatttatttttataaaattacaatatatttttttaaagtagtgcattgatatactcttacttgttttggatccggaatttttttagtttattttttttttatgatcatgtacattataattatttaagacatccggtatgttattgaaaaattcgaaaaaatttaacatgccgaaaagaagattcaaactgtatgttatatgtttgacttttttatttaggagggtatattataaaagtatattttaatttattgtgtgtaaatttaaatgtgaataccataaattaattttatagtaataaaaataatttttcaatttaaaagtgatgcact

SEQ ID NO: 14639 - DNA, 8602 bp, Cannabis sativa
ggatccaaagaagaaaacaaacagtgaatgaaactgttgctacagatgtcaaaaggaacaaaggaacatatttaaaaaacacactgtactgctttaaattcttgtactaagttttgaaaaaaatcacattatattaaactaaatagacagaaggaaaaccttaagtttaaaatgaaaatcttgaccaaccacaagaaaaggctaaagttcaaattacatatcacaaatactcttgtgtaaaatcaaataagaaattaagatccagcaataatcaatttattacttgtaatttcgataagaatatattattaaattcagaatcgcagaaatatgttcctagcactaagacaaacaattataaagtataaacctgaccctgaaatcaatgatacctaattaaactacaaaaaagaataacttatgttctaagctaaataaaatttcaaaaataaattatgcaaattaaattcaaattttctgaagaaaaaaaaatgaaaagcgttgatagaacaaactcaaactcaaactcaatgaaacagttcaagcctcaacttcaataagcacaatgatctggtcaaacaaacaaacaacaaatcaaaacctcagccaccaccttaccagtaaattcttaaccaaaccaacatttccagcatgaacagcaagaaacagagcagtgacatcagttctaaactcctcgtaatcgacgcgtacttcactcgccgattcatcttgcaaaaccacctcagtcttccttgtcttgaggcacacagcgtctacgaagttgacatcgagaaacggatcagcgatacagtcgagtgccgatttcagatcgccagataacgaagcttcgagaaggcgtttagatacctctgcctcgtagtccacaggaaacacctgcttactgccggagaagaccgtcattttccggcgcgatgaaatatggagctcgacaatagctctctctctcttcgcctgaagaagaagaagaagaagaagaagaagaagaagactagaagagcatacgtttctctcactaagattgagtctctctttctctctcttatatatatattatatatgtattatatctatatttctctctctttcgttttgaaacggccgcaaagctcgagagaagaagaagagaaaaaagagaagttgaaataagtgagcgccagagacagagggagggaacgaaggttgcaaatttatcgggatggtttaacttgggtttaccgcagtaaataaaaaataacacagtaaatactgacctcgaatattaaaatctataaaataataaagacaaattgcaaattgcaaatttgtcctcaattattgcacttatttaatttcgttccctattttgggaaatatttaaatacaaataaagtatgcagaagaaaaaaattaaaaatatgatagacataattaaccatttaatacttataattacaaaaatacaaattaaaaactaatatttaatcagatattaaaagataaatttatttatttttaattaatagttacgatatctactcaactttaaaattaataactatcgagatgaagagaacactataaagattggattagatttttttttcttaattttggtaaacacactcgtagcatattttgatgtaggtcggcacaaaattgtggtgcgggtggcgaaaattgaagtctggtgttttatttttatcggtttattagagttttagttgaaagtatgtttagaatcgattttctttcttacttttataattggcttagttagcttatttttgttaattttattttatgatgtgtttatgtcatagattatattcaattttcttattaatataaaattttatttaattactttgaataaatattatttttccatatcattatatataaaaaaaaaaattgctatataatatgtcatctacatccctaaattttagagtaacttaaaattagatcaataattcattaaaattgaaaaatattattattattattagtgtaattaagtattaaatcttatataatttatgaaaataatgtttaaaaataatactaactaattatttagtaccactcataaaaaaaatcttagacaccactaataatacacataattcatgtagttgaagggggtgtatgtaataaagaataaaacaaaaagcaaaactagacaaatataataattgagggaaaattttgtcaattgccttaatattaaatttaattttagcaaaaacattatttaaagaatgtagggtccactcttttactgtaaaaatgtttggttatggcttcactgtggtagtagcaagtggatgagcggcaatgctggctcggctcgatttgaatttttatttatttattttttttatttttttttttaaattaggaaaagagtttggtgggaccagatgagattttggctgggtttgaatcgtgcagtacatgtcgtatggtataacagttctttgattagatgggggtaatatcaaatcatgaccgttaatacttattcgtaaccgaaaatcacaaccgtcaaacagtgagtggggtcagcacactctctaaataactctagacaatcgctgaagttaatgctgacagcttttctaaatgttatgtatctaaaaaatattagtgtcagcgtgttgaatttagcacctaatccttggattgttctataataatatcattctaattggatattatattccactactaaaaaaataaataaatatgttattcaattttatctcaaaaacattagcaaaatccaaattttgatactatattaatataatattatagaaattttgttgaaaaagataatattgtataatttttgttttgtttcattgattaatctttaagaaatcaattttaaagattgaaaaataaaaagtaatgtgcttttttttttttgaacaaaacattgtttttttttttaaaaaaaaaaacattgtttgtgcttgttattattattttatcaaatatcgttataatgtattaatagtatctagcaataattaaaagtatcgtcttgcaattaattggatttaaatatcttctctcttaattttttttttcaataacttcccttttattaatttgcaaacaaaatggtttaaggattcattttaatgataaaacttttcagctcttttaaaggaaaataattaattaagaaataaaattcataaccgtactaaatatcagcgggctattaatccactgatattaatgattaatagtaagcttttattatcaacaagctctcttggtaatacttttaccaactgaatcttatatatttaggggggttgtttagcccataataatgatatttgttatagtcatcctacattgaatgaatgcatattttttacactaaaaaaatttccttctttaaattacaatatttatgagagcaagtattttagggtgtgatatagcgatttcgtttggtgcataacaaaatcgtataaataggttgttttattccaaagatgtcgtcaatggtgaacttaggactaagttttagggtgagcataattttctttttacgtataaaatactaaaaaatacgggtgtaaatacatgtgtatcgtgctaatccgacccatttttcgagatttttaaaatattggtcgtgttgtgtcgggccataaaagaatataggacatcttgtggtgtcccataaaaaaatatacttcgtgtcgtgttgtgcaataatttcataaggtagacccgacacagttcgcacacccttagtttcgtcctatgctttggaattgtgacgtactttattgttatattattttatataatataatgtttagattaaataattaagtgtggcaaattattaattttgtcaaattgtaacatatattatggagttacaaaatgtgtgtagaagattacaaaatcctttaaattattattcacttgaatatgtaactcacttcttttcacacttaaattagtaaaagatattactattatttatgaatgtgaatgaataatagctgttgaaaatataactattggagacttaatttattcatttataaggtgtataaacagtttaaaattatgtgggagtgatttgaaacactttagaaaataattgactaaagctaaaaaaaaaatggtaactagtagctagttactgtttttttagcatacaagtgcatatatttttaaaagtttgagagcctttttaacagcttaaaactccttcaaatcactcaattaataccataaatgctcaatttatgattgataacctccaatggctttatggtggtcaatattattcatgttcatatgtggagtgaaaactctataaatagatgtcatattaattgttcacttgtgagagatgtaggtaaaattatttgttgtggttagaacttcgtgaggatatgctcacccttagacactaggctgagcatatgaggcttgataaatcctttaaagtatttctaaaatatccttaagtgtccatatgagggaggaaatgacttttaagacaaaaatccttgagccttgatcaagcttattgtgtgttattcttattcttctctagatttcttgtaatcttgaagcaatatttttatttatattttgagtattttaattgtaatctttctattccctcttataatgagaacattttcccatatttatttgggctgatttattttttaaactagaccaacctgttttttcttaaattcatgctctatatttttataattttgtatttttattaaatttggtgagttaattactaaaaaaatatgtgttttatagttttaattatttttacatcttttttcaataataattacacactatcatataaaaagtagttgtaattattagaatttgaacaatattatcattttaattgataaataaatatttatcattgttattattattaaattattagactttttaatgtggtgtgctttcgagctaatctatttgtatttatatggcacgttttcagacttgttgtgctaatttatattgtatcgcattgtgtttaagcccatattatttttgtattatcatacttaagtacatattttttcttgatatatttgattagtttgaaattttttagggtggatatttgattaatttttcttttttatttagttacaaagtgtgatatatgttctttgtttagcattgactttagctaatcttgggcctatgttgagtttgcctatggacatcgtgtactctttgggaacacacttgtaaaatgtcttaaagaaagcgatatagtgtgcgactcaaccgaaattattaatcaataaactcgttgcaatttatcttttggatttcacataaattctaaatttattcaatttatcttccttcccaccaaatatatcctttaaaaattctatttaatacttatatgatacataccactgacgtggtggttgcgtacacgtatccgtagctatagtctcatggaaaagcaaagaggctcttaaacacactacacacacaccaaaaaaataagaacagtactgatgtggaatactactgatcaatacttactctcactaatcacatatctgaacatctttccaccattgatctcacggaataagagacactacataatccaacggttaaaaattcaaaaggacactcaccattgatctcagggactaacaaacagtacataatccaacggttaaaaattcaaaaggacagtcagagatctttaattttttcaggcctaattaaaaaaatcttcttctccttcttttttctccagtcttttctggtctcagcgattcatactatacagtcaatatacgagtattactcgacaagcaaccgcttctgtcattaacagtttgctttagtcaactttttgacccaagaaaacaaaataaaagcttcctttgcttgtcactgcatacgtggcaattctctcttcttacgagggacactcaaaacggtacagtttcaattatatcatggaaaacgacaagtcgaaatgaagaagacggtggatatttcttaattaattattaatttattttttagataatattcgtgtcgattgatagtttgccaatatcagattcagatttaaacaataaaaatactacggtggtgtacgaattagagtatcgcagaagatcttgccacgtggcaggcaagccgagtttatttagccgccgccgtataatattagtaataatatatcattggcgtagctaagtcaagtcgactcggtctcccacgtggcaacttgttggattttggcacacgtgggggagcaagaggaaaattcattttggcatctagcctccctgccatactacggttttttttttttaatttaaatttatttttaaagatgttaggagaggactactttatttttctattcactgcacgcacaaaatttaatatgggcctaactaaaatgacaagacggtgatgaaatgaaatatctcacaacttttttttatatatatactcaaaaataagcacgttttacttcatttaggaagtgagagaagacatgactgtcaattatggacagagtaggagtaggaggactatgcaatgcaggtgaccatataatataataaaacaaaaacaaatattttgcttagaatcttatatagctagcttcatctttctctctccctagctagctttatagagattataatttcactaaattttaaggttttaatttggctttaaaagcaagagaagagatgcttcccactaacaatgtcctagggaatgatgatgatggcagttgataaacaacaagttagaacttaagttagatctttatctttttttgtcctatgttaagattcaactattagtatttagtagttagcacagtccaaatcaaatctagtattataaaagaaagagttttttttttgaatttactacttgttttattaaataaataattatatatatagagagagagaatagaatgggagaagggtatgagtgtctccaattatgcaacaatttgagccgtgtgattcgatctataatcgaaagcattaaattaaatgatatttttgtgaagaaaattggatatataatagcatagatccggtttacgagcaagaatttttatcagtttgtgaaaggaaaaggcagaagagtactacgagtactatagtacttgttataactatagacataatgaagtagatgagtatggctgtacacgtgatgcaaaattcttataggtaagagtttcttatgttatgtacccttagtaccttagtgtctttatttagtttattaatatattttctactgattttttttatagttgttatagtgatggtttatgtgaaacctctttaatgcaattgtataaggaattttgacttttggtagacctaaatcaaatcaaatcttatggtatatatagtttcctcgaaggttcatatgtatggatgtatgatgtatagaatatgtatttacttctatatcattaaatctcgtactgctattcttgttattcggtgttgccactacgcaatgttttctttaaaaataaatgaaatcttattgattgttaagagcattgacggagggtgccatgcatggctctccaaatttttattattttttaaaattacatgtaaaaattaatttaaaattaagagtaaataattttattttacatgtgttggttggctttgctattgatcgaaaggcaaaacttctcaaaaaaaaaagtgtgttgagtttattgacatattgaaagatgaaagatgaaagatcaaagagagaaagaagagaatgaaaggcagtaaaagattgaatcaaagaacagtcattcattacattcatctgttacactcggttgtaataatttgagcaactaacaattagtaaactaacataaaactcttaactaactttaactgtcttaatatattctccctcaatcttataattgaagcatcttcaattgtgagattggttttgaaactacaaatcgatcacttgagattgccttagtaagtccatctggtagttgatcaaaggaaggatcgtgctttacatcaatgagaccctgctgaactttttctctaacatagtagaaatctaactcagtgtgcttggttcgggcacgtaaaatagggttttgagtgagcataacagtgctcaaattgtcacaccacaccacatgtgtcctgggcaaacagaggtgcaattcaaagaacatggattgcaaccatgagatttcagtaacagtacttgctagactcctatactttgcttcagttttggatcttgacactgtatgttgtttttttactttgctaggtgatcaaattggagcctagaaagactacaaaatcagatgtacttctcttgtcatcaatgtccgcaacccaacctgcattacagaaagctttaagatcaagtgatgcagattgttttaggtgcaagccatgattctgtgtaccacactaacatatctcaagatgcgtttgattgccagctaatgactttaaagtgaattatgcatgaattgacacactttatttac

SEQ ID NO: 14640 - DNA, 6085 bp, Cannabis sativa
agaggtatttttcaatatacccccaaaaaaattctattttttctagggcccaagaaaactcatgatggacccagactagctgatttgaattagcaccattaattagttacaaaattataaaattatgatagcctttgattatctctttatggaaaatttattttgccaaatgtatggagcgcataatatacaataaaagttatctttgtatgagaagttaattaataagttaaaatcatattttgatattttatagattgcactccaatttatatatgaggcatgcatgttatatatatattgatacatatatgcatgatgttgcatgtgtagtggatatatgcataatatataagatgatatatatacatataataatataattaaagagtttttgttatggttcaagttcatatatgaaactgaattaaaattcgaatttatattatcaatatcatcagacgcggtttctatatatatccttataataacatacgtaaataaagtgtatataattattacttaaggaacaatatttaagatgctacgtacgtagaaaagcctcatcaaatcaatttatatataagtatataattgaattttaattacccttataaattataatccatatatatatagtccattcataagaatattatctttgactaagactgtactgtagcatattggaagccatataatgatataaaaaatgtgtatgtacacttgtcaaataattaataatatacaatatcatcaaataataagatatagaattttctgtttttgtattattaatgcgcatgcatacatttatatataggtcttctctctatattctcatctcaatgattaaagcataataatattattatatgcctttttattaacttttttcttctcataattaatcacatatatataattattacaaaacaatgcaatgttaagtttcgaagggtgtgatataatatttttatattttataatattcttttgtcgcgtggttagtttttgtgaaattttatctcaaaattaattgataaaactagagtgaagtagtccatgttcttatatatgattcaatatttttatatttgatccatgtaggataatattgtccaatagtctccattcacctcgattagggttcgacgaccattctcagagtttgggagtgactctagtcggggttactgatatacacagatgggttctttcccttgcactactgttttgctcaacaacgagatgtgcttttggtttcctctccttggcgatcttcttctcaagccgttggaatcgtcaaggttgtggtgtttctagggctttggttctgctaaagccacaataaaaaaaaataaataggatatgctttcatctgcttgattacatagaaaacatttaacatctgatataatattgaatcacatcaatctgtccttagtttgtaactagtctacatgaaaaatcgatgctttggaattagaaatctcccccaaacttctccatgccagctattgcattcataagatggtgaaaggagagtagagtagttgaacaccataaactagagaaactttcttctttcacttggactatttgacgccactaccaactgtataagttgtttacagatctttattgaccatttattatgtgttctatgctttctggaatgagtattataacacgcagggttggtcttaggcataggtggactaggtctgcgtttaggccctactgattttatgggcccaaataaaaaaaaatactttttaaaaattatacatattttttttaataatttttaaaaatactatttatttttaaagtaagggctcaattttttttttttgtttatagtctatttcaacttagagctagccctaataacatggttggtcgtgttatttctcttatttatgatttaaataatgagattactatatatgtcctaatttttattggaagatcattgattgatgattgtcattagtaggtgaattctgttagatgctcatttggtttggaagcctaatatatacttcacacctctttgatgctcgacaacttgtggcttattgaatctttaagctgttgttagtgttttttttcttcatgtttttgttcttttaatttattttcatgtaatgaattttgtcaaatttacctattattcatcaatagatatttttattttctctaaataataataataatgtatattatagataaatacgtacgagattattacttagtttgatgatatatattccacttttatattttgaactgtgtattcattattctattcataatagcatatttggtctttttttaattaaataataaacaattataatttagtgatatcatatgtgcgtttagcacctaattattgttattccttaaaattgatatatatgaagaatatttatacattaattcaaatgttcataaaactaaaggaagttacacctcaaattatttgtcctacctatatataatatactacaaattcaattctatattttcgatttaaaatctttattttgtggttgcaattaaaaagagaaaaaaataattatatatttatttatatataatatacaacttaacaaattattcacttcagttgtgctatatataatatatcatagatgccgaacatatacgaagcatataaggtgacgtcataattataaattgaagaaaatattaattaatacatagagatttttattttttcttgaaataataaataaatatcctatatatataaataaatataatgaccgctcattatataatttctagatatattaagtagtcatgtgattagaatcttgctggtcttgacatatagtttattataaactctacactaaattccatgcatatatactactttgctgatgatgtttatatatataatataaaaatttatagcaaaatctctttatattttaatttttatacacttaatatttttattatttttttagtgacaaaatcttttgcaaatttaaagtttcagttagatgttaccttaaatactaactggattactgctgtattgacttcgaggttttaatgttacatacacacatatgtataccgtagtcatttagtggataattaactagcgtgccaaatttgtaaaaaaaaaataaattgaaggaaattttgccacaaaaaaaaataagagaataaagtgtataaaaattaaaacaaaaaaaatttcgcttcaaattactatataatatatattaacattttattattcaagatcatgtgtttcaaccttcaattctaatacttcttcttcttattattattttttttaaaaaaaataccatacaccaatagaatgtttcagtttgacgttagaaatttttttttagcctttattataagaatagatagcattttaaaaattattaatgaaatatgtgtattttttaaaataatttttctttcagtacggacccaatccgctttaatttaggaccgatttataaaaatcccacaaaaattaaaaataataatgcatgtaaaagaaaaaattacaattctcatgaaattttttcactcaagtcatgatatccgattaatataaaaacacatgtgtttgattatcttcatttataaaaattccactattattattattattattattttgaaaagatttacacacttcaaagagtatactgatgttgatgtactttttatttgttttggcatttaaaagaattttttaatttttttttttttataattgtatgcgttataattatttaaggtatattttttaaataactacaacgcacaccattataaaaaaaaattatccaaaatatcaaaataaatagaagtatatttgtcgtttttaaaagaaatttcaagaatgtgtcgtttatgatgattgttctcgttagtccaggggttacaagacttttgtcgttttacaataaaagtgtcgtttacatgattattgtcgttttaataaagtattttaaagtatttacaatgtttatctcaagtagcgtttgtagtccaacggttaggataattgccttccaagcaatagacccgggttcgactcccggcagacgcaatctttttttaatataataattattttgagaaattgattttattattgaagtaaatgcaatttcattaattaatttatgagatactaataaaaactaaagatggaaaagtttggaaaggattttttaaaatggtggatttaatattttaagctcaatttggatagttatattatgaatctaaattaattatgcctatcaaataaagaaataatttaattaaaattaaaatgaaaccataaataataaaattcaaatgaaggcacctatattatattagattggctatttagaatttttactcattgatatatgtattattttgacacttgaattttttagtctattacaaatagattctgaactatttacagtattataaattgttcattcagtcaaattttgtcacacatgataaataaaatgatgacataattacttagtaaattgtcacattagcagtaagtgtataatttaacattaaaaaaataaaaattatgcattttaaaaaaattattaatataaaaatcaattaataattaagaaaattacgtaaaattaaattattttttcaaattaattacaaatgtagtgtttacatgacactgacgtaacaactagttaagcagtcatgtcattattttgtttgttacgtgtgacaaaatttaacaaaatgattaatttacaatattgtgaatagtttatgaaccatatatttttatatttttttgctaattaagattcatatattaaaacaaaaacaaacacgcattagtagccacaaaggggtgctacttccctaacataaccgacaacatggattctcccaacacgggccctacgggcaaggagatccgcaaagaaattaaaagaatgattaatacaagtaaaaacaactgactcaaattctttaatcttagctacacattccgtaaaaaacaagataactgccccatccaattggaaagtttccagtctgcaatccataagttgccgcacacagtccgactcaatagcaaccttaacaaacgcaactctggatcctcaagcttcacccaccatttctcgaactacataatgttgttccaacccacttggtctatctgaataccccatttactcttgaaccaaattccacgcgtaacgttgcattttgcaattaggtgcagcgtgtcatctgtctcttccttgcagaaaacacaagttctgtcattgagattaaggaatcgtagtctgccataagttggtacacaatcaaccatcactttccacatgaggagtaagagtatatttaatgggctaaaaaatatacacaataatgtagatgtccatagcattttcacccttttaactttaccaagttttactccatatgacataggacttgttaataatacctctcaaaatataattttataataatgtggtcattctatcaaattttacttaactgaaatgagtgagttagtagataatattaattgataaatggatataatttaaataccattaattatttttacattaatgattagaaaattaaaaatgaaaatatgaattattatataaaaaaattattattatttaaaacttaatgtctaatggggcgttcggtaggttagacttaatggatgagaataaaaatattaaattcaacttatatttagtaaattgaattaaaatgagcaagaagaattcctaccaaaaatgtttattttttttcccaaaagtcaatatctaaattttcatataatttatcctaatgagtaatgaacaatgatgtgtaactattataactactcaatttaaaaattttagaaattcacttgacctcttattgcctcttgaccaacccaagcctctttttagagcatctttaaggagacactaaatttggtgttacactatcaccaaatttagtgtcaaaaattatttctactccaaccacaacaccaaaaattaca

SEQ ID NO: 14641 - DNA, 5190 bp, Cannabis sativa
aaaaaaaaaaatgtggctcttatttactttattattgcattatgtatgaatgatgaacctcatctcattggagaggaaaagaaaaatatcaagaggaccgattccaataagggcgaagttaaggtagccactcaaatccttgtatttgtgagaaacaaagagattaaatggtggggtcctccaaaatgtgtcattttcctaagccatcatccactttttttacttataaagaaaataaatgaaatcactatcttcacttccactcctcgcttgtccatcactagttaattggtgtatatggagtgtgcagagtatagaccatctaaaacctctttgagtctttgtctaatctcttctattcaccccattgctttctgtctttgaactcatgcacatgtgcaacccacatgtgggcttttatttaactcaataatggtgttccccacaaactcttatcgtaaaaagattatattatatacatttatattcatatccaattgggatcaaggccataatcactttcaagcatgattaatttatttatgggcaaatgaagtatcatataatgcagaactgttattaactctatgttataatctattccaatcttaagtattgcttgttatcattgtctttgacacatccacaaagataaaacatatacgggtaagaggtggtaaaagggataatagacatatactataccaaataaagatgaattaacaaaaacaaaagcccaaaaaatcacaaggtgtatgtggatatactcctttttctagtggtaatttttttttttttacccttctttttttcatcttacttggcttctctttcctcatcttctttgggttttgctgaagaagttgagcctgctgaagccataccaataacctggctgtgtgtgaacctttgtaactggatcattcttgcataacacccatcagggtaattttttaacaaatgggagtgggatccttgctccgctactttcccatcgtcgattactgcaataacattggcatttcggatagtggaaagtctgtgtgctacaacaattgtagttcttccggagcaggcacgctctaaagcctcttgaacagatctttcagactcagcatcgagtgcactagttgcctcgtcaagcagcataagctctgccttcctcaataatgctcgagcgattgcgattctttgtttttgacccccggataactggactcctctttccccaacaaatgttttgtatccatcaggcaatgaagatacaaatttgtgagcattggccatagttgcagcttctatgatttcagcctcagttgctgactcatgaccataagctatgttctcatatatagttgtagcgaaaaggcatggctcctgcggcactacagctatgtgctttctgagggacttgagattgtattttctaatgtctttgccatcaatcataacccggcctgatgttgggtcgtagaaccgttgtaccaatgcaataaccgagctctttccacatccactaggaccaacaagtgcaagagttttgcctgctcgagcacgaagacttaagtcacggaagacagggatatcagggcgagaagggtaagagaagtctacatgctttaattcaacttcaccacgcagccgatcaggagctggtgtggcatctggatcatcaggttctatttcagttttacggtcaagaagttcaaatactgagcgcatagctcggccacctttgatgaagtcaggagctaaggtcaatgtttcagctgctccattggcagagaccataaggaccatgaaaactctgatagttttcgagaaatcagagatctcatgtttaacaagccacgaagcataccaaagaccaagggcataagaggcataaagtgcaaactgagctatcccaaatccacttccagcaatctgacccttccaaaagcagcgtcgtaatggagcctcaaggttggtagtgaatagaccaactatttttccctctgaattaaaggcagctacagttcttacattggctatggcctccccagctagttgggtggccttggaatgtgcagcttcaaggtctccagagaaaccagtcatgaacattttctgttgaaacccagccagaaaaattattaaacaaagaatttttgataatttgattgcatatacttcatcttcatattgcctaattctttctgaaatggaaattctacatgctatgcttgagataaagacagaaaaacaaacctgtaagacagtggcagcaacaacgacagggaagacggctacaaggacaagggcaagacgccactgcagaacaaatccggctgtgcaggcaactaacatgagtgccgtgttctgtacaattactgatatcctgtctccaatggctgatctgacattgttagcatcaagagccagccttgcagctactctaccactttcattttcctcctggtcaaaccatgccatttcatttttcagcactgctgccagcattttctccctcacacgttttgtcaagttttcgcccacaatatcccagaagaaatgttgtagtgtgttgaagagaagtgcagctgaagaaagtccaatcaacagataacaatacttaccgatttgtttaatcatgaaagcgtggtctggattgtagtagacactgagaacagcactcagaacatatgcaaagaaagcactaagtgatccacacacaatagaaccaattgaaccgactaaagcataaacccattctggagaattcatttttgcaagacgccagaaagagctagcttgctccttaaaaggaagcttttcaagccggtaatttggatatggggcatcaagggaaagactgaaatcagaagttgagaagtcagacagccggcgtgaatagggtgagcgaccatacgaggaatttcgagcaattattggtgagcttactgagttcctggcactagaaggtctgcaaatgaaaaacaagtttagtcagcatgaaatccttacagtgagtctctacgttcaaacttttagtacaatgcctttaccttgcactactctttctggcattgttgagagcagtttcatgtgctgcctcctgcattttgatgagcttcgcgtacataccattctctcctttagcaatgagttcatcatgggttccaatttcagaaacagacccctggtgcagtacagctacaaggtcagccttgcgaatggttgataggcgatgagcaatgacaagagttgtcctcccaatcataaaccgatctagggcctcttgaaccagcttctctgattcagaatctaatgcacttgttgcctcatctaacaataagattgctgggttttttagcatggcccttgctatagctatcctctgtttctgtcctccagagagctgcaaacctctttcccctacctgccatttacaagtccattgcttacatatttacctcatgtaatttaagataactgtaattcaatcgttatagtatgcatctatagacttctacctcaacctataattattttcggaaaataataataataaacaattcaggtaatttctttcatttatttactcttccattgaattgcatggtaagtaaaataacgatattgacttaatgtggagtactattttgtttttcttcatattatttttaatttcattgtcttataccaggaattatcagtggattcttccctccaatgccaatataatgtcggagtataaatataaatatatgtacccttatttatatgtccacatgcattgttgactgaggcatgttactttccacaaatgcatgcatggccaaacactccaaacattgacttctaaaaaaactaggcataaaataaggttaggtcttgtttgttgaccaaaccaactattccatcttaaatatatataaatatatttatatatataaatataaaaacagaagcaattatcttctcttttttaaggataagataacagaagcagttatagccattaaaaatttgaacaacatgcttcgttcaggatccacattcaccatgacaactaaagacatgtccacttaaatgatcattttaaataaagattaactgctgtcaagaacttaaggtaattacatgtgaaaattttaattgaactgacctgagtatcaaagccatcgggaagtttgataatgaatgaatgagcatttgcaactctagcagcttcttcaatttcaactagatcagcatcaggcctacccaacagtatgttttctttaatggttgtagcaaatagagcaggttcttggctcacaagtccaatttgttgtctcagccacctgagttttagtgtctttatgtcatgcccatcaagcataacttgccctgtccaagtttaaaatatcataaaaaatttcagtctactgacaaacttcttaaccaaagaaacatataataaccaacatttataactacatgaaagtttacctgaggtagggtcatagaatctctcaataagggagaccaccgtgctcttgccagagccactgcttccaactaaagcaatagtctttccggctggaacatttaggcagaagttgtttaaaatgcgaacatcgggccttgcagggtaggagaagtccacatttcttagttcaactagtcctgtaactgactctagttccaaccctgagtcgctgttgcggtcaatgcttggcttgtgatcaattacacgaaaaattttagcagctgcaactttagcctttgcaaatgcacccatgctaggtgcagactgacctaaggccctgtgagtttaagaagaaaaactttcaagtggatatctttttgaaaactatgttcgggaacagagaacaacaatatatgtaactgaacacttacagtccaccgatcatgacagcaaacatggtggctatggcgagtcctccattggtatagtgatgcctaacaagataaccaccataccatagcagaagtgcataacagcaaaacactacaaagtaagttgccccaagtcccattccctttgccaacccgctcttgtaaccgagcttttgagcaattctcaatgcgttggaatatgcttgtaatgctcttgattctccaacataagccatcaccacccgaatttgaacaattgtctgtaaatttaaacatagctcagagatagtcagacagacatag

SEQ ID NO: 14642 - DNA, 6587 bp, Cannabis sativa
  modified_base (6203)..(6207): a, c, t, g, unknown or other
gctagttttaagaatgagagattttccttctccaacgcttactacccaacctgaaagcggatagctaaagcgttccagctaaagcgtttcacttattgaacagggttctatggtcggtctgcgacccttggatgacgaaggcttcgtctaaccaaaaaatcctttctttttccaacttttcaatcttcccattcattactcatgggccagccttcttctccttattctttcaattctactaacgaataattgataataattcccaaatccagatcggctagttgttctccatctaccctgacgtcctttgactttaggccccataaaaatttaatcaattcccaacatgagcacgtgactcaatgaccggtaaaacacccctaggggaagatctcgacaaatgggacgctaagttaaaatggaggaaaaggtactccataaactcctcacccaccccacataagggacaagaggtgttttcaatctgcattctcttagctaggaacactcgatttgttagggaataggagagaatacactgccaaagaaccttatggtgctccaacaccttactatttcacgatttattccatagggtagaagctacatcacaaggaggagcatgttcaacaacttggactaggtaagctaacttgctagagatggttctttggtccaaatctaccaatcttttccttgggcactagacttaacccccttcaaaatattactaaccatctcagaatcaaaaagggatttgaactttctgaggaccgaaactccattgtctaaaagaaagtcatcaccaacccattgaagataatttggaggattgactacaaggctaagatcgaacgctttgccatggatgacccacgagtcctgctagatatttgtgtctttcccaacaatgataaacatacatgcacttttcttaaaaatagttcaggctttaacaatatttttccaaaatcaggaatcagaactcttgtaagagaaattcataaaatgtctattttttaggtacttggccctaaggaccttgcaacaaagtgattgattctcattaatcagaagccattcccatttttccaagaaagcttggttcatctctaaacatttccaaaatcccaagccccacgcaatttggggagacacaacttttctaatgctttcaagtagaggccccaattccccttctcacaatcccaccaaaaacctattaccataccattaactttagatgccaatctcttagatagtttcattgttttcatagtgtagattggacgtgcaagtcaaactgatttgatcatagtagctcaaccttctttagagagggatttccctttccaatataattaaattttgtgtccttttgatgagatctgaagagcggaagacccaaatagttaattttccaataataccatcaatccccataacctctttgatacatctcttcattccttcactagtttcattactaaaaatgattgaggttttgagtttattaatttttttgccagaccaagcgcaaaatttctgaagacattcctaatttctcttagctttatatatgtttgctcaacctacaagaatgaggtcatgcgtgaagaagagatgggagagtcaagacccatttttgctcagcttaatccccttaattcctcctttattaaaggcatcctccaaaatatgggagaagatatccacttcctagatgaagggataaggagaaagtgggtaccgcctaatgccgcacttaggagcaattgtacccacaacatgtccattaagataaatgttgagggaagttgttgaaacacacttatagaaccatcgcaaaacatatcttgaggcttgaagctttggagcacgtgattaacgaactgccaactcaattcatcaaaagccttaacggatcaattataatcgcaaaaagtcctacctttccctttttcagtttaaacgaatggatgatttcctagactaaaatgttgttatcttgtatgttcctactaggaatgaaaaccgcttgagtagggaatattaatctaggaaggattagtctaattctatttaaaataatttttgagatgaccttgaaacaacattgtaaagagaaaaatgcttgaattaagaaactttcttcaaattgggtaccttcaagatgagaacctcaatagttattgtttacctaaaaatttgacacggtgatgtggacaacaattttaacacgtggtaagaaggaattaaccctagggccaaccactaggactaagttggtcgacatgggcaatggaaactatgtcgatgccctagttgacagcagtgggtgcccaagtaggcagcatgatccaacaagttgtttttaggtgccatcctttgacaaagtttaggtgaacaagtcttagtgaccctaaaatgatgaacaatgaagctgaggatgtcttatggacgtcccagggcttaacttgggtctagcatcagtcctgggcgcccaggttgacatcttgtgtgccatcttgcatcagttttggttcctataaacttacatcttatgggaaatttacttagccattgtcctaagatacatgagacacatggcgcatgaaagtttaagactttggagataagtctatgagaaatggtaccagggaatcatgaagccctaatgggcattaaagttgacatttagtcaatctgggcgtaccatgactagggtttaggtttctacgaacattcttggaccttgattactcaaatccatcaaggaacaattccaagacatgatatttcatcaaagacatcctaaaggagcaaattcataactatgggtgcctaggttaacattccaacctgagcaccaatttagtttcaatgggtaatgcttgtgcaaatttgacgaaaatgaaatatgttgagtacttttaaccaaaaagaagattgagcaccaatgagatgaattttagagatttttctccccacctaggcgcccagtgcatgcctaaggccattatgggtgctcaggttaacttatctcaacctagggcactttgggaattctttctgttgacctcccttttagccaacgatactgagtctttaaagcgatgataatgattgatagaataataataaaataaaacaataagaacacacaaagtttatagaggttcaacccctaataatggtaatagattactccctttttttattacttatagagaattatcaagatcacaaggttcaaccatgttggtttcttgaaaatcttaagaaagcttacaactatttttggagagtgactgctctttagaatgcaaaaaagaagtccttaaatagtgatatcgacacactattaataaggcaagtacaaatacaattatcacgagttaatgagagaaaaattagggaaacttaaatatcaaatcccatgattttcttaattgtataatgtcaaaactacaaagatagggattttaaatagactataatggtggagatatttagtgaaaatatctttgagaatctttgctcgctgtgtgtttcatttgagataacattttcccaagtctgcatgagaacttttgcttctatgggacgtcttcgggttacatgtcgctcagataggtcacacgcacttgtacccatgtatcgttctggacgttgatgtgagttcctcccaaggcatgcatatattgccttgtatcccaacattaaatgtgttgccttaaaattcatatgtgggagagtgtgctgacggttatggagaaccagattctgacagttgtactaccaccatgatgaatctttattatttttcttgggataaataaaaatttaaaaccaatttacgatccaacccttcaacaatcttacaaaaaggattgagaaatccctattttgccattttagccattttcactgagtaagttacttacccgctctctcttttttaaaactttatctataatttctttataacattactaggtgcttgttctttgcaattagattctagggtttctaggtttattgtttgaatgtgtctaccccaagtgctaatagttgatattgatttgaatttacaccaattttgcacaaaattatcccttgtttttgcttggcattttatttttggctctttgaagcttctaggactttcaaaatttcaaattcttcttaatttagggattttatcaattggatggtttttcccaaatttgatttttaaatctttcttagtcagagtatctagaatgtttttctttggaaaaatatttccacctatttggttcctctttctctctccttgttttatagatgaacccgggtgaattctagggagatgattactggatagaaaatgacctattccaactactctttgaagatcaaccaagactctgtgtagtggaatcgtcatcatcttcaagtgggatatcatcatcatcattgagtttttctgagtgggaagtttcgaatgagtcttcgaagcctgtagtacagtatcaccaataccccgaccagattattggaggcaatagcttctggccccgtgaacttacagggttagagcagacgttattgacacccttcgttacggtcatccaagggctttaaagaggcacatcgtgcaggcgaagatagccatcactatcgccaaacacagtatgaaggccattcgacaacctagggctagaatgacgaaaacaaagtgaaccacacaaaaattttctactgataagaagctacatgaccaagagtttgtagaggccattacatcgaccaagagtttgtagaggccataccactctctacaaaggaaaaaatgaagtcttgttgtcgatttcctccgtccaaacttactgctaagaagttaaacaatctcctagctaaagctttgcttggagatattgtagtattcctgccagggaaagggcagttagctaaaggtttgcttggagatattttcaccatatcaatagttaagataatctccaagaaaacacaagatatatccaatggtcagggagagttgtcagtcatgcatttaatgcaatgcttagaatcaagatatctaaattatgatattctcctcgagactcacatcgacgtaattagtcatcatttcgtaaagccatgctacattaaggaaagtaatccccacttgccaaagaaataattccacatgtcgtttcacttcaaaaaataagaaaatgtcaaccacaaactatttgatttgggattcataaaggttcctgtttttagcctccacatgtcctcacatcattcgggaggaagaatgcaagcttccataactcctagagttttgaaagcttgggggtaaatgttattcgtatttccagatggggacatatgtaattttgaaagtgataaatcttgaatatttcagacccaacaacaagcccaaccaagataatggactagatcgattatccaagtcatgtctttcgaatattggataaatgactcatccaagtgggataactctccagcacaaagtgtatccagaagaactcagttagaatgtctggagaagtaatcagcatgcatctagacatccaactaattatcatattcattaattactaaatcccacgatatcatgacttcattcctaggttttgtccgaggatcatatcttcccagtatgaaaagatagtaattgatgatcaaacattactgtatctttaatatccacaaaagtaggacacattttaatatgtaagaaacatatattttatgtctctgaaaaatgacaactaatattaaaagaaacttttttgtttttgtttttgttttttttttttttttatgtatattttaggctctattatgttattttattgtttaagataccttgaggttagcttttcttttgttaatataactcatatgatgttttagatattattcaatttatttataaattattttataaacctattaaaataattttatttaatcttgtaatgtctaaatataaaaataaaaaaaaatattttttaataacttattaaagttataaaagaaataaaggagagtaaataccactttggaccctgtgttttgcaaaagttaccaattggaccctctattttattaaatgataaaatagaccatgtattttctaaaattatagaaataaaaccctgaactgattttttatcaannnnnaacttaataataatctaatttaaagatgttataacaaaactggttacattttttgtatttgttcgtgttagaaattttcttaaagttggttatattaaaaaataaaatttttgaaaattgaactcagggtcctatttttaacattttggaaaatatagggtccattttatcatttaacaaaagagagggttcaattagtaacttttgtaaaacaaaaggatcaaaatggtatttacccaaaaaaaaaagaagtgaaaatacctaatgttttttattttatacacttaaatacataatgtttattttcagaggtaaaaatacctaatgttaacaattctcttacactgttactaccacttccgttattaactcataaatat

SEQ ID NO: 14643 - DNA, 6418 bp, Cannabis sativa
gaacaatgtccaaaggacggacttcaaaaaaaaaaaagcagttccaggccgcaagggatagacgacccgaagcgtcatcactcaccaatagtaaattacaatatatgcattatgagatatgttacctaattaattttttttttaaaaaaaatacgtatatatgtaatcacattcaaatgacataccaatgtagccatagttaattttttttttcttaaaaataaaaatatcaaacctcatttcaaaagttaaaaaaattatattacttaattaaaaaaaaaattaaacatgtattgaagttaacatcaacctagttattattatgtggaacaaaacaaaaccaaaaagtttaacccaaaaatttactaaaaagatttgatcgtatctttaagtttagccccaaattacttaaatacttaaataaaagtgttaatatgacacaaatttaatgggagacgatctaacaatgccagcaagcaacgacgttaacacattgacaataatcgtcccgcgcttcttgcaaaatttgaaacaaagcaaagagaaggcagcgaacgatgatgtctcagccaatcattctctccgacgaggaagaccaccttttccattcaaccccaatccaaaccaagaaacgtcggactcaatccatccttaacccaactcccaccgtcgtcctactcgacgatgaccccactccgaagaagcctgacgtgccaatccctaaatcctttgatacagcctcatttggctcccggactagggtttcaaattcagagcacgagttttctggtaagatgcctctctgctgatttttatgcactgtgttgtgtttgtggaaatgcctctgtgatgtgtttttgtttattttttttttgtagattgtaccgtcatccctgagacgccaatgtctgacattgcgatcctcaagtgctcctctagtaaagcctcatccgattttcatgctaaggtttctgatcagaacaacaagttttctggtatgttttgttactcattcattgaatctgaatacataaattttttatttttaagtgattgttgaaatgtctctttgatggattgctttgtagaagaatttacagtcattcctgacacaccaatgtcagatactgcaatcgctaaatgttctagagtttcatccgttcccaagactactacagtgtccagttcagagtacaaattctctggtagactttaccttgtaaatgaatgtaatgcgcgttttgtgtttgtggaaatgcctgtttgatggatttatttagtagagtttaattatttaagtcttaatctctttcaactagtttgttcctttacaatacatcatgctttcttttccttaatctatctttgttgacataagattttcagctatactgtactttcagaaagaattatagtatatctatatctttgttctttcagatttgggcattaatcgactgatatgtttggagtctgataatgactcggaagatggatatgaaagggaaaagtggaagggagatgacattttggattcgggttttgatgcagagaaggattttgattggaattctaaatttgttctgcccactcgtactacttctggtaagttaatgctgatcaacagtaagattgtacctttttttttgcagttctccggtaacattgttgactatgtccctcaaagtaggaatcttttttaagatatttttaaatggcccagagtaattatgtgacatgtttgtcaggccgtgctgatgaaacacaaattcctgaagacagattttccaacccagttctatcccccttacgaggtgaaattcctcaggtgcttacatcttgattcatgttgcttttcacaatataatcctctctctgttttcaaactcttgcaagttctttgaaaaattatgttgtggaattctaaagctcatctttagtgtacaaatatgaactttggtcttgtaatgatcttcataaatgccttagttggggattgagaaagtgaggcgggcactcattatattgatgtgaaagagaagtatagagcatattgtggcaatccttcaatagaaaggctctagggattaaagagttctgaggtagtgagtagtttggaaggacatataattgaactctagaagtttgggctatatgctttttaaagttcatacaaagatgaaagagtttgtaatgctgttaacactcttaataggaataagttatcattttagggatggtcaattatagttgagctttattctctgctttatctagcaagtttcagtttgattgtctgataatagcatatgttaatgcaagattagcaaggttatagttaaatcttagtggtgttttttgtcatcccatactgattctcaatctgattcacagtaattaaaaaaaaaatcatgttgtttatgagctggtgacttttaagctgctttatcttctgtaagtgtatgataaagttttcttatgtatttagaatctttataatcattagatacagtattcttgtttacatttaaatttgaatcagttgggttgtggtccctgttatggcatttcacaggtgagtgagagtcctggaaaagaatatgttagcacagaccagatagataacattgtgcagaacaacaaaacaaaagattatactgagaataaaaatagtacaagagaactaatgagaagaaaagggatagcagaagaggaaaagattcgcttaaaagaagagaaaaaattgaagaagttggtaagtgtttcccgcgatttgaatgttcattcatgtacccatagtttttttcaaatgattatgaggtttacttatatttaaattaatgatgaagcaagaaaaagctgaaaaagcagctcttaaagctgaagctgtagagttgaaaaaaatagagaaagaaaggaaaaagtgggagaatgggaaattcgccttaaaatccattgtagcagagattgatgcaaaagtaattgagatggggtcagttggaggtggggtattttaatttttcagctctcttctttagttttctattatattatgcatgttacaatggctttattcttcattccattcatttaacggaaaactgttttacaatttctttaggaagtttgttaacgaggtttgccgaaaaggggcttacataccgcataacatcaaatccaattgaaaagtctatctgttggactatgaaatttccggaacatatacccgaggtaaataactgtcccgagactcctcactgctgaagatgagaagcagtcaccaagtaaactacattacaatttagtcacttttcaagttatgtgatctatgtggtttctagtttttgttttgtttttggaaagctatgtggtttctagttaattgactcacttttataacaatgtttgttgtttatgcctttcaccttggtcaaatatatgtggctttgctttagactggttggctgtccatttttatgattaatgatacacaataaaatgataaatgatgtgttctattgtattgcatctttatggtttgtagttgtacacctttagactggttggctgtccatttttatgattaatgatagtaccctatttgatttttcttaattttttgttaagaactttgaagcgggggtattgccaacgtttcattttccttcttgcttgttgtctttttcttactaaattcaagtatgttatgttttcctgattgttgaacccaatctgatttacttcttcacggacactaaatcatgaatctttacagctttctcctgaaggaatagagattcaatatgtattactcgtgtatgaggccgaggaattttgtaaccttgtaacaagtgaagcttttttggaccacgtttctggggttcgaagtcgttatccatctcatacagtgtgttatttgacaaataggttaatgtcatttatcaataaaaggtgagagattacaaactaaataggttgaggctgaatagtattagaattttgcatttgaggcttattatccaaaggtaataatatttatgcaccactcattttattgtctcagggaacaagaacagttcaagaacccaacaaatcataatggttggcggcgcccacctgttgaggaggtgaatttcaaactaaaatattattctgataggtttctagcttctcattattgttgtttaagtagctgagtgtttcttacagatgctggcaaagttgaccacccactttgttaaagtgcgttcaagacagtgtgtagatgaggctgagctagctgaacatattgttggtttgacaagcagtttggcctcttgccaatttaggtaatttaatgcaccctttctgaaacaatgatatatgtgttttttttccccgaactatgtcttagttgactcttgcctcccctatttcttttgtctggcaattatgcctgctaaagtaaggaattattgaaaacgtgctcttatattttttcaaaaaatttacggttcttgttgacattggcaaatccaaagtgccaaactgttgcacttttatggtctagctaattatttttttgaaaaaatcattttaaattgattttaaaatagaaaaaaaatattttgatgcacaaaaataaatgttctaaatatttaaaaataaaagattttcttttaaaaaaatagttttaagatagaattaattaactctaattgaagtgcaacatttattggcactttggatttgccccagccacatgacaaaaaaatgttaaatttttgacagaacttaacaaaatagcacattttcaatgatttatttagtttgggagcattttggggaaggctctgcaaggactatcgttggaggagaaaacaaatttgtccttataactagcaacttaaacaaaatgtattttctgttatgattgagttgccatactatatgctacaagaaccatatcatatattgaacaattgttttaataataataatattgattcccctacttgaactagaacggacttccgaaattctgttcactctaaataagaaatgaaaactgtacttaatttgttttattgcagctttgcatataatcaatctttcactgctgttactttttttcttcctctatttcttttttttcattttcttatattattattttgcagaaagaagttaacacgactgtctgtaaatgcaaatggttcccttatccctaaggattctgttgacaggaatttaatacaaaagaacttgtggtatgatacactttctaattttcaactcagatgtatgcggtgttaaactgttcattactttccttttagctatgttttgactcgtgttctttgtgctgttatatttgctattccttcatatctaccgcagaattttctatttatttatttggtgtgtgtggggagttgtcatggatactacttttttgttgttaataaaagttgagttttacatttgtctcaaccaactttttgagcatctcgatttttaataaataaaacagaacagaaaactgagctgctgagcatcacttttttctactgacatctgttgcatccaggttaaaagctttggtagctatcccaaaggtacaaccacgatttgctattgctatatggaagaagtaccccaccatgaaatctcttctgattgcatacatggacccaagtaaatctgtaagtgatggcaaacaaaactcttttcattggtacttttacactcttgattcatcatactattgaggttgtgttgcttttggttggaggtaatgaaatagaatgtaattgaaaggaattagtttttattccatctctctgtttggttgcattttaaagtattggaatgtcatttcaatggaataatttcttttccattttgatagaataactattccattttgaaatggaaggaaaaactattccaatgcaagatgataaaacatttaacaatttcttttatgaattatttttatgcattttaaattttatcattcctattcttattctcattcccatttctatttatgtgtgtagaaaatggtgaatagaattgtgtatcttattcatgtgaatgtcatatattttatacaacttagggagaaactaaaataggaaagtatgaaagaaaataggaaaagaaataattacaattgaccctattttctagctaaattacagctaatattctaacattcccccttaagctggagcatagatgttaatcatgcttagcttgttacaaagataatcaatctgcacccaattcaaagtcttcgtaaaaatgtctcctaattgttctttagttttcacatatcctgtagagattaagcattgttgaattttctcatgaacaaaatgacaatcaatctcaatgtgcttagttcgctcatgaaacacaggatttgaggcaa

SEQ ID NO: 14644 - DNA, 4994 bp, Cannabis sativa
tgggaaaaatgacaaacttcaagcgcagcgagatagatttcacttatcacttcaaaattacttaaactctctatttcaatctctccacccaaatcccatacaccctttggttcttactcactctcaccacatatcaaactctctcacacacacacacacacctctcttttcaaaactcactatttttctatacacccatacctctctttcacacaaaacatatatttataaagttacaaaatttaggcatcaagagagcttgggaaccaagatattccaaatcttccttaagaagactcatcaaaacttggtcaccaagactttttttttctcacaattaataattactcaaaaagaaattgtaacttaacaaatatagataaatacataaagaaataattaatttgagtcaaattataacaggggcatgccagacctactctttaaaaatattgagacaacacgtcacgactcatattcttctgtagtacagcacgacacgacctgttttttaaaaagtacaaataaatataaattgaattagcacaacactcacgaacttacaacactattattataccgttgctaggcaccatttaaccttttttttagagaaatgctaaagggtaccagtggtgcctagtaccctcatatgtgtctgtatctttattggtctaactaagtatcgggccccatataatttaatataatagtttttagggagtatcgctaaccaatcgcaacgtgatatgtcaagaaaatgctaggcaccactgatgccttatagcaatactcatttttttaatataggaatttggagaagcacgagaaattgctcacgtggaaaggactagagttagtgcttaacggggttgccatgtcagcagattaaacggcgtcgtataaggaatggaagtaagcggattggattctgtatgtgatcttatacggactcaaatcatggtcggaacttgaggctcacaaaccatttcttcctctctttacatctctctctctctctctctctctctaaaatgcttcttcatgcttcgtcgtcactgtatatctcgcttcatagctcgagaacacattcaagcttaggtgaattctctatttatatgtgatattattgattttggaagtttaatatactagtttttgaaatttgttacattgaaaatgctttgtgggtttgttcgtttttgtaggactactttcacatgagagaccccttttaccatcagctatcataagttgctcttttcagccaaaacgacttgaaaatacaatatgggcttcacgtactagctccattctgaacactttcacggctaaagcagcatctgttgaaggtaagcttctcttttccccaagccagtagcttcatatgctctgtactctgttctgttgtgatatgactcatatatatgacatgagaaatatttgtccgttacattcttctttctttttactcctgctcaagttttaaaattagttttggacaattttgtatgtagataaagttgaagtcagtgaatttttatgtttataataagtttttaagcttggactttaaatggtaacggtggaaaattaggagcacagccttcatcaattaaagttatttattattcatgtacaatgttccaagggattaaaaggccaatttaaacgtttggagcaatttactctcttttgtcttcactaggaccctgtgaataatattggaccgatggagtcaatttgcatttcctgatatggggaaattgaccaacttatgtaatgtttgctaaattttattaattgttattacgattatttgcttgtagctggagcttctgctgtatcaaatggaaaagctgaaagtgatgttttgacagcattgtctcaaatcattgacccagattttggaacggatattgtctcatgcggttttgtaaaagatctagacatcaatgaggctttgggagaggtcatctagaaccttgaaatttttctatgagatacatgtcatatattgtcctttgttaaagtactgataattctttttggggtctcaggtttcatttcggttagagcttactacaccagcatgtccaatcaaggacatggtaaatgacacagtcatcattgtttcatcaagcactcacatatgtttggaatggtagacttaatttcttagtaaggatatatgtgaatatgttccatgtttcccttttctctgtgttccttcctttcatgaaattatccatacccatcaatcatgccgagtgttgcttttgatgagatgatcctttttgaacccatgaaaagaaattccaaggttgatatgttattgattgcattggtagatggattatgtagagtgtttgcttttgtctatcatactgagagtgtaacaagatttgaaaatatcatgtcagtttgagcagcaagcaaatgaagtggtggaaaagcttgcttgggtgaaaaatgtgaaagtgaccatgtcagcacagccagctagacccatgtatgctgggcaacttcccaaaggtttacagacaatttcaaatattgttgcagtttcaagttgcaaggtagctttttgttgcatattctttgcctctgtcagttatgattatgttagttgtggtatattgtatttggggaaaggagggagtttcctttgcttacactatcagtgtccatgtttggtaaaatctgttcagggaggtgtgggaaaatcaactgttgccgtaaacttggcgtacacattggctggtatgggtgctagagtgggaatatttgatgctgatgtctacggtccaagtttgccaactatggtctcccctgaaaatcgacttctagaaatggtaatattgtgaattttaaacgagttattcatctcgaaaatattgtagttttgacagtaaaatgatttattgcagaacccagagaagagaactatcattcctactgaatacatgggagttaaattggtgtcttttggatttgctggacaaggtcgtgcaattatgcgaggtccaatggtatctggagtcatcgaccaacttctgactacaactgagtggtatggtctgctcctggtttcaggggcatggtatctggaatggaataaaataaaaaggaagaaaatagagaagagtatatgttgatgaaagctatagaaaataaagtagaaataatagaactgcaaaatgagtctgcaatgtgtcatggaaaatgaagtaatacataatattatatgttaatacggtttaattacaatgtctaatgatgaatttgctcacgttgcaggggagaactggactatcttgtcatcgacatgcccccaggaactggtgatattcagcttaccttatgtcaggtgctcaccttttactctcagtctcagtctcccaatagtaatagtctataaactcaacttcatgatttatcattagtatgtgattagtttggtgctgttcttatagtgctatgcattgaaattaaatgatgtcccatttggagggtaactatgaaaattagaatctagtctgcatatataacctttttggcataaaacatttttttcatcttacaccaagtttgaatcattttttcaggtagtcccgttaactgctgctgtgattgttactacccctcagaagcttgcatttattgacgttgccaaaggagtcagaatgttttcaaagcttaaggtaatcattctcctgaacagttttttcaagccattgatatcatctctatattgccaatgcaaaataaggtgttttctgaagaataacttatgacaactgatatttggatattatttcttcctaggcaattttatttcatcataatttcataagcctgctaaattcttcaaacgccttgttttctttaaccatctcatgctgtgtgcttttaggtgccgtgtgttgctgtagttgagaacatgtgccactttgatgctgatgggaaacgctactacccattcggtcgaggttcgggatctcaggtatgcctattttcctatctcactgtagaaaacccacaataactaatctagatgcagaagactagagaactcttataactaaattctaacaaaaaattatcttgaaatgaattgttcactacctctccaggttgtacagcagtttggaattcctcatctgtttgatcttcccattagaccagctgtatgtcccctgcaattattttactcatattcttgtcatgtctaatctcttttttagctatagttccttttaattgttttgatcttggaacttaaattttttacagcattgcatattatgttatttactagattggtcaagtcaatctaactttgatattttccccctagctatctgcttcaggagatagtggagtgccagaagtggtagctgatcctcaaggtgaagttgccaggacattccaagagcttggagtatgtattgtgcaacaatgtgccaagattcgccaacaaggtacctgatctcatttctgtattcttgggaaatttgttcctttaagagctgattgggatagctacctttttacaaatatatcctctcccaaattagaatctatttttggcctgctgtttaaattcagatgatagaaatactgatatatcttctaaaaactaaattggagcttttaaaagtttgtaaaattggaaaaattcagaagcccgaagcttgcaaactattataaaactgtgcagtgttttccctacttatttttgagacaatgttgcaataaaaagtttgctccttaatctcatcagttgtttctaagtcaggcaagttttttctgatataagttcatctttgtgttaattagtgtcaacagctgtcacctatgacaaatctatcaaggtaatcagggtgaaagtaccagactcagatgaagagtttcttctccatcctgcaactgtaagacggaatgaccgctcagcacaaagtgtggtatgttgaattatccattttacgaga

SEQ ID NO: 14645 - DNA, 3592 bp, Cannabis sativa
ttataaattttattttttttattaagggattctttgtttcgtccccaccccaattagggaattccttaatagggatagagacgggggagcacttcctgcgccgtgtgtatttctacttataatctacttacaatacacaatttaattttatttttaacgtgttaattttaaaaaaaaaaaaattaaattttttaaattttactacgattcttaaataactctaaaataaatgacaaaagttaaactgaaaaattgtaaaaaaataaaaaataaaccctggtaaaccactaaaaccttggccttggctttcttccctttcggcttctgctcctcataacatagggtgtttgtgccgccaaaccccaccattgcccctattccacagctactcctctctgagacatctgaatacgctcatggcggaaaccaagcgcaaaaccagagatgggggaacccggaagaataacaagaagccaaagaaggccgccgaaaaggacaagaccaaaaggcgaggccctcgaataccgtcttcgtttcggaaggagcttgaccgaataaaccctaggactggcagtcctattaacagtgacggtgacgaaaggatcgattctgacgagggtgaagtttttgggaacgacgtctacgagtacgaggagaaagtacctgaagaagagtccatgaagaatcgccgcttcgaccgggtcgagaacttcgattatgaactaccacacgactttgaggtttgctctttactgtttatgtttcagaagcgaataaattggacttgattggatgcagtaagcatacctgtaaatgtttttgttatgtgatttagtatgaatccctatacacccgacccttttactattgtttcaaaagggattttccaaaatgtttcattgttgctcgaagcaaccatatttgcattaaggatttcagaacgaccctaatggttggttcatatcatatggggtgtagcaataagaagttatgttatgcaaatttccccttttaacgttgtagtattagcaaaatcttattatctttgacttggtgcatttatgcattgattggtttcaaattttataatgtaggacgagaatgtgtcgtctgatgatgacaaggagattgacgataataaagacgtatccagtagtgacgaggatgatgacaatggagatgaaaaacatgtgaggatgttgcagggaattactggaattacatccgaggcttttgatggtactgtgcttaacttcctctaataatgtgatgctttgtgtgtttgattaattttaaggatgctatattgttgtcatatagattttactttataaactggatcccagtgcagcctttttgtattggagattctatacttgatgcagaaaaagagagccaaatttagataattgaagaatacttttaacactgtttattcataggatttttcttttggatgatcacttatggccgtgattataactttatttctatgtgattcttaaaaacttgtaatgaattttatgctggtggttgaacctgtcagttgcttacatatacaaattttaataacagaatagggttagctctaatggttgctctccacaaagtcggaggtttgagtccctactgagcacttacttggaagttgctattttctatagtttcacatccctcaaatatgttaggattaggatagtagccctgtttaaaaaaatatgcaaaatttttgaaaacttctaattaactttttgactgtgaacggttaattgttattggtggcagtttgtacttatcgtgtaaagttatttctatgtggaaatttattatgtgagagtaagtagggctacaagtatgactgctcaaaagttatttttgatatcagggaagaagaagaataagaagtatactgtcatcacagaggcatatcctgaatctgaatataatcctagccgtgatgttttggatggtcatggtcaaattagtgttgaagaccttctaaaccctctacaggggaaatctggttataaccaacttaggaagagagtgcatcaaatggagagaaaatcaacaacgacacaagcaccacttcctaaagcagaacgagaaaaattagagaggaaggcggcgtatgaacactcaaagaaagacttgcttaaatgggagccacttgttaagaggaatagggaagctcctaccttattttttggtaatgatgtagacttaggatattctaccgtaggagcaatagcatcagaatttgaacctagaactgaatttgagaagaaaattgcttcactagtacacgatgacaaggttatggatgctcactcaaatgatggttccaagcttcttgaatttaacaaggtatggattttttgacaatgtttgttcattgagcttatgagcctctttatttttttgttcattgatattgtagcctctttatttgttgttcttgtttaataattgatctctttctttgtttcttgtcattcctttcgggtactatcacatgaattttttttaagtttattgagctctagggaaatattcaatcctggttatatgggtacatcactaaatccaattatgaccaaatgccaaaagagctgccttctttttaattagtgtacattatggccagtggcccagtgagctggattagattggttccatgggatagaaattaagagaagtttctttcctgttaattggcttactggtttcttctgatgtttgcaggtgtctgttgaagatgaaaaggaacgccaaaatcgtattgccaaaatgcgcagccttcttttccgtcacgagttaaaggcaaaacacataaaaaagatcaaatcaaaaacatttcatcgtttgttgaagaaagataaactgaaggcagcgtcttctgagaatcagatggacccagaagcctctaaagacatggcaaggagacaggaatatgatcgtgcgaaggtagttgattttccattcaactagctgttagataacttgattcagtggtggctatgcattttaaaatccaattatgttattaattacttatgcttatcttcattgatctaggaacgtatgacgctgaggcacaaaagcagctcaaagtgggcgaagcgcattaaagaacgaggtttagatgcccaggatgaaggcactcgagctgctgtagctgaacagcagcacttgcatgctcttttaacaagaaaaatgaacaccatgaaagagggcagcagcagcagcagtgacgagagtagctatgagtctgagtctgatgaagaacctggtttagagcagaataagacgtccaagttattaaaagaagcaaaagagaaaacacttaatgttttaaatcaagaagatgaagtgccaaactcaggagtgctctctttacctttcatggtaagtatctatattctctacctgggactttctttaaaaactctatattattctatgctacctttggaccttgttttgtaatttttttttatacattgtgtttattttgtataggtgcgtggcatgaataaaagaaatgaggcagctgctgaggaagctaaacttgcccttgaagattttgatt

SEQ ID NO: 14646 - DNA, 7726 bp, Cannabis sativa
  modified_base (3500)..(3514): a, c, t, g, unknown or other
  modified_base (3940)..(3945): a, c, t, g, unknown or other
  modified_base (4228)..(4229): a, c, t, g, unknown or other
ccaattacaagaaggaagctgtctaaatttctttgaaacacaaatccacgatgatgcccaataattagtttgatattgtcactgtcaagtttgcatttgaaagttatttttctcccaaaccgctatacaattcattcaatgaaattttgtagcttttttctgcttattacttgtgactcagacacttttagctcctttatgctttgtgacattgccacgattttttcttgttcagcttaaatgcatctgttacaagcatatgttaaatactctatttataactaactaatgtattttttttcttttgtagtataaacttgtagaaccatacacacccgatagtttaggatgaatggacggaattctagtactttgttatattcttcttatactacttattaagtttattatattcttgttatatatatgacatattgttttttttaacaagggaataattttattcaaaaaaacaactaaattacaaacaaagtagcagcatccactacacagaaaaatagcagcccaaaaaacgagaactgctctccaaaaaccaactaccactcaatgaatggggagataaaagtagttgagctccttttggacaatggaaatggaatatctaaaaacttaacagtttgtttgatcaggagactatctcgactatcttgaaagggggcgatccgactggccatgaaaaggatagctggttttggaccttggaaagcagcttatagggcccaggctgaggaaagagcgactcaatgcgaggtttccccatccatttggaataaactttggaatagtaaaatctcggagaggctcaagtttttttgggggtgcatcctatccaaagcacttcctgttcgttcggtaattgggaaaagttttccaatagaagatgacagttgccccctgtgtggaactaaggttgaaactatggaacatctgttcctctcctgtaacattgcttctcgcttgtggcgatcctctccatgaggtatcttccccatttgcgatactagtattcgaatgtgggattgggttaaattcttgtgggacctaaaaaacaaaggcattaacgcgaatgtggctttcctctatgcttcattaattattgacacaatctggctgactcgcaatgacaagatacacaacaattatccagtagatatttttaaatgcattaactctattcgtgtttcttttgcagatcaccattaactctattcgtgtttcttttgcagatcaccatgcttacttgctcccttgccccatatcgagatcgatggatgtctggcgaccctccctaggattggttgaagttgaactatgacattagagttgggatggatagcatgtgtgcagctgtggtcgcaagggatcatgttggcatggtgatctgggttctaagctggagttttccgatactttttgtagggaagcggcggcttgctgtttagccttggaggaggcgaaggcttgtggcgttaagtttattattgttgagagtgattcgagggcagtgatcaatgctcttaatgggaaggagtcccgttgggagcttgagaactatgtatctttttgtaatggatcctccattttttttattggttgtattttcgaacatataagtagacattctaattttgctgcctataatgtggctaagtgggcgttttcccaacaaaagtttagtttcttgtcgctatcctctatgcctgatgaattcttttgtaacgactgtgagttctaactgtttttcatttatatgtatgcacgcttttctttaaaaaaaagacttcttttaaatttgaagtgaagaactaaataaaatcaccagtaacaaactaaacagacaaaatctccaatgattgtgaaaaagaagatgaataaaaatgggtatagtgaaattattgggaagatgggaacaaagaaaaaaaaaatgtttcaatttaaagtatatattactttaattatttttgttttttttttattattttgtattttaattagtttatatttttaatttgttaaatggtaagtgatgtggcattattcagatgaggtggcaattttttaagtgaaattacttactgaattattttctaaataataaaagtataattatcacttaatttgatagcaaatagtgagatatctatcaaagttttaaaagtctttaacagaaagtattattatcgtcgaattttttacttgaatatttaactctaatggagagttataattaaatagtggaattattttagaaatatacaaaaattacaaaaaaatattacaaaaatatagttatacaaaattttaaatattttaatgtttttaagattttatttacaaataatatagcttgttttcatattatttttatgtattactcttgtcatttagttgctgttttctagttaattttttattatttgtatattattttaatattatttttgtattatttataaaacaatgtaataatgaaaaaaaaattattcaaacatatatgaaagtgtaaataatttcttaaaaattattcctcatataatatcgattgtaaattattatttgaaaatagaaaccttacaaaaatactataaaatgggagaaagtttacaaaaataccatgacacggagttttttacatttttactgtaccaactttataaaaatattttgtttaaagtttcaaaattacaaaaatactgtgtttcaataaaataaaaaaaacaactaaaaaataatcctagaacaacttaacaaataacacgaaaacaactataaattaaaaaataacttaaaaaatataaaaaataacaaaaatattatctagaataaactgaaaatgtacacgatgaaaaatgcacataaacaacaactgtataaaaaaaatacataaaaacaacagaaaaataactatagaacacctaaataataactataaaataattataaaataacaaaaagacaactataaattaacaataaaattacaagacatcaatcttgttaaaatatataaattattcataaattctctgaataaactacaaaataatttttaaaaaatacactacttttattacatagaaattataaattgatactttatttacaaaaatacctctataaggtgtagacaacatttatactttttatatgattttaattatcaaaatactacttacactatcacttacacaatcaatcaatggttgcagggtgattgatgcgcggttgcgcggtggttgcatcagacgatggttacagggtggttactaggtggttggctgacggttgcatcagacgaaggtttcaatcagataaaagtttttgggtgattgctgggtggttggccgaaggttccatcagacagatgtttcaattagacgaaataactgttagcaaaatatttattcaactgtaatgcaactattgtgaaatattgaaaattaaaacaatattttcacatacgtaactctatctacatnnnnnnnnnnnnnnnaatatgaacaaatttaccattagaaatttagaaaacaacaaaaatacaccaggataaatattttactatagtattgatgtaatttttttagattatacttgagttggattgtttaggaactccatatcaactttttgagatctcctttcatggatttaaaaattgaagtcgggacattagttttatgcaaattaaactggattttcggttgaattttagtttcgtagtagtttttctaacttttttttatgaattcgaaacaacccttattttgattgattctggtcgtcttctcaggtgaagttgcaagaattaatggtggttctttttctggttgaatgtttgtttcgattgcggttgggttgctgcgtggttgcgcgatagttgcccataaagcatgtatcctgggttgaaggtgtgtgtaannnnnntttgtgtatttttttttatttgagttgcatatttatttatttggccagctggaagtatttttgtaatattgttacttttctttattaatcctctaaaggatagaaaaatataggaggagtgctcttaattttttttaagagagaaaaaagtgttaaagaaatgagatataaaaatatacacttattatatatatatatttatatatatacaaagataaaaaaaaattagtttgagaaaaaaaaaaaaagaaagagagagaattggaaaaaaaaaaaaaagaannaaaaaagagagagagaagagaaaggaaaaaaaaaacttaaaaaaaagtcagttaaaggtgacaagaaaaaatataaagaaagataattttttttgaagctttaataagtaaaaaatagtaaaaagaaaataaaataagcaaggaaagtataaatgtaaaaatttctttgtcaaagtataaatataaaattaaaaaaaaaaattaatatttgctgtaaattactattttaaaataggagaagttaaagaatatttttttttatacattaacaaaatttacatctaaataaaatttaattcaaatgtacttccttttatgagtactgtatctaaattaccctcacactcatatataattaagatacaattttaaatataatagattgtgttttttggagatggatgtgtaggtttgtgaaaaagttagggcaaaattttggttaaagaagaatggagactatcgtgaaataatagggataaaattggtaaaataattaaaaaaaaaaagataaacataataaattttgaaagaaaaaataaaattaaaggcatcaatttaaaaaaaaaaagtatttactataatttcttcttttcaatttaggggtttttataccacatactgaaatttctaatttttttactttttcactgtgtgacagattttttttcaaaaatattgtgtttttttttaaaaaaaaaaattgtgcaagttttatactgtatactgtgttaaatttttacagttgtttcacaattattttttaattattttattattattttaattattctattttattattttacaattttttatataaaaaaatatttttataaaaaattctattcgaaagtaaaattataaattttttcttaaaattcaatagatttttttgtaaaagtccctaaaattaaatagaggatacgtccatatttgtaatgaaaataaaggagcgctttcaattttagagatggttgggcctaatttcttcttatggaactcgcatctttcgaggcccaaaagaacaccagtgttatcacttatgaatactaatcaatgaggaagccagcaaaaaggaaaaagaagcgtcaggattttgacgcgtggcaaggctcttgtattcttgacagtgcctaaggttgtctttacaaatgactgacaactaggttggaatatatgatcaaatcagggcagcaacaacaagaactcatatataaaggtgccacgtggcacatgaattatatcagaggacttaaactgctcaacaattattggttggtcctttcaacttttacagttgttttgtaataataatcaaaaagtagtcagttcatcgatatacagttgaaaccaacaccattaattataattaataataaaaaaaacaccattcatatatttgagtttatagtttctatttattttcaatgaaaatctcgaagctctttaaactcttttaaataaatttgggttaagtttaatttaattgatttattattgaaagtacaaaagataatttttcatatgacttcttagctatagaagagaaaaggaaaaaaaggggataaaatttgcacgaaaatctcctgattgatcctaaaaaaattatataaatataaagttatataaacacacataagttatccgtttggagagaaaagtgttaaaaaaaatcagggaaaaatagtgagaaaattttagcctatacttttataaagtccaaccgtccatttcttctttaggaggtttacaatttgattatttgtactacatatatggtcacatatacttgttccataattatataaatacatacatataaataaaaatattaagtatcaattgtttaaaatattttgagattgttgtatcattaagtaaaaactagcaatctaacataatcttaagagatagcgaagttagtcaaacagtgatgtatatatatatatgtatcaaataataaacaaaaatataaccagatacgcagtagatatatattatccgagatcacattgctataattcttcttaatattattttaaaaaataacaagacctaattatatatacttatcttttcctttttcatttttttgttgttacatgcattaaaaaaaagtaacgtggccaagttaataatgatggtatatatttattaatctgtcccataattttctaattaaattcatgtttttcaacgtcagatgttgcgggcggtgttggatttttgcattttgcactatgtatagccaatttaattctcatattagatcatttgttgtttaatatatattatagatttttcaacaataaaggtacgtatatatatagttaactaatgtcgtattagttcgtattgtattatattaaattcaattataatgtactatgttaaactttaatttatattaaaatattatatatttaagtgtttataaaagttaatatcacatatagttttacataaaatataatataatataataatttataatacgatataatacggcgtaccaaataaatccataataattaagattatgactgggttttataactaagtagcaaatagtactcttaattatggttacatatttatatatatagtaattgaagtgcattatatatattgtgttagcatttatattgtcatgtgataagacagttcactcttatagagttgtaaagtgaaatgtttggagaattttaagagtattgattgatgacaaggatctatctatataaatagtttaccctatatatacacacatacaagagtgaataattagaaatcattcgtaaaacttttgtttcactaaataaaatcagtttttggactccctaaaagtggaaagagattgtgattgttttttcttttcttttttaattattatatatttttctcacatatcttgaaaaaacatttggtaatatatatctttgcgtggatttgtttaaatagtactagctagttaagtggcaggcaatatgatttcaaggaacatgattaagattaaaacagtgaaaaatcccaatttattggtttaaaaagatgtatattatatatttatataatcaccaataattatttatatataaatttatcgttggataagctttccaggtaaaccctagagatgcattattattacctttttcattctactggacccattcgccactgtaacctttttctccatatagagactcataatttttaagaatcagacatataaactttacctaaaaccaatcactctctttattatggaagccaaaagtttgatctcccaatatacccttttttgatcccactttctaagagttatcattacattcgatatgatgatataccatatcaaccaaattttcaatttaaaggctttttgaagcacatgattcctgaaattcatgaaagttgtatataacaggaccaagttttttcttaatatatatctagagaaagatgaggtatagcagattatgaagtagttagta

SEQ ID NO: 14647 - DNA, 5247 bp, Cannabis sativa
tctaataagagaaatcaaaaacaaaaacaagaacaaacaagaagaagaagaagaatttatactaaatgggtttgattatgtctaaagacattgctaatttgattctttcaactcttttccatgaaaaagaatgtggtaaactcatggtttctcgttctggaagactcttacaaagatatgataaagagggtttaagacaagttgttgggtaagctttaaagattcaatctttattttttttttcttttctataaagattcaatttttatttttattttttttggttaattgggattttttttggatttttttttgtgaatgagaagaacccctttttaattaatttcattcttagctaatttgtgcaatttttagattaaaaaaatgattaaaaatcaaatctttatttactttttgttttcccccttttgggtcttgacacattcttaaatctgattgatttttttttttggttatgttttgactttgatatatgagaacccctttttaattaatttcattgttaactaatttgtgcaatttgcagattaaaaaaatgattaaaaatcaaatctttatagacttttccccttttgggtcttggcacattcttaaatctgttttttttttctttgttcttaattttgttttttttttgtttttgcagatgtgtaccgtacagatttaccaaaagaaaaagtgatgaattttcttgtgtggaagacttagaagttcttttgattagttcacaaaaaagtcaaagaatgatgttcccaaaggtaaattttcaaaaccccacttaaataatgaaatggtttcatttaatttaaaatgaaatgatttcatataattgacattatttttgttaatttttttcagggtggttgggaaagtgatgaaaatatggaagatgcagctttaagagagacaatagaagaagctggtgtagttggaaaaattggggtaagtaataataatttctattcaaaattatatcttttttatgatcaaaggctcaattttttagtgatgatgatttttgttcttattatgtttattgttatgtattttttgttacagaaaattttgggtaaatggcgttatttgagcaaaagagagagcatagttcatgagggttacatgttccctttacttgttagtgaagagttagatctttggcccgaaaagaaccttcgaaatcgccaatgggtatgtcgaaatgagatcattcttgctaatttcatgctataaaacttgtgttgaagattgtttttctaaagtttttattttttttggtttgttttagatgtctgttgctcaagctagagaagcatgtcaatcattgtggatgagagaagctttagatgaattagttgctagacaaatgaaccttaaacaaaatgaagagaagaaggttgaggaggcgaaatgtacataagaaggccaccctatgttgcccaccgaaattaaatcaatttcggttttacatcgagggagaaggagaaggagggtgtggagatttgccaagagaaatcaatcattgatcttcacatgagaaaactcgaaaaagggtgtcttcctagaaaactcgaagctcgaaaaatcgccacaacaagttgaagagatggaattgtgaaaacttaaaatgaaactctaaaacactccattgctcaagaagaaatcaaagtgtggagatgggaattgtgatgaagaaaaatcgggtgattcgggtgtctcctcccttcgaaaaactcgaattgaaaggtcatgaattgagggggccattcatggcttttcataagcatatccatgtttggtttgctgagtttcttctggtgttgttaacaatgcttctatcaaaaagtggattgtgaaatcagaacaaagcttaaaactttccactccctattaataattaaatcattcaattcatttaatttgattaattgtgaatctgtgattatttcctttgtagtctttgtctaaatcaaatcaaatcaagaggaatccttttgctgaaatgaagaaaaactaagcattaaattaaaatcaccttctcaatagcatttgttgcaatatgataaaaatataattcatgaattctatactaataggttggatggtcttttagtgatcttattaatatggaaataatttggctttctttcttgtttttgggataaaatatgaaatatctaagtattgataagtatggtaccaattttagaggtactatacttattgtaatgataactttattaagcacaatgtcatacaatttaaatattctaatagaaataagagatattatcaaaccaaacaagttgtctattcgaactaaaaacttaactaacataaattagggatactattagaaatcgagtagcaatgactcaaaaaaatatctcttttaaagtttttaaagatatttgtactacacaaaaaatatttttcgaatattttcgacaccttataaaattaaaacccttttgaaatttttttactcattcagatagaattcattttataaaatattatcaaaagaaaactattttgtaaagtaatatacaagtagacaaggtttagaagtcccattttgaaactccatcaaagcttaatgtgcatacttgaagagaaagtgtaattaggtactctagtttgtaagtaaaacatgagttgaattctcctttcaagaattatagacattttcactatgttaggtataggggaaaaaaataatatgaaagggatagaaaataagaaaggaaaattgagaaattgtattagatcctttttatctctctttctaaatataatatttcaacatataatgtgaaatggtaatattacagtacataagttagcgaatacactacaaatgaaaaaacgagtttttttgttgaaaaaaattcctccttgtttaatgatcaatgtattgtttgattctcaacaataaaattagttattatattaaaaaaaaaattgagaaattgtgaaaattactattttaccccttagattatgcctcattaaataatttcctcaatttcttcattctttgtgtttctttccgattttctcttctacaatttctttaattttaagcatagactttttgagttttaaactcttttaagtcatacaaaactatggcccggaactttataagctttcctctcatctaacaatcttctaaactcttcacaatccttgtaccttccaacactagcaaaaatgtttgacataagcacataatcacctccataccctttctccatctccattatcttcttagtaactctttcaccaatctcaatatcatcatgaaagctacaagctcctaaaagtgttctccatatcacaacattagccatctcactaggaacctccaaagctatcttttcggcttcttttagcctccctattctccccaacatgtcgattaaacacccgtaatgcttgatatcgggagcgattccatactccacaaccatcttcttaaaaaactcgagcccttcctcgaccaatcctccatgactgcagccgttcaaaacacttagaagtgtcactcggtttggcttaacaccaactctctccatccttctaaagctctcaaccgcttcttctcccattccgtgcattgcaaacccggatatcatcgatgtccacgacaccaaattctttctcctcgatgatatcccctcgaaaaacctcgctgcactctgtatgcaaccacatttggaatatgaatccaagatcgaattcgtcactctcatgtcaaattcattaaaccctctcttctcaccataaccatgaattgattgacaaatcttaagatcaccaagattagaaacagcagggattatagccaaaagagttattgcactaggctgaatgttatcatccgaaaccattcttctaaacagtttcaaagcttcaccatacctattcattctagtgtaagcatcaataacagaagtccaagaaacaacatttcgattcggcattcgatcaaacaaagaaatagcaaatttaaactcaccccatttgttcaaaccagtgatcataacattccacattacagaattcttctcagacatttcatcgaacacttggtatgcataacctaaaaagccaaaagaaacatacaattgaaccaaagcagtctgaacatagacatgagaatgaaaacccaccttgaaaacaacaccatggagttgagaacctgtaaaaacagagctcaaattcgaacaagagtgaataacgaaagagtaagtgaagctatcaaatgaagaggaaaagtgagtgaagtatctgtagagagatatagcttcgtgtgggaaatctccattggaataagagcgaatcaaattgttgaagagaagaagaaaagtggtgttgtgtggaattgtgaggttagtggtgataatgtgagagtgaatttgtttagtcaagtgagggtttgatgggtgtttttgtatgagattgagcaagttttgaggtgaaagattaggtttttgtaaatggggtttggttgatgaggaagaagatgaagaaaaggaaggagctttaatggtggaggaatgaagaaatgaagaaatttttgtatatctcaaaccatgtaacatatttctctcgttgctttttgcagaggctataaaatgaggagaatatagttatagttagttagttaaatgtatagcttcagctacaattttttaactttttattatctaattttaataacatgtattaaatatttgaacttttatgttaatttttttttttattaaaattggataaaaatacttaaatctaattatttaaataatttattttttttaaattattttaaagtttaaaatcgaataaggcagtgtcaacatttagcttaatgcctatagttagagttaagtctataggtagagctacaatgtttttttttagccataatatttttcagttttaataagagaaatgttaaaagaaaataatagtattcaacattctttaaattattatatcgttattgatacaattaattaaatattgataaataatcttaagatactacatttagaatgttcttttaaaaaattattgccatataaaagtatgagcaataaaaaattatattttttttgtaaataaaattttaaaaaatataaaaaatattttaaaattctgtatcatcgtgtattttgtactttttttattgttactgaatatttctcaaataatccttat

SEQ ID NO: 14648 - DNA, 5561 bp, Cannabis sativa
  modified_base (446)..(448): a, c, t, g, unknown or other
tttatgtaaaattaataattttatgtcaaattaaaatacatccataaatattatatttatttaaaaataattttattataatattaatatttttaagtatttttttttaatgtaattctaaataataactatcaaagtaaaattaaaaaaaaattaaaaaataatatatgagatgattcctaaaaaagtatactaaaatattgaaatatccaaatagactaataaatataattgatctatcaaaactactaaaacaacctaaacagtaatttaaaaaaaaaattaaaaaataatatacaataattccaaaaaaaaattagttagagttaattattgaaattagaattttaaattaataattaaggttcagtggaaagagagagagaagagagctaaaacaagagttaacagcagaatcttagctggatgcaaaagacgaagaagannnagaagaagaagaagaagaagctcatctccattctccattctccattctccattctcaactaaacacacttttctttcagtctatttcatttattcactctctctcttcttctctctctaacacacacacacacagtccctaccaaatcatatctgccattactgtgcttcatcttctcaaccccccatttctcaatctcaagctagagagcgagactaacaatgcccacactctctttcttcttgttttacttgttatcgttttccttactctctttccgtaccagtactgagaaaaccaccaccattctcgtttcaccgcgtcggagtaggattcttcaccaaccttttctacctctagactccatcccaccctctgaacctccgaccccattgatatcgaattcgaattcgaatcctaaatacccattttctactacccctactcctccttctgacgctccttttttcccaactttcgttgctccaccaccgcctccttctcccgctactttcgcttcttttccggctaatatatcttccctgatcttgcctcgtactccttccccaaaaccagcttctcacaagctcgttgctttatctatcgctgctgtcgtttctgctctgttcgtactcgccattgtcgttttcttttactgtcgccggagacgtaaccgtgatttccccgatgataagacttacagatcggagaatagtaataggttgtttccggcgaatcttgaaccgaatgtgattaccgcaacaactacgactacctcgagtaataataatagagctcataagctgagaactacttctactagctctgagtttctttatttgggtactctggttgattcgaggagaatcgaagaaggtggtgactcgcgtaacaatggcggtgctcggaaaatggagtctcctgagcttcacccgcttccaccgcttgctagacagagtttggggttaaatggcgaagtgggctctactgctgatgaagaagaggaagagttttactctcctagaggctccattggtaatggatcgggttcgaggagagctttcgccgccgtggcctctgaaacttttccggttagaagcagtggctcaagttcatgttcatgctcatcgtctagttcagcttctcctgatcgttcacactcaattgggtcgagtcctttaagaccagaatcgttcaagtcgcctgagtattcagatttgccggctactccttctcctccgccagaattgcataatacgaatgttctttcgcctgagtattcagatttgccggctactccttctcctccaccagaattgcataatacgaatgttctttcgccttcgttatcgccggagagagtatccaatgtggagaaggagaagaatgtactgtctccttcgttgtctccactgtctaatgttccagatatagcggtgaaagaatacccagatgggtttgacggaattagacagtcttcactactttcttcgacttcttcgtcgccagtgagaggtttggagaaaaacccagaagctgaatcggctgcttatggtcgaaaggaacaatcttgttcatcgtctttatactcatcgtcaccggaaagagttgttgagaattacacagaagaatctcctaaaaacccagatgatgttttggcttcagtttcacttgcgtttgatttgaatccacatatgggatctctgtctccatctttatctccggtgagaggtgtggagaataataatcaagatggttcagatcgaaaacgtttgtctccgtcaccatctttatcttctttatcattatcagaatctgaggacgaagaagaagtaatggagaattatacaaagaattcttcaaaattatcaaactcagcttctgatgataataatagtcgagttacttcagcttcaacttcggtttcttcctctccagagagagaattaccaaagagcccagatgcttcaccatcatcatcatcatcatcaccaagaagttctaatgcttcagatggtttgttatacgatttggatcttactaggcaacggtctctttcttcttctccacccacttcatcaccagagagagatattcttcacaattcagatgaatcaccaagaacatccaatgactctgacaaaaaggttgagtctttagtgggaacaatcagtaatcttaagcagcaacagcctcttacagctcctcctccaccgccgccaccgttgccgccgccgcctcctttttctgttagacagttggaaactccaattcttgcaaccccaactggccaacctatctctaaaccacctgttcttacaccaccttcaaggccttttgtgtttcaaaacacttcaaatgtttccatttctccaatggagttgccaccaatttctagctcagtggacaatgaagaagacaccccaaaaccaaagttgaagcctttacattgggataaagttagagctagctctgatcgtgaaatggtgtgggatcaactaagatcaagctcatttaagtaagatatatatatatataacttggtagtgttcttttatttggtttccatttttgctaatgttcttaattggtttcaggttgaatgaagaaatgattgagacattgtttgttgtgaacacccctaattcaagaccaaaggaatcaactccaagatctgttcttccttctccaaattcagagaatagagttcttgatcctaagaaatcacaaaatattgctatttcattgagagcactcaatgtgacaattgaggaagtgtgtgaagcccttatagaaggtatatatatatttatatatatatgaaatgcctttgtgaaatttccattgttttccttttctttctctaatagtcgatgtaatgaataggcccccaatgctaaacttgcttaatactaattctagcaaagaaaatgctgcaactaaacatgttccaatcgttaatacaggcaatgcagatgcactcgggaatgagctacttgaaagtttattgaagatggctccaacaaaagaagaggaacgtaaactgaaggagtataacgataattcgccagtcaagcttggtcccgccgagaaatttctcaaggctgtgcttgatgtaccctttgcatttaaaagggtcgatgcaatgctttacattgctaattttgacactgaggttgattacctcaagaagtcttttgatactttagaggtataatacattcagcattgttagttttgctttggattttccttttatcagtttccttcatttcggtttctctcttttataggctgcctgtgaagaattgagaaacagtagaatgtttatgaagctcttagaagctgtactaaaaactggaaacagaatgaatgttgggaccaaccgtggcgaggctcacgctttcaagctcgatacacttctcaaattggttgatgtaaagggagccgatggtaaaacaacgctactgcatttcgttgtacaagaaatcataaggactgaaggtgctcgttactctggttctaaccagacaccgagctctacctcgagtgatgatgccaagtgcaggaaacttggcctccaagtcgtttctagtctcagttctgagctagccaatgtgaagaaatccgccaccatggattctgatgttcttagcagcgatgtctccaaactttctagaggaattagcaacataagagaagtaatgcgactaaatgggactgcaggatcagatgaaacttgcctaaagttttctgaatcaatggaaagattcatgaaaatggctgaggaggaaatatacagaattcaagctcaagaaagcgttgccttatcgcttgttaaggagatcaccgagtatttccatggaaactctgcgaaagaagaagcgcaccctttcagaatctttacagtggttcgggattttcttactgtcttagatagagtctgcaaggaagtaggcatgatcaatgaaagaacaatagttagttctgctcataaattcccagttccggtgaatccattgctggctcaagtcttacctgtgccggtaccacccaatatgcgacacaacagctcatccgacgacgagtgcacatctccttagtatttgtggctcatttcatgttaacatttttgttgcacttagcaagaaactgcctgaaatctgaggtagtaaaaagatgttgaatgtctatatatataaatataaatattatatattgtctttttgcttataagatttgtacatgtacaaaagttccatgtaaaagatttgagttgcttctatagataatatacagaacagattttgttttggtagaaatagttgtgttgtgtacttgtatgtgaaattagtaagatatgtacactatgaaaactttagtataagatagaaaagttgcctattaaagtttaaagcgcgctttgcatttattaaagtaagaaaccaaagtttaacacttactatcttagtatttcttttgtttggaccaagtcaagttttggacttttattaaataacattgctattgtaatccaaatatattatttatttagcaattcaattgggatatccttctattaaagtagaattagaattaaaaaaaataaatcaaataatcagtcatgtaatttttaaatcgtttgaaaatgattgtatcattacaattaactttatgagcacttgtattatgttttattcaccacttaaaaactacaacaataaaaacttttacagcttcattcaacctcgtagttttaacactcaactattgtgtaatgtaggtaattacactactaacaaccccttcaatcacaaaaaacttgttattctcaaccactaacagttatttgacgagccatcgaaaaacaaagaaaaaccaactaccaaacaaagttatgtcattaaaataagactaaaatactcaaaactatattacagagacaaaactaatcgcaatagcaaaatataaccctgaccaagtcacacctatgtccaaaaaaagtcagcaagtctaactaaagaaagaaaaaaaaatctccaatagctttagatttaaaaataatattaacacgtagaaaaatactaagcactaccggtatcttttagcaatt

SEQ ID NO: 14649 - DNA, 13256 bp, Cannabis sativa
ataatgaataaaaacaaataatacgaaataactccaaccagttataactaaaatataactggttatataacataatgaatgaatattttttgggtggatatagtatgagtgtaattatttggtgggttggagtatgttgaatgaatgtttttcttgaatggagcatgttgacttttctattttagttataacctgtttgagttatttcgtgttatttgtttttattcattataacactgtcatagaaccggttctattttaatcataattggtttgaattattttatgttatttatttttattcattatgttatagaaccggttatatttcaattataacccgtttgagttattaatttttattcatagaaccagttctatttttagttatatctcagatatctacttctggtgactttttcagcaacttttccagtgacggttaattttctagcgacttttttagtgacttttccgacgacaataactttttcggtgacttttctggcacctacgacttttccgatactgttgacttttctggcgaaccttattattgttttacaaatatggaattttcacatttttgtttacaaaaatatagcattaaaaactcatataaatgttcatataaatgttaatataaatgttaaaaaaaaaaaaaaaaacttacaaatatctcatggtattatttattatgccataaattaattataccttcaattccttttatgaaaattcctcattgtttagaggcccaagtatgaagccttttcttgattgtatcaattatgataccacaatcatccattctctatttggttggtctcattggcactccagtcccaagcatttaagagggtattgcccttcttcaagcccaatagactgtaaaatcttatcttttcaagtttaccaaaaaagatttgagataagttaacaaaaacttaaaaatgaaaataattaatatgaatgttgtttaaatttaattaatatgtagtatatgagttgttcatatatataaaagaaaaattatagtgtaaaatttagtatttttataatatataatgcggtatggtattattaaatttaaaaccgcaaatcacatcgtactgcatggtttgacgaaaatgcagccgtaatcacgttgtaaaaaatttcaaactatattttttgtacagtgtagtatgatgcgcgtggtgtgtatggtataagtagtttgatgaagacttttactataactttcgtatataaccaacttattatgttgttgtagcattggtctacatcttagaggaaaacaacgggccaatgccctatatgaagcctatagtaagttgtcaacaattggacaattaacacatattgcaaggcattggccatactccaccccttttgtatatgaatatattatgatgatatttatgctttttgcaagtttttttttttgggctcaattgttttatagtgtaggtaaggataggacttaggttgttggacaaggtaataatttctaaataaacatgactcattatcaccaattgttactcctacactcaattatcaaacaacaaaatttatattgtgagtgtgattaaatctaaaaaaaaaatcaaacgacaaaaaaccactatttaatacagaaatcaaatcttatagaaattgtaaaaatgtttttttttttcttcttttgatatgagaaaccgtcaaaatgtcgtttctatactaaaaacattcccaaatgaaacgacattacaatgagcacgtcttttcgacttgatacggcgtcgtattatgtgtaatgagtgagcacgttggtctgagtcaaagaaagagcttgagaatatggtatacagatccgaaggtgggaagagagagatgagtttgacaaggcttcggcaagaagaagaaaaggaagcttctttgcttttcaattatcttcctcatgaacaatctttctgggtctcttcctagaaccgttttcagagctaaagcgagaatgggttcagttccggtgattcgctttcccatcatcttcttcatcagacttttcggaatcattgtcgccgctctgctttttacctggacaaaccattttagaggaggcttggctctcatctctgataacaaagatctcatttttaatgtatcccatctctctctctctctctctttcgtttttgttttgtgattctcattatgatccttacttttgtttttttgaattcaaatgctgctattctgaatcttctttctctcatggttaatgggtttagcttcttattcttttggacttttgatttgggtgaatttatcgtttactaattgagatcaccgttggttccattgttacttctgattctttatttcaacttagtctttgagttaatcatatgattatatgttttttttattctttgtatagagagctaatgaaaatgtttcccttacacctaaagttgtaacaaattcagtttgtagagattatggtatcatgtaccaattggattcatgttattaaattcgggctttttatcgatcttgagccatttcttgggatatttcattgcttctatggcattagataaaacttatagacttggaagaacaaattgctatgtcagatatttctttccttctgggatatgtttttttattttgtttcagcatctgaagcacgcccatgaaaattgattatcttggtgttttagcatttatgttattgtttaacttggcatccttgtctcgtatgcaggttcatcctgtgttgatggtacttggtcttgtactactaaatggagaaggtaaacgcttttccccttttgcaaattcacttctatttaaaattcattgtttgaacttcataagaaaagattttgttaaaagaggagtttgtgcttgttaatttttgtacttcaatgtgctagaatcttgccaactccttaatatggcatttttgaatttgatggagttcaattttcccttagaactgaagttgttttatcgttctccattttgaaatgatgaaagttgattaatatcattctcaattcgatgataaccacttaagttcacaagaattttctctataggactgcataactgaattctagaacacgggctggtgaattcagattcgtttttaatttcttgaactaaatgactgttgtggattggtgcagccatgttagtgtacaagactgtatctggaacaaaaagcttcaaaaaattagttcatcttggactacagtttcttgctttttgtttcagcattattggtgtatgggctgctttgaaatttcacaatgacaagggcattgacaacttttacagcctacattcctggttaggcctagcttgcctatttttattcaccctccaggtaactttttggatcattttctcccaaacattacattttcttatgtacttctaacttgagttagcttctggagttactcttatggaatgtcaaatcatgttttcttctgctttggcacagtgggctgctggattcgtgactttttggtatccgggcggggctgcaagtagcagagctaccttgctgccatggcatgtgttcttgggtgtttatatttatgcccttgccattgctactgtgactactggtatcttagaaaaaatcacatttctgcagaccaatcaagtgatatcacgctattcaactgaggctatgttggtgaattctcttggtttattggttgtggctcttggcgggtttgttattcttgctgtcattacttctaccaatgaaaaagttgataatgttagagaagctacagagtaagccaaatgaaaccaaaatagttcccgtagttgtaggagtgaggagtaatacttgctagatcaaaatgtttttgctatgtatttgcatgattcattatattgttcagcaatttggtttgtttgtcctctataatgtttttgccttatgctttgacttgttgactctacgattttgcaatctgcataacttagaagcctgaaaagaacacacatttggcctttttatcttgtacaatcgctatggtgcatactgcataccctttacaatgcaggatgaaaactgtaaaacgggagaaaaataagagcattgctttgaagtacttacagtgtgcaacaccatgttatatgtttagtttaggaggttcaatattataggatttaattttacatttaactcacataaaataccgtattctgtggtatattggcaacactaaaatgccttgtagcaattccttgaacaaaaaaaacttgttccaaattgtacatgtagacttccgagccacgaatagagaaatattctttttcatccttgtggttttggtaaaggaatactgtctaaggtggttattgttaaaggttcaaaaacttcactttcacaatttaagctaaatttcaaagaataaacaaggttttttctcccctaactatgatcatgatagagttctgttctctaatttttatttatttgtagcgaaaatttctaaaccaaataaattgttgcaactatccctttagttacatttcgtacaattttaaaaaataattagcccatgtgatcatgagttaccaatataattacaatacaagaatttatttaacttaaaactacggaaaattcacattaaataacttaaagaaaatattcacaacaatttttataattcaaaacaaatttttgtaaaataaataaataaagaaacaaaactcgacaaaaatcataatttagagacaaatcttacttatttaatttcaggaacatccgatgagatcaagagagattggattgaactgaattcataattcatgactaaagcatgcaattttttctttttaaaataataataagtaattctacatcaaaattcaagtacaacaccagccaacaacctcaaatcagcgaacaaaatatgaaagaagcaaaaaaatgaaaagaaaaaagtaacggcaaaaatgcatggctgaatctgcccggagaggcaaaaatattgcactcttcactgagtcaggactaaaattacaaatacaaaacatcaaaaacttgccggggcaagtaccattattccaaaatgatgagaactagaaaagaaatgaagcaacaaaaacttctgtagtcttattaggatgctgacattcatttcagcattgcacacaaaatttggagggcctctccttgattcatgtcacaaggacttaaatccacaagtgttctcttcgatactcgcgaacaatgacaggcacgctagttggtggcacctgacagaacaaagtgaaaagagaaattatcatttgtgtcgataagacataagtgctaaatctagttgccaaataggtctatgcaaacattaaacattgtcagtgtgggtgaacaaaagatatgccagtatgaaactgtgtctattcaagagtgaacaccagagtctaacagatgaatagaaaatactcaaattttcaacaatctttaccatgccatagtctgtgatgatcattgatatgtaatctgaaggtgtggcatcatatctgccaatcaaaatttaacagggccaattagccaacagtataaaaacaaacatttgcgacactgcattactagaatcatcaatacttacatcagattcagatgttgtaatttttcactctttgcacagtcgtccagaccaatggtttcctctctaccaggaaccttggagatggcatctggatcacctgcaagaatcggaacagataaaactaagcccctcaaacacagcagaatgagaagcccatttgagatcaactattggtagaaatgcataccgagctcattagagcatatagaatcaagctgaaccctttcgtgaaatttatacgcctcgcaacacactaaaacaggtacacgaaatgcatgagcaaccatagcaacgcatgcagtcccgactctggagtatactgttccattacataatactgatgatgcacccaggaaaacacgagtaacttcatgcatgatatatgatacagcatttatattagtgtaagtgcagttaagacccttttccaccaacctacgaagtaagagttggccttctagttttggacgagagtccactactacaactctgaactgtctcccaagctcatgagcatgttgtagtatcatttcaactgcagacgaggagccatatgtgagaagaatgtcaccatctctgattttggtaacagcatgtttgacgatcaccttatcagccagaatgattttctcacttatgaaacgatcaatatctgactgaagtaatgtttttgcttctgactcagagagggtaagaggtaatttggcgataaggcttttaagaaacctaattgcatttcccatgctgatggacaagggcctgcactcaataagaaatgatacataactacttatttttgcggtcaaatcccgattaagattcttttcaggaggtgtggaatagtctttgattgcctcttgaaatgcttccagcattgcaatacatcgagcattgccaccagaaatatctcctgatagatattgcaacccaacctggcaccaaaacggaaggctgccttagaccaatgtaataataaaatttcataatgaatgatctcaaagataagacctaataacaaagaatcttaacttcatctagcagaaaggcaataccaccaactacctcatatcatagacaatttatattcattatttaagaatgcatcattaagtgcaaggaatgacatttgtatacataccttgtatacagcaggatgcacggggtcaagttggaagaactttgattcaagatcaggaagctgagttccatgttcatattgaggcaaatgcctgaacaactcaactctgttagtagcctcagtttggtttaccattgcacgtctttttgccttttcgacccggctcttgtcatcatactgcatgcgtggttgaggcacatctttcttcctatccttttctagctgacgatcaccaaccttcttctcagtggctgcaactgaaacattgtcattcttttgtgaaggggcctttgtggctttagctggtttcacattcaccgccgaagcagcagcaggtgtcttacccccatcagctaatgatgaaaagaaaacacaagctattcaatgacttgtaaaatgattcaatcaaatactaaataaactttaaaaagcgtgatgaataagcacaaatgtcagttgcacctttagcagcagcttttgcagctcgttgggcctcttgaatggcacgcctttcagcttttgtgcttttctcttttgctggctttgaattcagaggtctgtcattttgcaaaccacctgatgctcctccaactttttctgcatttattggttcatgaattgtgttattttaaactcttacaaacacaagactcccctatgtttgtgaacaataagaaattctcatcttattcacaagattcttacaggcatatagactctctgaagcacaaacatggtatccaatttccctatattttactaacaggaagaagaacacacagtcatctctgggttttccctgctaattgcaaactaaatgttacatcaaagtctcctatgctctcatacctatttctacaaatctccataatcattcaagaaaagtaaaagacttgacaactccatggtcagtctatgaattgccctctcaataactaaaaccagtaatcaataaacaatccatttcttacaaccccataaatttgtcctcttttctagctttttcatacttatgaactaataataagaaaaaggaagcatgaacatttcttgtatctaaagaaatttatcatcatatcgctatattttaccctttgatttgacaattttagtatccaaaggagagaaaaaatggcctgagtaggctgaaaagtagggaaacccagtagagactatttccaccaaaagcttctcacactttatttaccaaacaccctaaacctaataattcaaagcaacacaatccccaaaaagaaattcagtaaatttaattaaagaaatcatttaaaaaaaaaagcataggagaggaataccaggtggtaacttgtcgacggtggacactgttgtcaactcactcgccgggacgctactcgacctaagtgccgccagatcgaatcctccacttggtaaagaagaagcagcagacgccctaactgagctacccctgacagctcggccaggcgacgaaatgacgtcgtcggagaactcgccgtagctcaatccaaccctaccggcgaaagaagaagacgccgtcggagacatagtagaggggaagaaatccgacgggttatagctgctgccagcggcgatggattctcggcggagaggggaagtgggatttgggactaacggaaccgtacggttgtcactagtgtgacgcggcggagggatcatgaccggagaaagtgagttaccggagggggagatttcggctactggaggagaagaaggggaagataaaatgggttcggactgactggaattggttctgtcgggtggggcgaaaaaccctacttggcgaatctttggatcgatcacagtacgcggagcccggcgagaatccattagtagaaaatgggttgggtatttgaaaagatttaatacactttttaggggtcggaaggaatgaggactgttagtccctcctccattcgagaatcgaaactccctttctaagaaactgattggctgggaagaaaattctaaagttccattacggattttcccggaatattttagctggagagagaaagtacacaacttaaagaaccagactctggatttttttttttttttttttaaaatgatttttctattatttttattttttatttttgagaaactaattagattaatcaatctttactgtccaaaactaagatcaaatcctcaatctcagcttctatgtacaaatactaatttagtgataaagaagaaagagtactgaaattattaatattattattatttacataataataattttcaaaacaaaaataaataaaggaatttttttaatttaaatggttatagttataaatctcatacttttatgaacaataatactaaactaatggatggagaaagaaagaattccatctagtatatattatataagtgtatactgtagatatttaataaattttgagaaatttaaaattatttacaatataaaatttagctttcaaataatttatttcacgcgcttataaaataaaaaaattaagcgtgcaataaattctttaaattttattttcgacacattaaaagcatatttggtattattttttattttttttgtttttaaaaagtatttttaaaaatgagaataaaaaattatttatgaagttttcaaaatacaagtcacgtttggttagttaaaaataatattaaccaaaagtgaattgatttttaaaacaaaaaacaatattttattattgtcaaaattcttaatttttataactttattttttgaaaaactgttttaattaattacaacatatataatcataacaaaaaatttgattttttttttttttttaaataccgaaacaaataaagatgcaattggtacacttttttaaagagtgcattgtagaattttcatattatacattatcataaaattatggatagcttaattttatgttgaatgaaaatacacagtcaagaagaggagggatttgttgttgttggggtaggtaagcatgtatgaagatttgagggataatgataataaaaatgataattatgggaagataagaaaagttgaaaaagaaatgtaagtgggggtcttatatcttacaaattacaataatgaaagcaattttttttttttttaaattagggttcctttcttatgctatcagcctatcattaaccatcgatgatgataggtcatttctttacaattcatcatcagttttttaatacgaacagtcttctcccactaaaactagatttgcaatgtagttttcaattaacagtgaaatatgaataatttttcttttgtcaaacgagtacatgtttgaaaaactatgatcaatgcataccacttgcttgaaaagcttaaattaactaatcttggatttcacaacactatgatacaaacaaattcacataataactcatgcccacgaaaacaagttcagtattccaccattctttagttttttcacataagaaaatcttagacttcggagttttatttgaaattcagatttttttcatagataaagaaaatatatactataaaaataaattatacatcttttttaaaattattttgtctaatttgatgtatcaaaatatggtaaagttaaaaacaaccaaaatagacggccttcaacaaaagagtgtcaagtttctttttcctttttcaaggctttaaccacatccaaagtgcatatatattaatataccaccaccaagactatttgtagtttatatccaaagacaaatcagcaataacacaaagatgtttcatcattagaagaatacatgtttagatataagagacgagaaaaccttaatggattaatgatagatccataagaaaaacattaaaaaaagctgcctagcctgactggattccattcaaatgcattaacaaagtaaaacattacataaagcttgggcagacaggaccctttgacagccccaggcgaacttccatcccgtgatgcatatctactggtcggaaggtttcggattcacgtggatctgcagaaccacatatcaaaattattaaaaatgaagagcaccataatcataatgtatagaacaatgacacggctattagtttgcaccacacgagtaaaaattactctccctttaagaagaattgtacaaaggaagtcctggagatttgaggaagtgacgtggtaaactaaaaaaagttcaggggaagaaagggatacattcacgagttcaaactcttaaacgcctatcttacacagagaaacaaattcccactcattattcgtgtcatcaatcatttgttttgcttcaattgaaagactttgaagtctaatgtgaaggactgaagatgagtgagtgaaaaagaagacattcgaagataaaaaacaaaaatagaaggttacacacttcagaaacaccaaaggcgtttttgttttgtgctaactttaattatcaagggggcatggtataaaaaagactaacacctgaacagaaaggagaatacttagaagtatcctggtcattaggcaaacgacttgcattttcttttaaatgaagataaattggtaggaataacttaccatttagataatcctcaaagcaaaagtcatccaaagctccagtaattgcctcaaaacccagcattgaagagggaattactcctggaggcctctgaaatctgcaatttgattggatatgcacaaattgaacaaacacgtatcaaactgaactaaataaaaacaaactaaaacataaagttccaacctagttaccaaaaacaaatgatttgtagacagtttctttcacactgattagaatagccttagaacagtgaccagacatttcttaatttctaacaggcaattcatcatggagtacaaatcaaggatgctgagctcatgcattctgctttttacaactacaaagctcatgaaatgaaatcgaaaaagaaatccaagaatcaccctctaaaatcctcaagaaattataaaataaatgaacaaaaagaggtatttcaacagaaactttaacgcgttcatattttctacattaaaaaatatctaaagctgagaatcaggcaaagcttagtattacatgccatggcgctaataaagttccaaaagtgagaggtagctccaagcaaccaaactcccattcaccccgaaaagttgtctcatcatattgacaaacatatacatgactcatcaaattaagcacagtatagtatcatgcttacttcaccatttcaattcatttagaaatctgactctaaccatgttatacatacctagattctctcttcttttttttttctccaaatattgttgaactatccaaaaaaaaaaagactcgataacaataacgagtaaataaaaggtgaagaaattatcaataaatctaataatcagaaaaattaagacagcccaataaacaagttttaagagaatcggcttaccgtgaaagaatttgcctgtcaaggtccattttcaaggaaaaagcactcccatatgtgttggccagaattttcctgtttatatcctcttgtctttttatcgcctaaaaccaaacatatgatcaaatttatcaacctcaaaatctaattcaaatcgaacaacgaaaccaagctattttcttggaaaaccctaaatctttttcactataatatacggtatgtgaaaagcaacaaccagttcgaaattccaaaacaatcgccctagtcagagctgaggcagtaggcatcaggacacttaatcagaaaaggaaaaaccatattgtaagtgcattagagagaaagagagattacagattggcaagccgtctcgatgggatgagatccaacgatgtcgctcttgacgccattaaggccgaagcgaagagcatcgttttgaagtcctccgatctcgtgggctatggtcttgggcgcctccattgttgttttcttcactgcttattttcgtctccgctctctgaaactttctgagcaaggcaaagttttgtgttttagggacttgtactaaggaagaagagagatatctgggctaataaaagcaacttactcgccatgatacgtcgtcgtttcatttctactctttatgggcctagcttttacacctttagaagatgggccaacaagctttcggaaacccaatcattttgttcaattccatttgtaagtgtaagaggaaattacactttataccaactttttgtttcatattttaatttttacttttattttactattttttaatttatacccacttttataagttatattctcattatgtgcattaaaaagtctaattttgataaattttatgaggttatatttagtactttgattataaaagagagtttttattaattaaaattattttagagttatatttagttaatgtgtaataaaaattggtagttgtcaacttatccctgggcttagatgcaaaatgtacacaactaaattagtaaatagaggaaattacacttagtatgggattttaaaa

SEQ ID NO: 14650 - DNA, 19256 bp, Cannabis sativa
taatatttctttctggtttctttctttctacatatgagagaaactctctctttctagatctggacctttcatctcattactctggatttctgaagagaaaaatgaagctgtaagtattctctgatttaagtccttctatttataggtgttgtaatagtagaagaagtcagttaggaataactgactgatgtcttgatgttggattgcatatggataggttagttaggattttaactaactgttttaccttattaactgttacaggttaacttatatggggaattaatccaacaacacaagtataaaataataaagctacacatgcatcagtctgtttgaaacagtgtgttaaattttttgattttacagaacgtcttaaataactacaatctacataaccacaaaaaacaaaattagactaaaaaattatttcggatgccaaaataaataaaggtgcatcaggagtgtattgtagtatttttctatattatttatgttaataaagattaatctagttttattaaaaaaactaatgtacaataataaataatataatttttagtgtgacttttggtgttgtaattagaatagaaagagtcttaactatcaaattcaatgttagtgtaacactaaatttaatgttaaagtttgagttgctctcagtatctttaatggtgcatcatcctaccaaattagctagtgtgaaatctttacactattctactaagaattcattaaattggtatgcaccaaatctttactaattgtgttgaatttggaatcaacactaagttagtaaataactttttatttttatttgaacccttcttttaatttgttttgaaatatagtggttaattatattgtaaattattaattatatttttttttgataatatgtataattatattgtaaattaattgttaatttaaataatataaaatataaaatcttttgaataaaatatttttattaagtatcatatttagtgtgatgtttgatattgaattattagaatttttacactaacaaaattacaccaaattagtaaaaaaaaatatacaccaaaatagtttaaccattggagattagagcaagtctaaacaatggtaaacaccaaatttgtataaatattatccaatggcaaacctcacaataaattttcaaaaattatgtttttctagtttttttttttttttttgaaccagaattttgctagttgaaaaagttaaaatatttccaaaaattatatttagtaaaattattttaatttttcaattttcaaaataagatcacaattttaaaaattttgaaatgaaaataagttactttcaaaatacaaatttctttaatcatgtagtctattttgtattttttattctcaatattcactttattttctctcactccacttatataaaaacaaaaataaaaaattatcaaaagtagttttattattaaaattttaaaatacaaattgtatttttgtgtttttttttaatgaacgcacgcttatacatttctggtgaggtgaccagcggcactcactacaagtaacaactatatgaatttgtgtttttgggccccttctaatcaactccaatatacaagtcatgataaatgtctttgatgacacctgacagacttaaaaaaaaactacaatgaattaatacaataatgtgaagataaagaaagtaataagtaggagcacatggccaagcaaaaaaagagtgtcctatccttgtgttaatgcagctaattatgaggttaatgatataatcatgtgattgaagggtagtaaattacatataattgaatgaaaacttggttttcatcactagtaaacttgaatggacagacagacagttcggtcccatgccaataatatcattcattcattactctatgatccttaatatatgaccatcattacttcataatggatagggatattacttttttgtttatttaaataaattttttggtgttcaccgaaagatacccaaaaatctctatggcattatcaatctctatacttatatattcatttttccacagctaagctaagctaattaatatacattttctattattttaaaatattagctctaccactttaattaagaattaaacgtagaattttcttttacatgttaatatataacaattcatctaattttaactctgatacggctaaaacagaaaaaaaattattgtaaacaatttttttttcttaaaacaattgcaaaactgttcacctaattttccaacttttacatgaacaactcatgttttatcaataattattttttgcattgagttagtttgtgatttttttggttatattacaagaagtggtaaatagctataatcataattgccaattttaagaggaatcttaaagtttagttctgtaattttactcttccttttctattggtaaaaactaaaaagttgaggagggtaacaagattagcatcaattaaagttaaggcatttctttgccttgtcattcattcggttagttttgattactacataacatgaaaattttcccaatcaacttccaatttgaagcttttcttttagaacaaaataaatcaaccatgaaaaccatggatcaaagttactaaaacaaccagaatctcccacctcattcaggggcattttcgttatttcagagcccaccttccgaaacctaaagccactgaaagtgaaaccaccaccaccgtttgccaactacccaaaattatataaagatataaaacggtcgcaataaatgcaatgtcattttcccttgcaattaactccaaaaaatccattaattttttcttgagtaaaattaaataaataaataattatttctcacatttcccggaattgcttctactacactcccagttctggtctcaccaaaaacctaaccccaaatctataatcccatttaaattagtttgatcatctatctcactatatatacacacccacataattaattactcagctgcaacttacatggttttctggctctagggcttttgcatttttcctgttaatctcatcgttcacatttcatcactgggtattggttgggcatggaattggagcggccgaggtcggtcaatccggccatgaccttcgacgaggtctccatggagcggagcaagaacttcgtcaaggctttacaggttcaaaaaaatttcttgaagaaacttctattttccgtgactcacacgcccgcacgcgcgcatgcgcatactgtttttgtgtctaggagtttcggggatcggatctgattgatataaatttcttgtttttttttttttgagcttttggatctttcgtgcatggtattgaagtcaacttttcttattttgtttttgctgttattggttgacttaatgttgtggactgcattaatgaattggttttggaagaatgaaaatgtgagaaatagttgtattgattctttgaactaacttgttctgatgtctatgagaggatgaagattgagaagagaatttttgaaagtgtcttaaaagttacccttggaacatttattcaagattagtgagttggttgctaaaagtttagcatttaattgcttttgatgtttggttgaggttctttatgttatgtctctgatggatatgtatagagttggttgttaggaattaagaatatattattgctgttggagttttggtattctggaaagaattggagaaacagaaaattgttgtatcctacctttttcttccaccctagttataaaacttctgttggtattctcctgttaaatttcctttctgcaacatggttactctgtttgaaaagcaaagtcggattatttcaggaactcaagaacttaaggccccagctttattcagctgcagaatattgtgagaagtcttatcttcacagtgagcagaaacaaatgtatgattatcttcttattgtttaatattttcttgcaagctgtaatacaattccattttgtctctcttttttttttcttatctttgttcgaatgtcatgggatgtgcaagctgatcatacttaacttaagatttatacaaaaactgaaaaacatgggtgactacatttatagtaaattattcaatgctcttgtaagacagaaatctcaattggctgcttggatttgtagtgaactagtgataatatttggatacatgcattgcaatcattgtttgatgaaagttactttaaaattacgtaatagggtactggacaacctgaaagattatgctgtacgggcccttgttaacgctgttgatcatcttggcactgtggcttacaagttaactgaccttctcgaacagcaaacattagacgtctcaaccatggatctaaaagttaactgtataaatcaggtgagtacgtgatgtggttctttgttaccatagtaacaatgtcaaatggatggacatatggcatgtctgaacaagtttgaactttgaatgttagcaacttcttacttgcaaaacgtacacggataaagaaggtcttaggaagcagcagttgttggcattcattccaaggcatcacaagcactatgttttaccaagtaagtttacttatcatagcatcctataaaatttgattttggtgcaatatctgacttttttctgtcgcttgtattcatataaaccagattctgcaaataagaaggtccattttggtccacttatacagacagatgctaggcaacataattttcaagctagagctcgtctgcagccttcaagtatgtagattccagttgatccagctgtctgcattccagttctaagctactataatttttgtttctgttattcacttttttttcccttaaggttctcctgcatcaaaaacactttcctggcatttagcctcctcagaaacgaagactactttaaaagggaccttacaaactccaacaaagtgagtgcaaattttgctatgagaaaatgttaaagcttcagtagtttttgacgtttgttttttttttaatgctccctcttcaatgggggttgttttcttatttgcagcactgaggatacaaagaattctggaaaatcttctggggcatttcgtcttttaggtatgtagaataatcaaagcattgccagttaaatgacctatcgctataattgagctttggttgtataatttaatgcctgatttgacaacctcatttgtttctttctcagatgatgaaaatggtctggcaacaaatggaggtccaggttccaagcaaatattgggtgctactcgcagggtatatacatgcttgcctttttgaaaatgaatgattagtataattagtttgcaaaatagcatagttttcagttgatatgcatatttttaggtatctcttgtttgaaatttgagatacgtacatggttgcttatccttaaattagaagatattgcttggcgtattatttttcttccaaatttccttattcctgttttacttctcaaaacagagaacatcaaatgattagtatgatgtctctttttgcaggatgcattagagggatcaaaacctttgacagctttcaggtcttttgacaaccaaaatcgacaaattgtccgtgcccctgcacgcagtaaaagtgtactatcagctttctttgtcaaacataaaacatcaaagctgaaagctggttctgtttcgtgatacctctagtgaaacaagttgaaggatcgaccctgcaaagtctctgacctctgtgggtcaagtaatgagtttctcacactgccacactcttatctttttgcggatcagaggttcttacatggctaattatcatatcaacaccttggaaatcaattttacccttctttcctcctaccctctttttgctgcttaacaataataaaattgtgcatataagtcctgtaatgttgatattctagtacactcgttggtggatatcttgttaatgattaaagtaatgtctttgtgcagattactgcatcttttaaaaccgtcgtttatgtacttctctgtataaatgtcttgtcttcattaaaagaaaatttatattgattatgctcttttattattattattggctcaaattttatgttgattatgcttggttacgttggttgacacataaaaatgagagtaggattgcagtaaaaattaataagagtagcaggggatctttgtcattaccattctactgccacaaacctagagttttatttacttcgttagagttgatgaaaagttgtaaaaaatccatctggaattatatccttgtaagaagttgaggtcaataatataattacacgtagaagcatgtatttgctcctcaaatttaacaattttttttctccttgcaaactagttttaagttaaatccacataaatattggcttgaaccgaattaataacaatcttcaccaaatatgggagcgtaatactagtattattttctgaatggtttttaacttttaacttgcattcattcattcaatgtgaacatgcatagattttaattccaatccagctctcacttcagcaccgactaaacccaaaaaactgtaaaattagtcgaatcccccaagaaaagaaaaaagaagatgaaaaagttctcatcgtgtagcatgaaccgtccgatgtactgactgggaatcagtttgacttacagatccgatctaatctaaattacagaagctccatcatcaaactcatatttttcaattctaattctatagctcaattgcaaaagaaaggagaaagctcttcgcgcgaatttggctcattttagtccatgctagcttcaaatgtcggcaaattctgagtgacccatctcgaatttgagccataatatactaaagattacaacttctttttttggggcgctatgtcgttcttgcaccagagatcgattcacaacccactttcgaatccatatccactttcccctcgttcctcatcgtcttcgaacagatccttctcccttttcagccgcattacccttttggtcctcttatctctcctggtgatcctcggtgtctttttgccatgggcggacatgcctgagggactcttttcaacggttaggccatcaataaccaagtggcacagctacacactggctcaagcggcgtcgtttgttgcgaagaatgggactgtgatcgtctgcgcagtgagccagccttacttgcctttcctcaacaactggctcattagtatttctcggcagaagcatcaggacaaggtgcttgtgatagccgaggactatgcaacgctctataaggtgaatgagcggtggcctggccatgccgtgctcgtccctcctgcaccagattcccaaactgctcacaaatttggttctcaggtatggccgtttttctgataatgaactttgttttgatgttttatgcttttctttacaaaatattatggacgtgatcataggcttgctattgaattgtgaattattagtattgggtcatcctataatcatatttatgcataccattgttggaataataggggtagacatcctatgatcttctgctgtccagtttttatgctagcaccaacagtacaaggaagaaggaatgagagttttaatgatctcagttctagtaattttgagtatctagtttgtccctatatcattcttagatttgagtagagaatggagaacttaagtctgtaaagttttgggggtcctgtttctgtttttgttgctggtttttagcgtgtttctgctaaatttcatgtaacggttttcctccgccacaagtaaggcttttttcaatatataacagataggggccattttaagacaagtggcccttgtctctctttcaaaaagtttgttccctatctgtacttggttcgactctggcaatgttaacagaacttatagttcatttggcttctctactcttgctcctcaaaatttacacaaatcttgtaccctttcatgtagggatttttcaactttacttcccgaaggccgcgacatttgctgcatattttggagcttggttacaacgttatgtacaatgatgttgatatggtgtggttggctgacccgttcccttatttggaagggaaccacgatgtttactttacggatgacatgcctcaagtaagtccacaaattttgctctgagaatttgatgtctgctagtttcaggtgttagtatgatcatttgagaacctgttatgtcttctatatgaactctagccattgactcattagggagatgatgctcatgtgctcttactgctcatcagtgtgaaaactttgatacctttagctgttgatcaacttgatctcttgtgtccaactgattaggaagtcttatcagatacttactcattgttgtattccaggtgaaacctctgatgcattctcatgctttgcctcctccagggaagaaaggacgcacttacatatgcagctgcatgattttcctccgctccacaaatggagcaaagttagtcatgaagaaatggattgatgaacttcaagaacagccttggtccaaggcaaagaaagctaatgatcagcctgctttcaactgggcattaaacaaaactgccggagaggtttatatttttatttgccttcctaatttaatttacctaatttttctcaaatacacagtatatctttatcccaggactttgaaggttctttcttcagttcctttcttccttcaattctgaatttacttgtctattttcagatttatatcacatagaaaactatgtggtatatttaaatgtatcaggttgtgaaaaggttcttataatcagatgtagtggggttttgtcttaggtggtgccctgcataaagttaaaaaccttctcaaacttgcgaagttttgccttgatagtgatagactctttgatgtggtgttcaactgtgcgtaattatgacaatgtatattgataattaatacaggtggatctgtacctgcttccccagacagcatttccaacaggaggactatatttcaagaaccaaacttgggtacaagaaactaaaagcaagcatgtcattatacataacaattacatcacgggttttgagaagaagataaagcgattccgcgactttggtctatggttggtagacgatcatgcggatgagtctccactgggtagattatgagattacaaatacgtgttgttctattatcaatgcctttctgttcaagcaatcaaaccccttactgtcccataccaacatctatgatctatctactggttttgaaggactccctttgattgacatgagtgacactagtggcatattggcaaattgaaacggtgcagcctttaattttcttttcttcgtttaagttacatttgagaaaattttgtaggggataaaacatcctcctcgatgaattatgccaagtggctgtaccccgtaaatgtagtcatattgattctttgtagtaattattttcttcaactttgtcttggtttccctcaaggcgtacttgccctctttttttgttcacaacactctcttattcgctgttttgatcgttgtatcaccatataaaaaccattgcataaaaaaactagaagtaagatatttaaaatgaaaataataaataaaaaaaaatgtatgaaaaacatagatagctgcgtctgccgggagtcgaacccgggtctattgcttggaaggcaattatcctaaccgttggactacaaacgctaattgatgaattggttaactataaatttaattataaaacaaaaaacatcaaatgtcggcagctaacttcaatccaatttaattataatttctctacatgcaaacaaaatggggcaactgtgctaataaaaaaagaaggtttagaaatttagattaatccacaggcccaaaagttattttgagagttttggtttggggggcactatgtctatatgtgcattatcatgttggccaggccatcttaccatgtgtagtgtgtggttgtccaaagctgttaaataatctagtttacaaactaagattctttctttaattttgtttatgtcccgaattagtcccttgtcagtaattacagaagaacaaatgcatgttgtcaggcatgtatttatatattcacattgcttcatatgcctttttatttcttttatctgtgttgtaattttttttaagtatatacaattacacacgctatttgtgtttagccttttataattcaaacaatgcaaatgtattagcggaatgttagttatctacactcaaaacaaatccactaatgtcctactaagtaccaaaataatatctaacctaataaaataagttttgcatgcatataatttatttaaatgaattaataaatgtatatcaaatgaaacaaatgcaagaaaactgaaaatttatttatcacttgttaatgaaagtgaagcagttgattttatcacataaaaatattaaatgaattttagaacaaataaataaaaataatattgactatttttcagctcagcagagaataataatagattttttttttcttttcttttcttcttattatttgggtagttacccttaaaaaacatatgaaaaatctgtccaaaaataaataaaaaaaagggtaacatatgaaaaaaaaaaataatttgggtaataaataaaataaaaatgtataaacactctaattctagacaagatccacgtcaaattattaccaccctaaactctctccgagaccctctccgagaccttctcagacttctcttttactcccttcacaagcaaactgagaaggaaaggacgcagtaagctcaatcaagggaactaaaagatctccattaaagaattgcttgaaaatcttttctgggtcttctttagttggttggatttatatgtagctgaattaaagttgaagtttttcctttctgcttgaaaagctttattgggtcttctttattacttggttggatttagatgtagctgaatcgaagttgaagtttttctgttctcttttttatatgggaagctaaatgggttctttggaagttgggtcgatagtcaagagggaccctcttcttcggtctttaacaggtagagctgataagaacccatttttacagaggcaaagatcgaggttctcaaggttttttctcttcaagaagcttgattacattcaatggatttgtactgttggggtattcctattcttcgtggttcttttccagatgtacttacctgggtcagtcgtggaagagtcaataaagactttgaaagaggatgaattcagttctggggatttgatgtatctaaaacagtatggaatgttggattttggtgaagacattagatttgagcctttaaagattttggaaaagttcaagaaagaaaatagagaagtgaatctatataatgctttcaaccggacccgactgcgttatccacatagaaagccccagcttgctttggtatcaatattttcaattttcttcttaatttcactgctctttgttttgaattacttaatgttcagaaatggtttcagtcctatttaattcagtactggactttgtaaatacgttactattatttggttgatgtcgattcttttacttaaaaggtatttgcagatctcttagttgactcccaacagttattaatggtgactgttacagctgcattgcaagaacttggatatgaaattcaggtgattttattttctttagttggatttctctagttgacctctactctgataaaacataattcttgattccagtatcctgatgggataaattcttgtaacactttcatatcattatcaagatttaatcttgtggtagagttcgcatatggattatggaatatggctagttgactacgagagttcataattggttaggacataacacatgacttttaatatttatattttatattttatttgcaggtttattcacttgaagatggtcctatgcatgatatttggagaaaattaggagttccagtcagcattgttcaaacatgtgaccgagcagatatcacggtggactggctaacgtaagccccattactctaattttctaatatattgaatttacatagctttcaatctgattaacatgaatgcttctttgcagctttgacggaatacttgtgaattctcttgaagcaaaaggcatgttttcatggtaagagtatcattttcactggcatcgaattactttgcttttcatcttgtatgtttgctttaatgaacttaataagatgaaagctttctgcaataggacggtagatgggcatggaaccaacattccttctggattactgacccttttgtgttatttctattagaaacttcctaatcaattaaactgaatgattttacttgttacagttttgtgcaggaacctttcaaatctttaccaattgtatggaccatccacgatagagcacttgctacgcgttcgctaaagtacacgtcaaataagcacattgaaattttaaatgattggaaaagagctttcaaccgttctactgttgttgtcttcccaaactacgtcttgccggtaatatgaatgacaagttgaacactgctcttcctatcacaatattttgcctataacttttttttttttttttgcttttatacttacacaaattatagacctataaatataatacatgataatatattaaacgagtgaaaaagtgaaccgtgtcatgaccttgtggttatgcttcctctgaatttgtggctcgcattgtttcttgttgtatgatacatctataattacgcagatgctgtactcaagttttgatgctggaacctttttcgttattccgggttctccagctgaagtatggaagacagacagtcttgtggcatccaaaaatgatgtcctgcgttccaagatgggatacagttctgaagacattgtaattacagtagttggaagtgaacttttgtacaggggtttgtggctggagcattctattgttttacggtctttgttaccacttcttgaccattttacatcatataatgattcagtttctcatctcaaaatcattgttctaagtgcacattcaacgagtaactacagtttggccattgaggtactaatcaaaataaattgtgacgctaggtgtttctgattacatcacttgatgcttcttatctaatattctggtccttcttaggccattgctctcaacttgaagtacccacatggaattgtgaagcacctaccaatggatgatgcagagaatgttctcatcacatctgatgttgtgatttatggatctttcctcgaagaacaagtttttccagagattttgatcaaagccatgactcttgggaaaccaatcatagctcctgatatctccataataaagaaatatgtaagcttcgttacactgcttttggagcacatagacatagatttggatactgcaaatagaaaagttctttatgaaggaccagagattattatgaatacattcacaaccttcaccttgagatctatttttaaccattaggaaaatccagacaaatccagacaaccttcacatgcagcttctttttgccctatttttttattatcatttttattatttctctgcatatgtttggtatgataatcttcagataattccaccttgttttatgatcttcacattgaacccgccttcattttcttttgttaacatatagttgtttaattgaacatgtgcttatttctgctgtttgttttacttggacatcaatcataatacctatgaaaataaaattgaaatgatcatgctgccgcaatttatttatttttttacggcattttgataagtttttcttgtcaaattactgactacaattctatcacatttaggttaatgacaaggtgaatggtttccttttcccaaagggcaacgtgaaggttctgtcacaagtcttattgcaagttatctcaaagggagagttatcacctttagctcgcaatatggcttcaatggaaagaaatactgctaaaaatctgatggtgtctgaatgtgttgaaggatatgtgctgcttcttgaaaatgttctcaagctcccctcagaggttgcacttccaaaagctgtatcagaaattcctttgagtttaaaagataaatggcaatggcatttgtttgaatcagtctccaactcgactaacttgaataaagcatttagaacatacacttttttggataaatttgaggagcagtggaaccatagtcaactagaaaaatctggtcgtgtatctgcaaacgatgattcatttttgtacagcctatggcaagaagagaaaaacattgacatggctcatgctagaaaaagaagagaggatgaagaggtaaggagtgcccttgttggtttgagaagtaacatgtttcctaaaatattcatcttagaaccatctttgaaattttatgcagctgaaggatagagctgaacaatctcatggaacttgggaagaagtatatcgaaatgccaaaagggctgatcgtgctaagaatgatttgcatgaaagagacgacggggagcttgaaagaacaggccagcccctttgcatatatgaaccttatttcggtgaaggagcctggcctttccttcaccgtacttcactttatcgaggaattgggttggtgagttatcagtcatttcttagtactcttttttactcctaatgtagtctattactccatatttctttcttttctcgtataatgttattgacttaacaccacaaaactgaatgctttgaagtccaccaaaggacgaagacgtggggctgatgatatagatgcaccttctcgtctttcgcttctcaataatgcttactatcgagatgtactcggtgaatatggggctttctttgctatagcaaaccggattgaccgaatacacaagaatgcttggattggatttgaatcctggagagccacggcaaggaaggtaatgcaatggctcattgcatcattagcaatagcttatcttcatttgtatttaacattgtcttttcctgaagcaggcatcgttgtctggcgttgctgaaaatgcattgttgcatgcggttcaaacacgaagacatggagatgccctctacttttgggtgcggatggacacggatccacgtaatcctttgaaattggacttctggtccttctgtgatgctataaatgctggaaactgcaagtaataacccaacgctatttggatttggttctgtttatataattttttctgttctctgtctatgacttcttacattttgtttgcttttgattgaaggtttgccttctctgaagctttcaagaaaatgtacggcttaaaactagatttgacatcgttaccaccgatgccacaagatggggacacttggtctgtcatgcatagttgggctatgccaaccaagtcttttctcgagtttgttatgttttctaggtacattttgagaaccgtttattgttacttccttgagtttgtgacttcttgaacaatggctaagttcacatctctaatgaaaaatgttccattttgcagaatgtttgtgaatgcactggattctcaaatatacgaccaacatcattcaactggacattgttatctcagtctatccaaagtaagtgtctcagaaaacctatctaaaatttaaagtgacttttgttttggctctgctgtgtgtttattgcatgcttaacacattgttatctcaggacaagcattgctactcacggcttctcgaactacttgtgaatgtgtgggcataccacagctctcgacgaatggtttacgtgaaccctgagagcggtgccatgaacgaacaacacaggttcaagagtcggagaggtcacatgtggatcaaatggttctcctactctaccctcaagagcatggatgaggacttggctgaggaagctgacacagaccagcctgttaaaagatggttgtggccctcgacgggcgaggtgttctggcaaggcatgttcgagcgagaaaggaacttacggcatcaacaaaaggaaaagagaaagcagaagagtagggagaagttggatagaatgaggcgaagaaatagacaaaaggttatagggaagtatgtgaagcccccgcctgacgacattatgggaagtttaaatagtaccacagtgtctatagcaaagtcttgatgaatattattaacttggtggtagtgggatttggagtagaaaagttcattcggtaattctttcttttttctttttttgggtagaattttattcctttaattttttcaatttttatgagggaaggaaagatgcatgtgatttgtaatatgtacgtgagggttttgtatgtaaaaagtgcatcattcatctctggcccattgatgatggtgaatagcgttaaagtgtatattacttcttttcttttctgtgttatttccattctaattctaattctagcattgcattgattaaatgtacttgatcaattttagcaatttgaagtgacataatcactggttttaaacttttaaatacaataaatgatgaacaaaagacacttgattgattactcgtacaaacacgaacacttataattttcaacgacaaaaaagtggacaaacgacttcgccagcgccattaattgtttaaacgacaaaaacagctgaaactgtaaaacgatttatggttatgaaagaacaaaaaggctagacgcctgaacagctgacggcgcaaccgcaattctaccatctaaaggcattgactttattataaagcatatgatgtaatatttaaaagaaaagaaggaagaataaaattgactaatttgtgtttgtcatcttcaaaattattaaggctttttttatgctaaatcctctcgtacattttttcttcgatcgcttgagtgtgacgactatctcctccgaccgaccatcatatggtaacatctttcttatttgattatctcatcttatcttatcttgtttgattttgatcccttctatgactgtaaatatatagtaaattttactttttgaatctcttaccatagctaccacctgtttgataaaagtcatcaatgagatctatagttttatttgaatggttttcttaattattagtttctgggcgtcaatggtctgtagttttggatactataaaccttaactcatttacaggtgcttctttccatgtctactgaccaatggcatcaattctaactctgaggaaattagtttcagcctgctaaatggttctggaaggttataaactcggacttaattctacaatacaatgagtgcacctcaaagtggatatattgggcttccgttaataaatttggtcagatttaaaggactttccattttgaagcaacttcatttggaagaacaactgcttcgaacgacatcagagaattggtgcattgtgaatgatggaactgacgatcctaccattgtcatgggtatctcagggtaatttgtgtgtatcgttttttcagaatattcttgtaggaaatgttaaagaatcttattttgaattgtctgagcaggtcagctgcagagctaatcgataccaagtcagtgctacgagatggagtttctgtaatcaggaggtttagtggaggtggtactgttattgttgatagtggcacgatatttgttactttgatatgcaacaaagaggctattgctggcttgcaaccttatcctcgacctattatgtcctggagtggcattctttataacagagtgtttcaaggaattggtgatttccatcttcgtgaaaatggtatcaaaataaaaccctttaatcagcattagtatttttttggaatcactttgttcactcatattacttccatgtaaatctgaagagaacttttgttttcacttgacagatccttaaactctccctttaataatttagcacctatttatattggttttatattagtgatgctatgtgggcgtgtgtggtgtgtatcattattttcattgttgatatggcaacactttaggacgaaacatattcttaaagtgttcttggttggtgcaatgtggttttagattatgtatttggcactcgtaaatttggtgggaatgctcagtctattacaaaagaccgatgggtccatcacacgtcttttttgtgggattacgatgtcagcaacatggcctacctaaaacacccgaaacgggttccagaatatcgactggtatgtcattttaattaatcttttgtaatttgattgaagtctcatccactttgtttcccaatttaagtatactttccaagattcggtgatactatattgttcaatattcagttgacagatgaatttattaaggttgtgtgttttggccaagatatcatatttgacaatctttcaaatgttttagctttactggattaccttgcatttagcgattttttttggtttgtttgactaatgctgttaacaggtgtgaaagttttataagattgtttaagcaatgtatggtggtttcaggcaagagagcacatggaatttatatgccgaatgaaggattatatgccaagatcattgtttatagacaaaacagtagaggcgcttgaaactgatttcaccgtgagatccattgagccaaatggtttgcaggctttattgaatacaaacttttgtccctcaactaggctcttgaccaagaaagagttggacgttgctgcttttgcttctcaaattgagagctctcctctctcactctaataaacttcttgaatcggagagtttgttagttgtcaattggtgcttaattcaagtgaaacgcatttatttttaacatttttgtttcaaaagaaatacatcgattgtacttgcaataattaagtagatggctaaagaagatattagctttactttttggtcactggtcaatttgatcggaaagacttaacattcatgttgagtttcatattcatgttttgtttttgttaaatatttattgtttacaatatgagaaggaatgactaattgtatatcttcctcagattttgatcggcatttcatattatttttagttagttttttttttggatgaaaaagactaaagacgcttctcgaagaagttgatctaaagccactaagactagctcaccctagtctcaatggtgaggatggttggaaaatggagggctgtatgtcacgggccgcctatttgggcaccccaagtaggtggaacgtgcggcacttgctggcacaccgagctagcaagtcagcctaaacgc

SEQ ID NO: 14651 - DNA, 19523 bp, Cannabis sativa
  modified_base (157)..(157): a, c, t, g, unknown or other
  modified_base (336)..(347): a, c, t, g, unknown or other
  modified_base (3797)..(3797): a, c, t, g, unknown or other
catagttaagcgtgcttgatctggaataatttcaagataagtgacctcctagaaagttttcccaagaagtgtgtgagtgaggacaaagcacactagaaacactcgtgttgacctgtagggttagtcgtcattctaggaagcagccagagtgacgtantcgtgtataagagtcatcattccgtgagtgtaaggatctaatggagacttgaagcgagtacgttacagataatcatttgaaacttgaatttacggaaattccggaaatataacttaagtattattatcattaaaattaaatttaagtattcacccaataaattattattattattattnnnnnnnnnnnnattattattattattttataaagagattattatgtatttaattatacctgttccaagtccatatgaaagatctaatactttgagaattgccctcagaatttgaattatcaccacaagtaatccaaaaaccccattcatgtctccaatcttaaagttaattagtaagaaataaaactttattaattaattaatttgaaacccacaaatattaattaatttgaaattcaaacttgattaattaaaccatgatcttctatattcttactaaaagtaactttgagcacataattatataattatcataattaataatcaccaaaaatttgagcctaattaattcttaattgttaatgcttatattaatcataattaccttcatgaatttaggacctccaaagtattcttcttgtttaagacgtgatgttctaacataacgagacgcataagttgcttttccattcttaatccgcaaaccatgaatcattctacaaatatttttttatatatataaataataataatttttttttgaataataacaaaaaataaatttgatttatataaaaatagaattaatgaagttgattattatatggattagaagatcacacacccatctccatcaaacctacaaaaataataagaaataattaaccaaaactaataataataagtaaggtcggcctgaaatttagtaggtcataacaaaaaaaaaattcttctttaaaaaaaaatgtagtatttttcaacatcaatttaaaaagtatatgtatttttaaaaatgaaaaaaaatagcctctgaataggtcgaccttaaacaaagatctagcccacatatgtctagggtcgagctcataagcttacttaagattatattattattacaaatttacaattaaattaagtttaaaagaaaagtatgtgtaggtaccaatgatatccagctagtggagcaaactttggattagggccaactctaacaaattctccatttaagcactcctacatatatatataattatttatatgtatacacaaatatatatagctaccataataataaaaaactaataaagagaggagccatgaaagaagaagcaattaatacaaaccggaaggtagccgatgagagggaggttgtggacgggaggggtttcatgaaccggagcataattaccggagagaaaatggtgattagtagtatttttagaggaagaaaaactgtacataatgaggttctcgaaacaatcgaggatttttgaagagaaactacttttgttaggttttggattaacatcgccataataattgtcgttgttgttgtagctagatttcatcatgacgctaaattttgacattagttgaagcttagtgatcatacctttggaatgaaacgtacatcgttctataataaatttcattctttttctttttttatcattttctgatagtcgataactattcgtagatattattttgacaccaaaagaaggctcaagccaatgctttatttttatttctaacattagaaataattttatctataactacaacatacatatatttcattatatagataaaaaatatttatacacacattattggtgatatgatgagattcattgataattttattaatgatgatcaaccaatgtggttgataataaatggttaggtaaggtaagtgactttgtaagaaaaaaatagatatattatttaataaaaaaaacatgtttattaaatatacaatttatagataaatgcataagcaggtagatgtttccactatcattatctatttatttatttattctttatgaataatgtgaataaatctctttctacactttatttgtttccttcattttgtttttattattcatcctccattaattttgaataattttgattattcctcatttaaaaactttaatatagtaaatcttgtgtgttgtcctaaaattgttaatatatgagttcaactttttaaaataataataataataataataataaatttcttctacctcattatgtatatagtaaaatattacgtgagatatatacatgactcacgtggttaacaaaatcttacaaaatattaatttaaagaaatgtgttattgttatatatattatagcagggtattcattcaattcaatctgtattattttactcatagtgtatccgatctgtagtaagtttagattttatattttggatccaattcaatccacgtatagctcaaattcaattcaattcaatttgcaaaaatacagggtggatcgattattctggatcgattacttttaatattgaattatttaatattaattaaaaaattatttttttttacataactaataacaaaataaaataaattattgttattttatgtcttcaataataaattaaaacaaataaaataaaaataaaaaattcaaaggaagaaaaaaatttatatgtagaaagaaatatttaatcttattttaaattatatttttcttatatataagtgttgcctagaattttttttaaaatacgtggcagttcaaaatacggccaggtggtgatgggacccacactgtgggatgcgccatgtcaaaacactcccaacgtttctctatttgcgagtatgtggagaattagtcacctccgagaaggtccccccaattaacaagtaattttgtcccttcttctctgcaagtacacacgacccagagacgagatagatagaaaggtggagtacgacgctttgttcgaggttaaatcattgtatatgcatttaatgcagcatgggaaagaacatcctacaccttacgtgatcaagggtttaaactcataattctctgatttcactatatcccatacatcaattgacggctacattatgagctatcaaatcatcaggtaaagacaagtccaagtttgaaaaattgttgaaagcatggctcatataatcacgaaaacgatggtcttttgccactattatgagcctataaataccccaataatgtatagaaaaaagggactgaataattctctgtaggaaaaacattcatcaataactgtgactcgtggattaaggctcattaatgccccaaccacgtaaaaattttcttcttcactttcattaatcatctctaattaatagttgcaaaaacatcaatcaacaataaaaatgtaatatatattttatctattaagtttttaaatatatttgtatcatatgtattatatttttaaattattattttttaaattaaaatattaattatatataatttttttaaaaagtatataaatatgtattgatttgattggatcgttatttttacatgtcaatcaacattcaatctgcacttagtgaatttgattggattggattgagtattttatgaacactcctattgcaataatgcttttgtttttaaattttttaatcacaanaataaaagtaaaatttttattttaaatattttgtttttaaaaacaaaatgtgttctataaccgctttctttttaattttaaaaataaaaaataagtgtgttttgtaaatttcatttttattttcattatttgttgattttatttaagtcagatccaagtccaattttgaggctaggatcggggctgggtccggggttgaagttagggtccaaggttggggtctagatccgggtccaaggctagggtccgagttcggttccgggatcagggtcagggtctgggttcatatctaaggtcgaggtccaggttcaggtctggggcttgggttcggggttggggatcaggatttgggttcgagatctgggtctagggtttaggtcaagatcggggtccaagtccaggtctaggtttagagttcgagtttgagatccaagtctgggttggtgtttgggttcgaggttgagccaaggttcgaattccaaggtctaggttggatcaatatcaaaaatattgattttaaaaaaaactatttaaaaatttttaaaagtgattttttttttgttttcaaaattgaaaagtgaaaactgttttataaaacatgatttcagaaaatattcacttttctaattttaaaaataaaaaaaataaccgattaaaaaattattatttagatattaaatatatttatcatcttatattaaaagggtccacatgagttttaggattcatagtgagtgtcctaataatatattcattgttgtttcgtggtgattttcctaagtaaaattttaattatgaataaagttaaaagtaaaaaaattatgtctagaacaaattattgattggcattattagaaaattagtgtgaataaattatttggtcgaaactcggaatagatgaagaacgacaacagagtaaaacgaacgtaaacatttagcttcctccgtttacagattaggttcacagttcagagctctgcttgttcttgtagttgttcctgatcaaatatcaaaacaatacttaaaacattcaatttcaccaaaatgacaataaataatatcttttatctttaaattctgttaacaacatattagattctcttctctatgatttcactatcaccatcacattggtctcatctataattaaatataatataatttaatacggcgtaccaaacaagcatttagaataatactgattactgacctcggtgacaaagaaggcatggaatccatatggaactctacaaggcaaatgaataaccgcaatcggatcagctgacattgttttcgcgtcaatcacatgtacttctgattttctgcaacaatgaaagaaatgcaaaacttcatcatctcaaagattgtaactaataatcatatatttgattttgtaaacaaattggtctataagaaaaagtactcagaattctcatcatgaacaaagaatattaggtagccatcatcttcttcagaatcaaatccgggaactttggggacaaatatagcttcagaaccaaatcgaccaggtccaagatcatacaagccctgaacattaccaccaatctctatgcatgttttttcatcatcactttctggctcagcattcagatcgaacttgactatgcctgagattttcgcaatgctgtccagtctggttccgtacacatagcgttgtttcctgatttcgttcacccaaagacaattttagaaagaaaaatgttaaagagcaccaccacaatgtgttataactttattggtataactaagaatcaaattctacgtattttaatttaaggtaaatactattttaaatcctctgtttttcaaaaattattgatttaactctccgctttgttacttaaataacaaattagatcttgtgttttccaaaatagtacaaaatactaccctaagctcaattttcgttaagttaaaacttaataataacctgacctggagacattataacaatattagtttgacgaaaattgagtttaaggtattattttgtactattttaaaaaatacaggatttgattcgtcatttaacaaaacggatatgtaccatttaatttaataattatcatagaaaatcggtaactatttataaagtgtcacctcgtgatggtatttgacaccgctagtgcctaatagcaattctaacttttactattcttttacaaaatgagaaaaagaaaatgtatagacctgctagtgtagctctcatttatccttggaaattctagagatgatgctgagagtttacgttgggatgctaaaccagttttcaagttgaatctcaactcatacctgaagcaataagaacacgacatcagaaaaatttacatgctactgaaaagtgaaaagttttagtatcaataaaatgttcaaaatcctcttacagctctgttctgaaatgattaagtttttctttgatttccccactgatcatattcatatctatattgtcgagacgacaagtgatcagaacaacttcgtcttcctcttcccatgcattggctaataaaaattggtttggttgcataacgagatcaggaacagcataactaatgcctagtttttctctaagataggaaaaatgtacgcaccattatgaaatatgtaacagcttggaagctcgaaccatttgattagaagctcgttctttgcataccgtggaaggacaccaaagcgagctttcttagttgcgtcaaatgacaatataagcttgttttccatcaccatttcctgttaatttgaagccaaatccatggcaatgtaccaaaatcaatttggttaacaagatgaaacgcattgtaactttactttttgttttgcaaaaattactgattgaaccctttatttttataaatgacatattgaatcctgtactttttaaaatggtacaaaatagtatcttgagctattttttgtgaaaataaaatttaataataatccgaatagttgttatgaaaagactaactattttttgcttcttcaagttatcgaaaattgagctcaggtactatttgtatcatttgaaaaatacaggattcaaacagatattaaccctaatatctaatatatctttggtttgaaatacaaaggaagatccatgaaaatagcataattttgagtaatggcaaagtcatgcatcatgatggggtctgatattgttatcggtacttgatcgtgcatgaaaccatccttcgaaataactctgtatgttacgtatggaggagagagcgaataaccgaatgtaaacatttcacctgcattcgaaaatcggcaactaaggagaaatacattatagctggctaactaaaaaaacttatgaagatgtgtggtgtgtgctcaccagtaaaagggtcaacctttggatgagctgtgaatgtatgtgccaatctcttgtcataatccagcataccaagtgtttgcaaatccccatcttccaagactttaagaacatcttcatgatgaaaattatacctttcgagtcaatttcggtatgaatctagtgcgattacatcaagtttaagaagaagaaaaaagagtgatgaagcttacatggtttgtctgcctcatgaagtactaaaagtttcccatggtgataaacaagagctgtattagctggaagagagtgatagaaaacaattagtccttccattactaagggtaagaaagtgtctgagtaaatatctgcctccttattaaaccaaagaaagaacagaattttcagcaagaatgtatgtaacagagttgtgttaaacaagtctaatgattggtaacgagtcctcttcgagactagacaaatcaccaaattgcattcttcgaaacagtatcaatcaatcaatctcccaattgaaccaaaattctattttctcattctattcattatccatttctatatatacatatacctgttccatttccgtaagagaaatctaatactttgaatttatctctcaacgtttgaatgctaaacatgaacaatccgaaaagccctttaaggtctccaacctgagaattccataccatagcagattaaagacaagtcattaattatcacaagcctggactcagaaggaaatgaatgatttctaatgttctttaaaatggcaaaataaacttgtagaagagttggcattcttttctgagtctgagatacctttaagaacttagcacctccaaaatattcttcttgtttaagacgtgatgttttgacataacgagaaacatatgttgcttttccatctttgatccgcacaccatgaaccatgcttcaaatttaaacatctcattcagtagttcatacacatacacatacatatacatatatatagagagagagaagtaaaagaacacacacccatctccatcaaacctgaacagagagtaagaaaaaaaaaacataataagcaaagtcaatcaattaataatattaaaagagataatctagctgaaactgtaatcatttttctgaggctaattacgcattttgctattgaccaaattatacccctgaaccttttaaaaagtaataaattccactcgaattattaagattgttggattcaagatttttgtccaattttattagcggaagtctgacatggatgaaaatttaagggcaaaatttagtacatgtcaaaattcgagagtgtaatttatacatggacaattgccgcattagtaaaattaaacgaaattaaacagaattccttaaatccaacaatctcaatagttcgtgagtaatttttaacagcttgaaaattgaagaatataatttagtatatgtcaaagttttggcgggcaaagttctaattagcctttttattatgataaatgagctcagacagctgaacagagaacttaaataatttccaattgttcaattaaatatagcttctttcaataaaaataattaaatatagtaccaatgatatccagctactggagcaaacttggaatttgaacccacacgaacaaactctccatttaaacattcctaaaaacatgaacaaagaatattcaaaaactaactgcatgcagtacaaaaatgaagcccagatcaataaaaggtctcatatgaaaacaattaacaatttcaacacaaacccaagtcgtaaagatctgattttcatccaaagtttcaatctttatttaaaaaaaaacataataactcgaagttcataaagggcaagaaatactaacaggaaggtaacccattactgggaggtcctttatgggaggtgtttcaggaaccgaagtgaagttaccggagagataatgttgatgttgtgaagagtcatacataagcttaataatcacattttcaaaccagtcgatgagttttgatgtcaaacctttgttgggcttcggattcaccgtcactatccctttcactgttccaccattgttgcagctgttattcttcttcttcttcacctccaattccaccatactccttagtgggttttgctttcttctctgttcacagttcaaaggtcgaacatacatatatatatattaatatatatttatatatattcaagaacagaggagaattagcaatcttttaccatttccactcgtgtctggtgttgacacgtggagtttattaaattatctaattggctctgttttttatttttattttttgtacttttgtttcacggggttgagttctttgtcaccatattgttataattatatttctgtgtatgaattgaatctgtgaacactgactctaccaagtaccaactattcacatgaccattgataaaatacaatacatagaagttaagtacaatgatctatatatatatagagagagagagaggtgtaatatccagttgtattgaagaaattataggtgttacagacggtgtaatttatatgactaagaaatatgtaaaaataaatagaaaatacattgtttgatgaacatggaaaatgagctaatttacaagtttggcatcctcttctttggtaaagctttgcacttttagagtgttgcctgttcttgcagttgttcctgatcaagaaccattaaattcaaatgagtccaatcataatcataaaaaaattgcaaaaaaaaaaaaactggataattgtctttcctgattattgttcttcatatcacaagaaattcaattgaaattctcgtataaatgcagtcatgtcatatttgagaatttgcttcatgcatcctaagttggttttgaagtttaactgtttaatcttaagaacattttcataaaatttaatattgaaacatttttgaataatttctcttttcgaataagcttaagaaaagttctagatttaagaaaaagttactaaattcaattttattttcgttcaaattcacatatttttttgttcaagtaaataataataataaaaagaatccaatatatcagataagtaatatgagaaatcaagactagaggtcagatatccaaacccgaaaaataagcattgtactgacctcagtcacaaagaaagcatggaatccatatggaactctatggggcaaatcaacaactgcaacaggatctgacgacattgttttcgcatcaataacatgtacagctgattttctgcatgatgaaaatccaacttcagaatgcattctaatgttatgaataatcagattgaaagggatgaaattattacttggtattctcatcatgaacaaagaatattaagtatccatcatcttcttcagactcaactccaggaacctttgggacaaatatagcctctgaaccgaatcgccccggtcccaggtcatagagtccttgaacatttccaccaacctcaagacattttttaccactttctggttcagcatgcagatcaaacttgacaattcctgtgacttttgcaatgctgtccagtctggttccatacacataacgttgtttcctgcatttactcgcaaaaatgaagaaatgtgaaatgggagaacagagcaaaaacttgaaagcaaatataaaaatcaaatgaaaaaatagcacaatgtccttccatcatgtaaattacctgccggtgtagctctcattcaccctaggaaaatctacagctgatgctgaaagttgtttttgggtagctagaccagttttcatgttgaatctcatctcgtacctaaaaaagaagggtgtaataaaatcagatacaatagcccccacaaagaagattttatgttaacatgttgaaattctcttacagctcgtttgagaaattttcaagcttttctttgacagtcccactgaccatgtccaaatcaggattctcaagacgacaagtgatcagaacaacttcgtcttcctcctcccatgcatttgctatgaattggcaaaaatacaaacagggtcatgaaaaaagtttcaaacctccttattagataatagcttaaggtgacaaaagtaacttgcaatctataatatggaccagctcagccactggaaaacttgacccaaaacacacacacagacataaaaggtaggaaggccagagtctgcaccattatggaatatgaagcaatttggaagctcgaaccatttgatcaaaagctcatcctttgcataccgtggaagcacgccaaagcgagcctttttggtggcatcaaaggagaatatcagttttttctccttcaccatttcctggaaattaaaacattatgaggtaaatcccaaacaacatatcaacacacattgcacatttaagaaaaccacgaagcatgagcatctcatgtctacaaacccctggcaatttgtgtgaggacttatgtctaaaagaatgatgaattaaattgtctaaaacagttagaaatcaagaatgaacataccttcggtttgaaaatcaggggaagatccatgaaaattgcataattctcagtaatggcaaagtcatgcatcatgattggatctgatactgttattggaaccggctcatgcatgaaaccatccttcgaaataactcggtaagttatgtatggaggagtatgtgcataaccaaatgtaaacatctctcctgcattaggaactttgtaatgagcaaagtgaagactcgccaactaaaaattgtattttatgagagtttcctcaatcacctgtaaatggatcaacctttggatgagctgtgaatgaatgtgtcaatcgcttgtcataatccagcaggccgagtgtttgcagatctccatcttccaagactttaaggacatctgcatggttaaacatgcataatttcattccgcatgacaaacaaataagaaggatcaaactatatgggttgggaccctggataaaaacagcttctttatacaagttaatagttggtcttggaccatggaaaacatcacgtatcagaagcagggttaaagaaagaattatatacttacaaggtttatctgcctctgacagtgctagaagtttcccatggtgatatataagagctgtattagctgcaggaagaggttcacaaacagtaagtttcaatcaatacttcagaaaataattagtatcagatgtagagttgtgctcaaataatatgcaagctcagtagagggtcacacataatttcatatttggtccacttcttaaggatcatgaaattcattatatacctgttccgtttccatacgaaagatctaatactttgagttttgctcttagcatttgcatgttgaccatgagtaatccaaaaaaccctttcaggtctccaatctgaaagtttcatagaagaaagtttaatcttaaaactgaaaacaaattttgcattaagatttttgttaagtctagtattagggagcaatattgaagaaaattatgattaattgcatgaatgaccaaggaagcaaacttactgaaatagaaacttgtgcatattataataataaagatagaatacaaacaaacaaatcattaccaaacaatatgagatcacatttgtttatacatctaactacattaaacataaagggtacatatatattttcactttgtgttcattttgtacaatttttaaacaattatgaaaattgaatccaatattcttcaattggacacaaagtattctaaattatgaatgaaaatgaactatattcttaagtattgctaccttcatgaatttggaacctccaaagtattcttcttgtttaatacgtgaggttctaacatagcgggagacatatgttgcttttccatccttaattcgcaaaccatgaatcatactgcaaagttaccaaatgtacataattcagtaaatactatgcatattgttaaactcaattagataaataagttttcacaatggagcagaagagcacacacccatctccatcaaacctgcacaaagagcaagaaaacaaaaatcaggccaaaaccccactatattaatatctggactagttttctcaagagttaagcaagctgaaccaaccccatttgatcaaattataacactaaacctcaaaatcaatcaaaatttggcttcattcaagaattgattatatcataaattcaaaagaaaaagaaaaagattttaccagtgatatccagctactggtgaaaacttgggattaggaccaactctaacaaactctccatttaaacactcctgtatacacaattaccatagcttaaacacaataaaagtgatcaacaaagtgaattccaatccaagaatccataaccagtaccagaaattatggtttgaagctataaacacagtattcaatcattacaactctaatcaacaattaactgactaaaaatcactacacaaatcaattgaggtttagcaaaaccacagtgattcctttccttcctattactgtaacagagaaacagtgtattaatcgaaatgtaccgggaggtaaccgatgacagggaggtctttgatcggaggagtttcatctcgaatgggagcaaagttaccggaaagatagtgttgaggctgagaagagtcgtacataaacttaacgatgaggctctcaaggaaatctacgagcttagaagagagacctttgttaggttttggattaacagagacgaatcctccattagcgcggtcattgtcggagctagtcttggtctcatcgagtttcgccattgttgtcttcttcttcttcttcttctttttcagtatttatgctcagaatttctgataatatcaactttttgtttagtggagctttggtgacgagtttgccacgtggagctttaacagccaatttaaatttaataattataataacaataattaaaaataaaaaagagtgagagaaatgttaaaaaaggcatctagaactatacgatgttccatataattaagataatttaattgtagcgttaatacttaattacaataatttagtttacgattaatctaatacttaattatactaataacattacgatactcagaagagtattaggtactagtggtactttttagtaattcttttaaatttttaagtagcattgttattgggcaccagtgctgtctaacactttcaagatgtatcgtcttttagctagcgatcctccctacaagttattacattaaactatacgagacttgatacttagttgatacggtgccttttaagatttttttttaagttatatgtatagaacttctgtaaatattagtcattaagtgttaaattattatccacgtacattttgttattggtatattttaattaaattttaaataaaaaataaaaactgaatgacatgaattaattaagaattgtcaagtgtcatgtggctacataacacttaacgatcagatacttataaaagttctaaaaatataatttgcgttattaccgtcaaaaattaaacttaaatatttatttacaaacaataaattgatatttataccgcaaattattttattttaataataattatgtaatattactagttttctttctcatctacgtaaaatttagtactttttaaaagtaaccgatacaatatatttttgtctaaaactttaaatattaatatcgctatttatgttttttttttttttttttgatgaatatcgctatttatgttaataataataataaatagtttatccctaattatttagaatagaatgagtaatagtaagttactattagccataggataacacttttggcttagtatttttaagtttttttattaatttttatttgatacaatggtaaaatctaaaaatttagtatttattaatatattattttttattacaaattgtcattctgataaaaaaaaaaatctagtgtttgtttgtgatattttaggtagtttttcaatattaaaaattgatgttctagctctttctgtaatgttataattttattgtttaaattttgaaggaattttatgatttggttaagagaaatgaggtgtctagtactcttttatgtattaatatcgatattggtccaattaagtatcggtcttattaatataataatttagaaaatatcgatagtcaatcggaatgtgatctgtcgaaaaagtattaagtactactggtgcttaatagtattgttctttggtaaaacatactaaatagactgatattctgcgttaataaagatgaagatgctattccatattacagttcgtttttaacagtttgtttgccacgtcagctttgcagattttgccaacaatttcaagagcttttttgtcgttttgtgagtggtttgtttcacttgtttgcctccacttttgttttgttttatttttctttctttatttttgggttaaatgatattatatttgggttataaattaaattgtgtggtttctactaatgtcaatttttttatgattaaaattggtcactacatacaaagttcacattcacaatcttacttgtggaagtattgcatcatcaaatccttttttgttcttcttcttttataataatcatcaattacaatggtgtgaataaaatattcttaagagtaaagaaagcatttttaagtatgaatcatactcgtttattcttatgtgaagattccgaactacccccacttaatttattttattttaaagggtattttatggttccaaatattagatgggatcttgtcataaatataaagttaattagaatttttgttttataaactttcacatgtactaaattatcatgcccctgaacttttatggccgttaaaaattctccctcaactattaaaattatcaaaattaaggacttttatctaatttcattcaattttactaatttagtgattgtttatgtcatgctcctgaaactttaatatctaccaaatcatgtctcttgtattttgacatatgtcaaattatgcttttaaattttcatccatattagacttttcttactaaaattgaacaaaaatccttaaatccaacaatttcaatagttcatagagaatttttaacgaccaaaaaaatttagggggcatgatttagtacatcgaagcaaaaatcctaattagactaaatataatttaatggtttttcatttattctcacaaagaaaagaaaataaattaagctaattaaaaattttgttctttgaactttgacatgtaacaaatcatgttcgttgttgatttttatttaatttcattcaattttactaattcggtgattgttcatgtactaaatcatgttttgcgaactttgatatctaccaaatcatgcctctcaaattttaaatgtatcaaatcatatcattaaaactttcatttatattaacttttttttattaaaattagataaaaatcttaaacacaacaatcttagtaattgaagagaatttttaaaaaatttatgatttggtagatataaaaataaaaaaaaatcccaatttcttgaattgtctgctgttgcctaggtcaccaaacaatatcatcttcaacctctcttcctcgtatcgtcatcctcccacaacaggtacttctctctccttttccctttcaattacaaaactccaattagctgttacgagtccctaattgattgtatatgaaagattataaatttatggattattgttcggtttagttttgtgatgaagatgagagtcttcaatttttttaattttggtgctaatttgatctaattagttgaacaattcatcatagttgtcaataaaaatgtaatctttcttcttatataaacaaaattagggcttttgtgcttcgagacagtgaaatgggaatggaagaggtgggagaaataggatcattacattcccaaatttgggagcaaattgagcttgctgaaaggtaattcaattcaattttctactttctttattttgatttgaacaactcttttgtttgctcttgtcaattgtatataattatatatctatgtatacagctaccttgtttgctccttgtatgaagaagcagcttcattagcttcttctattctgaaccaactttctacaattgtaactgggcatgatgatgatgatggtgttgaacttcatgacatgttagaatcagctggaatggtccttgtccaatccttgaatgagcttggcaggtagctagctacatacatgattttcttttcttttttgctctgctctgcaatttctctgacttgttttgatggatttgcaagcagggtatcagaaattctgaatgaactcaaacaatcattttcttcagttggagccattccccttcaagttcttcttgctgggtactttcaattttatatcatagcacatcatatctatctaggggtgtctatttagttagtttaacacgaatacaacacgagagttttcgggttcaacaccacacgaaaattatgctagtcgtgttcgtgtttgtcatctaaaataaatttgagaacaactccacatgacacgaacctgacacaataacactaaaaacaataatttagcttacaacatgaacacaacacgagatttggcaggttcaacacgaactgaaacttatgcgagacgtgttcgtatctgtgttgtacaaagttttgtgtcacgtgtcgtgttcgtgttgacaatttttaagtaattttaagatctcaacacactaagccaacatgaattgcaactcctatatcatcaactaagtgcttctattaacatgtttggggtgtggaatttgatctctgtgtgtagtataggaattttcatcctattttgttttccagggcatgtttccagatatcacaaagtccttcgagtgttcggaattttcttgaagagtttcttagtgagtggagatttgtggatgacgattactatgttcttgctaatgataaaactagtgttgattatgtaaaaggatgcagtgggcgctttaggttgagtgttgatgattatcttgatgttgttgaggtctatgttatgaaggttcttgcaaccactttaaatgatttagaccttgcaatccactgggttgagaaagccgagctatccgaagacagacgacaggtaaaattcaattgattgaagtgattatacttgagttatgttttgcccctaacatgaaaattgcacaaaactcttgaatcccacattcttgaatttgttatttggaaccattcactaatgtcatcttcaagaaccttagactcaagttcaacgatgctcggtttatcttcttgtttttcctttgttgattatgagattacagctgctgatgctaagttgaactatatgaaatccttaatttttatcaagtttattgaaatataagattcatgaacacagtttttttagggacttctaagaagattacactccctacattctgcgagagcaacaacaacttcgtcaagaggatcctcagctttgttgggagataacccgaaaaaacagataaacattcctaatggatcgccacaagtgtcagacaacaattaccctctaaacgatgataaaattggaaaacaatcagttctaagattttccaaaggagtgaccccgtacgactggtggtaccgcaccttaaatctaaagctcggtaacattcagatagccatatcaaacaagaaggttgcatttggctgtttaatcgtgcttgtgtattggattttaagacgaaaacaagctaggctaaaagggtaagcttgtttccgttgaagaaggcacctgaatctttgtggttatcatctgacatgttttatcttttcaggattattaagagacaagctttgaacattaagaagggtgttgtagacttgtggcaacttgcattttcttaccaagtgaatcctttagctgctatgcagtctcctcctgcgccattgcgtggagctcaaagatgaagtgctacagaagaatgattcaatggaacttctctttccttgtttctgatctatgaatttgtgatgcttacatttgactgtatctcgaattagaataatcaataggtaaaataaatgagtttaaaatataaaataatcaaaaataatattttattatgtttactaaagtgtcttggaaagaaaattaacattattttatttgcttacataactaaaaatataattggaatgtaaaatagaaatgaagttatgaagataaaaggcatttcctattgtagaaaatagtgattcgaattgtgtgttgatttcatagaataatacatatttatatacagagttaggagattaaatatctactaaatatctactaaatatctaactctcttacagctaatataca

SEQ ID NO: 14652 - DNA, 12268 bp, Cannabis sativa
  modified_base (1550)..(1554): a, c, t, g, unknown or other
gaagagcccaaggagttaaaaaaataataatatgccaaatgtttttcacttttgtcaattaaaaatacatttctcaaaatcttaaaaagcataaggtcgctccttgacatattgtgtatgttcatttacttgaaagagaaccctttaattacatcacacgttacattccctcaaaaataacaaattcaaaaggtcaccaaaataaaagtagtaacattcagaataaaatgcatatgaataaagctcaagtacctttggaagaaaaataacaaagctgagacgaagtccctagtatccctctttttaatacctgcaaatcaaacaagtaacaaatgagcgggaaaggaaaagagaaaaaaaagttatacgcaaaatgcaataaaacatttcatgtagaacaagtaataatcattaaaaacaataaaaaagaaagcatgcatacatatattttatatgagaaacctcatgtgatccaatagaggtaaccaaccaaacagagcatcccatacattagaaaagcttctaaaacacaaaaaagaagcatttttcttctatttttctcaacataatgaacagccatgaaatgaaatgattacctcagtagctagaaaagaagcgcgtttgtgaaaattaacgtcgcgaagaatcttcgccatggacagggcaacctcaaggctcgtcttctgtactttattattattattataaagaatagagaaaagcaaaagtttgatataatttatttttaaatatgaatgaaggatcaaaggttaggacagggaatggcgaagaagaaggagttttattagggttttgggtttttccctcctttctctcaactcaatagactgaggacgctctttctctctctctgtctgtctacctgggcgcgaagagtcatgggctacttgggggctgtgtcggagactggacctccctttctttctggcccaacctcacattgggtgtatcgctacataggactcaggactgtgcctcgtaaaatttttgaaaaaatatttttttatgttccataagaaaaattttgttgattcaattttttttctatacaattattttcataccaattaaaaaaattgatcttatttgttcttttttttatattctttttccttatatttttcttacctttttctttctcactaaaatccaacttctatagtctaaaattattatttcctaagcaaatcttatattatctttattaaaaacaatgccggcaaaactaaataatataacttatttttttatttaagaaaagaaattaaataattgatcattttctagcagtattataattatgtaaaactactataataatttatattcctaccactctatatacaataaattagaagataagcactaaaaaatattaattttttaatttattttaagtattaagaaattattaatcatgattttaaattattttatcattttgtgttatagtttcaaccatcatcttctatagtttttttttccaatgtaaaataccaacttctaacaatattattattattattatnnnnnttattattattattaatttgataaggaaaaatgcggggaacagactaagacgtcttcataaatgtcataaattattggatgtgtaccttaaattaatacataaatggcttttattgagatttatgataattcatgttcgttttcataaatgtgctctgctttataattgcacttacagtgagcataatttcaaatataattaaattagaattaacatctgtctaagagaatacaactagtattcaattaatatattttcatttcttggtcaatactattgcattggctgtaatcagaaaacatgagggcatatgataaaagtgaaattataattgaaaaaattcacgagtaacgtgaacattcctctagcaaacagaaaaattcattgagaaactcgaccaaaaattttctataacacatcacccctttaaataatcatcgatattatattttaaaatatcatgtatttaaagaatcaccaaagaatgaaagtagacagaatgagtagaaaaatcacaaatatactctcaatgagattctaaaaacatccacttccatgacatggaatatcaaagaaatcacaactaagagacacgccctactatttgaccacattacaccccccatacaacacaagtaaaaagagaaaaaaaaataaaaaaaaaaagaccccgaccttcccaaatcattctccataacatgaggctaaagaaaaataaattatatataatgaaagtgaaagtgatgaagcacccaaaactgtccgagaacccttctctcaatactccatgcaaactatcaaattctactgttgtttgcattcaggaggcctctcgccttgcgcaccgtccgtacctgctgttcttccggttttctgtttcgtattaaaagtatatgttaacacacataatatatatacacaaatatatatattagaagatcaagaaaaagaaagattccatacctttgacccagctgatgtctgcaagagctcccaaaaacatttcaaggaaaaattaggaccattccaaagtatataaccaattctagcaaaataagtgcaaagaaaatagagctatggtcctataccttctttttggtcttggtttcctcttcgtcctcatcatcgtcctcatcttcatcgtcgtcctcctcatcttcatcctcatcttcctcatcatcctcatcctcatcaatgtcttcatcatcgtcatcttccaggtctccaaattcatctccttgaatggcctctcccgtaaaccaagaaacagcatgaggaatgatcttatcacgaatggttgaccttcccgagtaaaaaataaaagtaaaaaaatattagcaaaacacaggaagcaagtcatgtatcatcaacatctttagttaggatcaatagcagagtccggtgaaagaataatagttttctgccattaataaattatatcaatacaagatttaagggctcacccaatgtcgtaatcttgttccatctggttctgaagctcctcagcctgtgaagagcaagaaataaatataataattaaaaaaaattaaataaaaaacatgcttcttaaagaggggttaaagaagccaggcttactgcatcctcatcaatgtcttcatcttcttcgggaacttgaggtggattaaagaaattgaagaaactatcacaattttcagtttttgtgattggcttagcattcttggcacccttcttaggcttctttttaagaaccttctgtgttaaacactttccaggaagccattcgatttccgtcctatgaaatacaagatacaaaaaggttaatacaccatatagatctgacgatctgagtctgcatcatacatacttcaaacaataattaccctattgctttctctagaataggttcatcttcatcgatcatgtgatatgtttttgtcaagacagtgttcttaaagaaagggttagtctcaaagaagaactcaagtttgaaacccttgggattatctatcctgcaccacttgatgtccttaaggtatttgagagctccttcgtcacgctcagtaacctgacatcaggaaaacaagaaccaacacgtgattaatagaagaccataggaaataggaattaaaagaaatacgacaaacaaaagactacctcctcagctaggacttcattatttttcattgcattgagccagaaatcaggcactcctacttctgcagaaacacataacaaacatcaagacaagaaaatagttgccacgatggggctagaggttctggtaagaaaattatactgtaccattagcttctttatcctcctctttgtctgttgctgcttcagcagtaacaccttcaacttcagtaacaccattgactatatcatatctctgcaagtgatcatgaacattattataagaaacatagagatgcaaaccacaagaatgaacataaaattatcccacacaacgttgtgtaatgctacttgatgtttgaacatattagtaaaagaataaaaccagaggcatccacaaaaccttacttgacaaaaacagagcacacccctatatcttgaaaaagtacacaagtaaaggaaaagaaaaagacatttaagccgtgagaaaacaaggcctcatccgcagtttagaatgtaacaagtatgttaccttggtgtatagaggctgatacagtttctggtatttggcttccagagctgctctctcctcaaaaaacttagcttccaactcatcgtgttgactctgcaagtcaaaaaattaacttaagatactccacaaataaaagataaaagtaatccaagttcaattcctcactaacaccataatagatgatatataaataaacaagaaaaacgcagagagaaaaaagagcagagaacaatttcaacaaaaagaacccacgacgtccaataaaacccaagagcattagtcaacacatgaagcgtggaagatggatagcatacatttgaacttaaaataaatttttcagcagaataaaatgcccaaatttaaatatacatatatatatagaaggacgagaaagtgaagaacagcaatgaaatcccatgagaaatgtaaaaacaaatacctggatttccctaagaacctcgaccctctttctaacattcggtgtcaagttctccaacacatcagagtgctgcccagccaagctctgtatcttattctgcacaagatacaaagaacaccccacaaccatcagcaaagcaagccttatcccacatatacaaaaaatcttgcgccgcaaaatttaaaaaccgtcggacttttcaaaagttagagtttttcgtcatttcccgttccgacgagttttgataattataattataattataatatataaaatttctgaccttgagagcgttaacgaggcctgctcgatcctcttcgttgagagctgtacagaaaaaccaacaaaatatcagatttttcgaaacactgactagcacacaatgcttaagggaaggaaaagttagaacaatagggattagggtttatgggaatagaaataagtaccagaagtgagatcggacatggtgaagctctccttgtcgttgctcattgtttcagagaagaagaataagaaaagatgagttgagagggagaagtaaggaagagctaaaaccctagaaggcggtgtttgggggaaaaagtggtgaagagccctcaaaacgtgacctcctttaaatcctctctcccctctttttgaaacctaaacagctgttctctttatcatgcggggtctgagcctacctgtttcgatttattttcattttccttttctgggagaggcccaatagttgggctctgtacactggaaagcccatatttactgggcccaatggcccagaaacaatgaattgtttccctctttctcccttaattgcgccttccttttacgaaataattacataattagccaatagccagttgtgaattgtgatagccaggataaaaaagagaaacaagtaaagtagttagtagttaccatttccggtatatagagaaaagtgattgtcaattcatgttcattttgtaatttctctaaaaagtttataaacaaaattcttaacggttattgtttgactcatggcaataaaattagttattatattcaaaaaaaaatatgtatttaacggtttttcttcggatctcgattaataatgtgcctcttgcatatatgtttgaggcatttgcccgtgaatggggaagtttaataggaaaagttgaggatgtaagagtggttaataaaattatgaaggtctgtgtgtgcattaatattactagacctttcaaacgtggtttacgagtgtccattgatgagaagagtacggaggtatctttactctttcaatatgagcacctcccagaattttgtgatgactgtgatattattggccataaaactttagatttccctcttaaagactatcaagatgatgaaacatggccaattcagaatggacggtatggatcgtgcatgtgtgctcctagctcaccgcctaggaatcggggacagcgtggtagtggcaaacattttgagtcacagtttatgaacatgagagaagcgggaagaataatggaggttgctaatcgctctcgtctaagacgaaacacagaagaagagtttgttgcaacatctatttcaaaaagtcgagaacgggaggaggagttacgtgttaataagggggttaccttagaaaatgaggtagttactagagagcccccttcaatccaaacgatgagaaatgacaccccttgagtcccacctgttcagattaatgctggagaggagcgcccaccattcccttcttcgttaagggagcttcaatcgcaagatattcaactgcattctaacggtattttggtggaggagtctgagaccactgaatccccactgttaggggagcaacaacattgccctcctgaattagtgcttcgtgttggagagtcccatgggcctattgaaattagaaatcgtgataaaggaaggtccattgtttactccgaggtgaaggtgggtaagttgtttcaaagtacctttgggcctatggtcaaaacccaaaagaagaagacatggaagaggcgtacaacctccctaaatagacatggtgctagtattttgttagatggtgttgtggctacacaatcagatgagggtgagtggccttcttatggtgtgaaaaggaagaatgatgttgttggtacgatagaagagcgaatagagaaaccgaatattccatcaggtgttagtcttatggtggtcgatgatgaagtggcgcagtctgtagaaaagactcgccaggcccaatgagtatcgtatgctgaaatgcccgagactaagctttgtggtaactggacagaaagaattcgaagacatatcaattttactaatagctttcatgtggattgtgtgtggagtagtggtggacttttatttatatggaatgatgattgggatgttattattaaaaactactctagtggacatattgatgctcttgtacaatgtctagggagagagttgtggcgattcacggtattctatggcaacccaaaagctcacctccgcaaagagtcttagttacttctttggcatataaagcatatctttaatctaccataaatttatgggagggacttcaatgagattttatcaacgtacgaaaaaaaaagggagggtcaaatcgtgatggtatagcgatgagtgagtttcaaaaagttattgatgactgtatgttagatgatttggggtacaaagggccgaccttcacttgggtcaataaaagaggcatttcacatgtccaagaacgattaaatcaatttgtgtgcaatcatgcttggtctaaactatatccttcagtctgagtgtcccatggtgactttctttggtctgatcgtcgacctatagtcgctaaactagagaatattgtggtacagaatcatgagcgaattaagaaatagttctattttgaaccacaatagcttaaagatgaggaatgttgatctattgtggctgaagcttggcaaatatgtacgttagatgtggctgatccggtgggacttcgagattcgctcaattactgtggaaagtgtctttcatcttagaataagcaaaggtttgggtcgctacctaagcaagttgtggacactcagaatgagatagataaactcttaaatgccaatgctctcgatgttcgaatggatgaggtgaaagctctagaacttaaattggatgaccttatgaatagagagaaactttactggaagcagagatcaagatcggagtggatgattgcaagggatagaaacatgaaatactttcataacaaagcgtcagtgaagaaaaagaaaaatgctattactgagattatgacggaattcggccaaaagttgtgtgaggaagagattgttggtgaagtagagcggcattttagagatatttttcaaacatccaatccgaaaaatgaacaaatctagcgtggtacggaggttgttaattctcatatttcggtggttgataatgagcgcataatgaaaccattcacttaggaggatattcactagactattaaggccattggcgccactaaagctctaggaccaaacatatttcatgctttattttttcagagattttgggatattatgggtgacagggtcagccaagtatgccttacaatcctaaatgacggtactttagtgcgacagtttaataagtcaaacgtagtgttgataccaaaagtgcaaaaaccagatttggttaaagagtgtcgacatattgctttgtgtaacataatgtataaaattgttgtgaaagctttatcattgaggatgaaaagtgttcttggccctcttatctcatattttcaaagtgcatttatttcaggacggttgatacatgacaacattatggttagttttgagcttcttcattcactatttaaaagaaataacaggagaaagagttttatggcacttaagtttgacacgagtaaagcatatgaccaagtggaatggggattcttagtcagtatgatgcgacagtttggctttgttgagggttaggttagggttatcgtggactatgtgacgaccccagagtacacttttttaatcaatgggcgccctaaaggtcgcgtgattttgacaagagggttacgacagggatgtcctttatctccttacttattcctattctgtgcagaatctttgtcttcgttattctcccttgaagaagccagaactgaactgattaggtttaggtgttatagatcaggatcacgtgttactcacttgttctttgcagacgatagccttgtgtttggtaaggctaatggaggtgatagtgaaactataaagtgtatccttctaacttatgaggctgtctcgtggcagaagattaattttgagaagtttgttatcacttttagtctgaatgtgcaataggtggatcaagatggggctatgagagtttcagggttgacatcagtggctacgcatgacaaatacatgtgattacctatggtgattggtagaaacaaacagcgagcgtttgaggggatctgtgaaaaggttaggaagcatgtgtggggatggaagcagaatttcatttcagccagtgggagggaagtactgatcaattctattcttcaagctatttcaacttatatgatgagtgtctttaagcttccgacgaaaacttgtgaaaaattaaagtatattataagacaattctagtggggttcatgtggagatcaaaggaagaatctttgggtgaaatgggaaacagtatgtcagcctaaggcgatgggtgggcttggtttttgagattttaattttttaatcaagctcttttggccaagcaagtttggaggttatttctatatccagattcattgcttgctcaaattttgaaatataaatatttttcaaattgctctatccgtgaggccacagaaaaaattggttcatcaaatctttggtcgagtttgattaaggaaatggaattgcttaagtgcgggcttcggagatctattggagatggaacacaagttaaggctttcaaggacccatggctctcgcgtccgaggtctttttagcctatcatgaagaggattaatgatgactgccaggtaaatgaatttattcttctatttggtacttgggatgtgggaaagtttcaacaagtttttttgccaaaggatgtggacataattctatctattccattggcgaggtgtgaggcagaagatggttggtgctgacactacgatagagatggggtttataatgtcaagagtggctactcattggcctggtcgctctaggttatggagggtgttgcagattcatccaggttgacttgctggtggaatggagtatggaatctcaatttgccaccaaaggtgaaaatttttatttggcttatgttccatttggctttaccagtagcaacacaacttatcttccagaaagttcgggtacctctttgttgttcttggtgtggagaataagctgaaactcttgagcatgctctatttttatattctagtttaattctagtgtggcttcagttggggtgtggtcggtgctccgtcgatgtgcacatgggccaatgcaagaaattctccgactactttttgacaggctatcctgtgaagcttttgaattgatgatgacaactctttggtggctatggtatgataggaactcaatattatttggcaataagcagtcaagattggatatcattctagacttagccagtaaccatatgacagagttaaaggagtatgatcggcgaggccttcatttgggattgagccttacaaacccagtgagaaactgaactactcgatggatgccacctcctcctaaatcctttgctctagcgacggatgcttcggtgattccggggaggggctttgttggattgggggggaggggggtaatatgggatgcatttggttggtgtggtcatcaggtgtgttaggtgatttctctgctaatgtggcggagctgcttgccattcgtctaagcttggttcttacgcatcaatttggtttcaatatttcattgttaataatgattctactgtggcaattagttggataaataagatttacattaattttagttttcactctattttattagatatttattctttattagctgttattagtggtggttcttgcagtgccattttgcgatcagcaaatagtgttgcccatacactggaaacctctgttactagtctaggagattgtgtttggacaaatgtttgtcctcgatttttgagttcttctgtaccagctgatttttcttaatgaattgtgcattttttttaaaaaaatatatatttatcggttttaatgaaatgttcaatttatacttttggtatatgatgtctacccctgttgattaattttgacatttaaataaatttaaagaacaaagttcgtatttttaagtaggtctcattatttaatttaatgataatattaactttctctactatttagagttttatattctcttaatctagtacactttaactattcaaatgtttattgagattttcaaaaactaattaataaagaaattaagcttaaaaattataatataaaaatgatgtaataagaatttttacgtagttaaggtattaataaattttagtccacaaaaattgagcttgaaaagttatggagtatttctacataagaatattcttgcaaaagttgcaaaaccctaaaccttaccttgagtctatgaactgattctcaaactttttgcatgaagggatcatgttctatttataggctagagtcgagtttatggataaacccgaacccgttaaggtttgcatgtgtcaactaagtctactgctggggtaaaatgcaatattatactgactttggactggttaggtgaggcccaattgttgggacaacagtcgtccatacggaaggggaccacttgacagtgacaagtggcatgcgttgccaatcgtgtgtagtgcccatttgagaagaacgtgtgaacaaaaggcttgtcctttttaggtgatgtgcgcatttcacaggtctgacacaaggggcaagcccctgatttggtggggttcagtatcagagaggtgccacgtaggatgatatggggatgtctccgaatacctcttcaatacctcacccgcattgtcccacgagggtatcaagtgtactatgttgagtcttccttcttctaaactagtcgttattaccataccaaaaaagattcagccttaccatgttacattagattatagttggacccggagttgtggcccgactccattacgaactgacccactaactttattggacttgtgaatgggcccgctttggctaatcttgggcctctaaattacacgcatcacctatatagaaatatggtgatctatggcatatggtacaataataatcaataacaattatttcgtagcgtacctaatttagtaccgtaaaaccaacaatgataacctagaacttgcaagttccaaataggttgtttaacacattagtctttcggactagccatatgtaaagatgaggtccttatgtgtaacgtcctaaataattaggcacactacccaagatacttatgaaaccctaatcccctaaatgggattactaatgaaattagcgcggaatttaaac

SEQ ID NO: 14653 - DNA, 5626 bp, Cannabis sativa
tgtatctttgtgattgaaaaagtgcaaactcttgttactattaagacaaagaaattgaaaaatctccattgactcaatgaaatattaccacactaattttagggcatcaaaaatataataaaatattcttgaattaaacaaaaataatcaaaattaagtacctcacataaactcaaaatcatactaaagtttcataaataactctgctaatcaacactaatctaaagtcattaacatataggatcttgttgagtccataacccatgaaccccatctcccaaaacttttctcaaacacttcaactccttagaaagatgatcatactcgaattgaataacatacttgcgcacaacagtaattacatcttcaactttcttcaatttctcctcaaaaacattatcaactagatgccttgacatagagaataacacatcatttgtaagcatcataggaaaatcaggactacaaaagctcacctccaaacgaagaacttcaataatgatatgatgaactacatagtcttctatttcatcactaagataaaacactctatcaccgcctttgtcaacgctcttttcgctattcaacaagggtccttcaaggtccaaagccttgataaaaaattccaccattaatacaacatgactcatagcaagagagctacaaatttttccttccaaagataagcattcgatgacagttttaagctctgaaagactaagggaaacaattctgtgacttgcattggaagcaacaacgagtaaaaagacataatcaatgaggaaggtagagattttagtgccaagtttaaaaagagaattctttaaagaagtgaaagcaaaaagaccatctttattacttggatttttcaagtcaatcattctcatcaattcaatcaaattgaaatacccttttgctctgttcatcttggtttgttttctccaagttgattccataaactcattcaatctttgaacatagatgtttagaggttgttttgtcttgttttggtacctttttggtatgttgtacttttgaaacctctcttcacacttatccaaatactcaatttgtctcttcatatcaatcttcaaagattcaatatcagccacaacacgattgagttgtttcacgtttgttattttcttcttagaatgaggtttgaaacattcttcattcaatttcgaaagattttcaaacaatccgccttgtaaacgtaaacccttctcttgaagtttctcaatctcaccttctttcactgaaccgctgcgtttgtaattatcaaattcttttagtcttgtaatgagcttcttccataaatcatggacctccaaatcatccataatttgacaaaaaagaaaaaaagaaatcttaatttgttgatctcatacaaagtgtttgaaattgatgaaaaataagtctacatagtaataatatgctcacggaactaaaactatattaatctcatacattaaactgataaatatctatagatattaacttatttcaaactaaaattactattttaaaatactttaaattatttcaaaatataaagttttcaaaatatctacatatattattattgttattgttattattgttttgttagtcatttttttaggctagtcatcgtaacttataagttgtttgtagtatataatattccaatcgttagaaaaaaaaaataaaaataaaattatatgaacatttttgatgatagaagcagtatgaagagttaataaatttccgtttaaaaaaattaaataaataaagagaaattaaataaatgacatgtcattttacttagtgattataaaagataaaaacgacatgtcgttttattaaatgattcaattaacacaaataacagaaaaaacttcctttcctttctattttctgagtcattcactctttctctctctctgtaaagaaagaattacaaaagaaaagtaaaagatatcatcttgttccaacacgtatagagagtaaagatgttaatgcatttaaaaaacaattgaaattcatagaattgatcaaataagctctgtctcttaacaagcgtgtggatgaattcaataacatatgtttattcttcaagaaaatggtactaagctttttgaaagtgaagatagttcgaattcaaaattcgagtaagaacaacaatgcaatagaactcaacactacaaggaatcacataaagacagagaatgagtttttggacaataacccaaaacattatcaaaatggtcacaaacaacccctttaaaaaggcttatgtagtgagattacaagagttgatcatgaatccaattactggttttcatttagtagaaagaacaatcaattatgtccaaacttgactaccttcactactctttttctgctctctattaagtgtcctttgatcatgattattggttagtacctaaacttaaactggaatggtaacaaaatttaacttcttgtacttttacttgcactttattttagatttgatatttgatgaattttgctttatatagtttgattgtactcttaattaccaaactatgaatcaaaagaggaactagtcttagctctaaattgaattacaaaacaacatttttgtggatgagttgggattagcaaagttgattgatttttcatactccaaatgaatctgtctatgtcagctgttgcaggctcatatcatatggctatattaatactttttgtgttcattcattaaatccatttgcattaattaactactttagcaagaaaatgacagttttgagatcattatttgctctaaagtctgatacatgcaacaaaattatcatgcttgaaccttcacttctcattccatcattactaaagatcactaataaaaaaaaagacaatagtttgatttgatacagtcataatcttaattagcatgattaatcaaagctcaagctttttccatatcttttgaatcccaagagctattgtttccttaacaaaattcactttcttttcctctttatggcttcagacaacaggcaacaaggcagcttccatcctcagctcattcatcttcaagctcacatcactcaatttggtctcaaagaaatttctgagatgagttcccatggataagtacacctcatctgtcaacaccataggcaagtcgggacaacaaagagcgacttcaaggcgcaagacttccttgaggatcattcgaaggagctctaattctgtgtcattattatcattctttgctgctctgttcacaatcaaactctgcttgttttttttcatttttctttctactaattgaatcacacataagaaagtcttgatcataatggaatcatcattatttttctcaacactaagtagctttatcatagccttgaaatgatcaaggttcttcattataagtttcctatcacccaaaatcaccaccaaaaaatccaagagatatttgtgccaagatcaatcacaactgtcttcatggcctcaaaagtactctttctccgagattgatgatcaaggtgttgcactcaatcaaactctttttgccttttcttcttcccttttcggtttctttagtccaaattgtcatgaacttttgcaaatctttcaagtaatccttgaaacagtgatgatcaagatatggaatgttgtacttgaagtgtttgtcttaaaactcattggcgtgtttgctaagacactcggcttgattcgtcatgtctatgaattcgagtgtgaatttctcatgaccatcttcattattccccaaaagggctgatgcagcaacaagcaaggacctgtattcatgtgctatttccaagaagtattgaaaatcttctgagttttccagttctttgaacttcatggaaatgtttttgttgacatatctccatgctaagagatgtgtgaattggatcatcagctactacacgacatgtcgtttatttcttacgacacaaaatttgtcacttcatgaaatggtttggaaatgatctgaatatcaaggatttgttgaggaaaaatataattaattagtcatttcaggaattacgtgcaactctaaaattcaagaataaacattatgaaaggattctaacacagagcaaagatcaaactcaaagacaatcttcattaaaattcatacaaacaaactcttaattgcatgattagtactaaaggtcaagtttgttccatatgttctgaacttctatagccattgtttccttaacaaattcaacttcattttcatctttatgactttggacaaaagacaacaaagcaacttccatcctcagcgcattcatcttcatattcacatcattcaatttggtcccaaagaaatttctgagatgaattcccatagataagtacacctcatctgttaacaccataaccaaatcaggacaacaaagagcaacttcaagtctcaaaatttctttaagaatcattctcatgatctcgagttctatcttgcccgcgatctcagtctcttctcctctgttcccattcaagccctttctctttcccattgttgtttctactaattggatcacacctaagaaagccttgatcacaatagaattatccttattcttctcaacacttagtagttttatcatagccttgaaatcatcgagattcttgattatgtgtttcctatcacccaaaatcaccaccaataacagaaaatcagtgatgattttagagacattagtgccaagatcaatcaccacattcttcatggcctcaaaagtaatctttctctgagattgatcaagctcttgcagccactcaatcaaactcttttcgccttttcttcttcctttttcggtttcttccttccacattgtcataaactcttgtaaatctttcaagtaatccttgaaagattcagtctcaccaaaatgtggaatgttgtagttttggtgtaatttgtcatgaaaatcatccacacgcttgttgagacagtgagcttgttttatcaacacaatcattttcgattgaatctcgtctttacaccccaaaattgttgatgcagccttgagaagagagcgataatcttttgctaattccataatgcttttaggatcttttgattttttgaccagttcatgtaaattcttgaaaatgtttgctgacatttgattccatgctaactccaaatccattctttgacaatttctcaagttgcagctttttttttctttgagatgagagagtgataataagacttgattagtggaaagaaatacagttttttctgttatttatatataatatgagaaatgctaaatccaagtaagatttaatattaatattgtttgcaactcaatattagatcttatttgtttatttgttttactttaataaatattataataaattactaattaattataaagtcacactttattgtggtattatagaaatgttatatacatgtcttataattgaagctttgaaaccaaaaataaatgacttataatatatatgttttgttttataattttaaggttaaataaattttttacatttttataatttttaataaaaataatacgaaaacaaaaaaaaaattacataaaagtaacatttaaatagcattaaaataacatacaaataacaa

SEQ ID NO: 14654 - DNA, 4865 bp, Cannabis sativa
ctctctctctctctgagttctctcaaaaatttaacttagcgatgaagaagctgtaccggaaggggacggttcatccgtcaccgccaatcatatccgaccacctgtcctttctaccggctgctatcctcaccctcacggtggctttgactcctgaagacagagagatcttggcctatctcatctcctgctccaacggcgccctaaacttctcgtctgctccgagccaaagaagtagtagacccgcctcccagcacaagaacacagtcttcacaagctccacctccggtaaagatcacccgccgcagttcaactgcgactgtttcaggtgctacacgagttattgggtgaggtggggatcgtctccgaatcggcaactcattcacgaaatcattgacgcgttcgaggatcaattgctgactcagaacaaaggagggaagactagtaagaaagagagaaggaacaagagaggtagtaataatagtactactacgcctactcggggcagtgttcgtggttcgggtactgagttgaatgggtccgagttgagttcgaggtcatcaaaggaagatttgtgtctctcggaatcggtccaagggttgagcagtcgtcgcgatgatcacggtcacagtcagggtcatgttgaaggtgatgaaaatgatgaggatgagtcaatggcatcagagaaagggtctgtgagaaggtttgtgaatttcattggggagaggatttggggtgtttggggctagacttataaaacatatatatattttcctaaaattaaatgaagaaaaggaaaattagtatatgggaactcaatgaagagaggcgcggatgagcttataatttagtaagttttttctttctttcttgatcttcaacaacaaggaggagttttactttttggccccattgtaaattacccttatgtaaaaaatgggtattttttatttctttttttacattttgaattaatgactacaaaaactaatgtttcgttctctcttttgaatatgttgcatgcaaatattgagtacaatgggtggtgattctgaatgattttaaggggataagtgggaactgggagagagttttagttagtgctatttactgtttgtgtagggttgttaaaaattgattctttttggattgagaacttgagaggggatttaagattacattattgatcaaagatatgtacggatctttctaggtaaggttaaggtaattctcaattccatcacatgtgaccacgttaagttcatttaagttggaatagttaagattttcagttattcaacttaaattttagtcgaaaaaggtgttgctgattatggaaaagagaatatacataattgaagagagaagcttttgaattatttggtccgtaattaattgggtaagaagcttagatttactaataccaaaaggaatagttgagtggtccaggccgaagccgaccattatgactaaagagggcccatggcgatggtggagtgaggttatgcatgggcaaaatgcatatcgccggaaatatgacctttttgaatttcttttagagccgggaatccctgaaaatgcatgatgattttgcatttacgaaattgcccatttctatgagtaacctagtgatcgatgcaacaagctcaccgtacgatgttgggtacttttggtacttgaaattgcagagggtataatggtcattaaagtaatatgtgatggggttttgggtaggtgtcgcaattaacgaggtcggcaaaagtaaagagggcttcgattaaagcaacgggactctgcccaggaaaagtcccactaaaataactccagtccaaacatctttttcgttgttttctatgggctattttcattccttccataattgttttatttttgtctctttttttaccattttaccctcgttcaatgtctttaaaataatcatatttgcactaaaaattatagttaacaaagaaccttttaatgaactgaaatatttcactaatcatacattaaattgcgttttaactgcttgaataagctataagaaagctttatcaatgacttttgatcacttttgcttacaaaaatgtcgatggccccttgataatgataagaaaaggtagaggaaagataaagctcacctaataaataagtattatttttcattgataaaattaatttgttggttgagtttattataattataacatgtaatttattagctgtttattttatgttaaaagttaataaaattgcacattaagcatgtgaaattattaagtaaaaagttttttatgctagaaattaggagttatatataggctatcatctgtagggatttttttttttttggctggttccaaataaagtgtgaactccaaatgataatactaaataggccttcataggattccgtttattttatttatttatttaaattttattaaaaatattaacatagtgtaatataattatttgtatgtaattgtttttatacttgtgtatatttatattttataaataaatgaatctttaagaaaactttctacttgtaaagaagggactgtttagcagcttaagcacttctcttaatttcttgtcatgtttttattcatgttacatgtataatatattgggtttcagctcataattaagggtttagctaaattgttatgttattattaagatgaaaatatatgaacaacttcaataacaattaagaaatcaagtaattgaagttggggtgtccataaagtataaactgtagattcgtgcagatattttgtgtaaacaacgaaagatttccaaaagacacgcatgtgatgtcactgaatccaactcaatatatccaaaactcgaccttcatttaccaaagcctaaaaaactgtccaaatccaaactatatatataaatctatgaaagttgtacctaatttggggtactcacattacacaacacttgtaagaacaaggtcccatgttattaaattcggtgagagcagtactgagcatcaattcctatttttaactttgcctttaaataaataataaataaatcctataacattattactcatgccgattatggcttgttgttgggacaacagtcacttcagtaacctatgtttgattaatttaattaaaatggattaaaatgagttcattaaagtaagaaagggtatgttagggaaatgaatttgtgactttgtggacagccaatggatatagaaagaggaaaagagagagagagtagtagtagtagtagcacatattcctccaacaatagctttgagtttcccatatttgtgttatcgcaacgcccatcaccgtacacgtgtcctttcacacctcggttaaccctgattcccgtgtccttttgtcaaaatcttcaaaaccttttctttcttttattttcctacattgatgcttaataataatgattaacctcatttgatactgttcggcggtttattaaatatcaataataattaacattagaaggaattataacttttttacactttagtggattttcatggttatcattgttatttgttactactacgataatgatcattgtctttcatttatttttctttcttttacttattttgtgtaatattacaataactaattttcctttagacgtttttcttagtctcttcttaaagtaaacgagtattttgttctcctataaaaagcaagaaagaatcaattaatttatcatttcctttgttattataccaatatacatatatgtaattaggtataggtttcaaatattaattaatggaatcattcataatgacagggttgtcttcctttttctttattcattcattaatttaacatattttaattcaacaaataattgtaaaaaaattactaattatttgcccacatcgactattagtattgaacaataatactctttatatatatataaaatagtgttataattaagatcattttctcttgaaatacttgtacttagaagaagaattataaaaacaaatgattccattttaatagaacacgttgaataacaaatcgccctcatgtgagaaacgatatattgttatgcttaagaaaaaaagaaatgacataaacaattattcatatatattacttttaagctattgtaaaaaaaaaaaaatgaatccaaaaaataataataaaaaaaaaacgattaccatacaaaaataaatataaatattaaattatgttatgaatatatattaaaaagatactactcttatagtggtactagtttatgatgataaaatttgacatttatgtgatttttttttcttagtttggtagataaggtagaacacatttgtcgcttaatttcattcttggaccatatagatttctatcaaaactccattacattacaacttattttaatagaccaggtccatgaaaaggaaaaagagaaaataatgggagtcaccactccactagtcaaactcaaaaatggaattggagtatgagtttgtttcattcgaagttaaaaagattaatttatttaaaatcaatgtaataatagtaataataacaataaaatgatactaaaaggctaaccagataattgacgagatacccgaatctgacatccattggattagaggtttgaaactttaaaacttgcctcatttctcacgcattttcctgtggacctaactatttatgtctcttaattaatattttaattatggttggagtcttggaggagtgggatattttttattctataaaaatgatcctatttaacagcaaaactagtagaatattgaaaatattaataataacttgtagtcgtagtgtagtactagtcaattagtcaatgaggtggaaataaattta

SEQ ID NO: 14655 - DNA, 12070 bp, Cannabis sativa
agcactttttctggcccacaaaagtgagaattttgcttgcgaaattggcaaaaggagaatagggaatcaatcaccagcaaaaaaaggaaaaggtaagtagtttgctatgagctttgctcagaattaagatcattttggatatactttatatactttgtcataatttcacggtattttacttcacaaagtagatgacaactcattattgcacggcgaaattgtcccttatttgtcttagcccattctcaccaccctttttagcttagggattcttataacattttaaatattaaaattgtctgcttgtttaggttccaaacaaaaacccattcacagtatattttttattcttttccccatgccccttgattgactttgacaaaatttaacgatcatgcatttattggtagagattaatttaccatttaaactattaagtatgaacacaattagcatttataggaaaggaacattcaaaagcagggataaaaggggtggaaagatataaatcaacaagcttgtaaaaaggttataatgtaatttccttcattcatgcacagcagcaaaatcataattggagacaactagtaaaacgacctgaaaaatacattataaaatgattaatttgggcaaatcttaccaagtcaagatcataacagtggacaactgagatggccttcttgccatgcaaatgttgaattgtcaacattttttacctttttttcttcttttgattttagtctagtgggctataaatatcttttacaatctttctcgttcagtatgaatacccaagaccaaatacgttgaaaatgggctaccatttaatctaacggacaaagtttatgtctcacaagaaaaagaaataaataattaaataaaataataataataataatatttaacaaaaaaaataataataataataataattgatcattttctaatttgcgaacaattcatcataccaaccaaaaataggttaaagataggtgtatactatcaaaattacattctatagtcataaacatataagtcctaaattcaaatccccttcctatatttccaaaaaaaaaacacccttgcagtgtaaaaaaaaaaattacattccctatttatttatttataatggggttcattttgtgctttagtttatacccaagctccggtttattttgtgctttggtttacttaccaagctcgtatgaaatatatgtttttttctttttttttttaattactgaaatatatgtttagttaaaaatagtgagacgagtctattatttttggaccatataactccaataaatcttaatcgtgaaaacacaagttcagccctgtaacactgatagcagcagaaccaccattcaggctgacagatctgccattgtgggctaatatgaggctccaattcgagccaccaagggtccacttttccgattatcacgctcagtatccgacaaaaccaaatggccatagaaattagaaacagatgctcaatacatataattttattcatttatttttatgcgaattttaaatctcaacacctaagttcggcctggtcaggacacctggaaattaacttaacaatttttatttattttttttagtgtactgctgaagtgtgggctactacactttctaattacacaaaaaaaataatttgataagaaaagagacgagcgtgtgggtaccttaatttgagaagacatatcacccacaatagtcaggtctgtggcaagcaaagttgcacttttttgtaaagaagtgaccgactttcatgtgaactcataatgcaataaaaatcacgggcactccagtccaatccagttctgatttcatcatatgtcccagcaactaatatctgtatctctgctgagaaaaggcaaagcaacctgggaatccacacatggtccataacattttgtccaactagtgacactaatagattatgggaatcaaagatatttgtagagagggtaataataacattggaaaataaaaagaacggttggtatacaatttaaagtcacttaatctgaatatatacaggtgcacttggcttgacttggctatctaacaggactcgatggggacaaaaattgccttcataggcctcaaaaaacaaaaactataactcatgcaaaataccatttgcatgtgcctacaccaccaatccatcctgtttgactagctgttccatcaggcaccgtcgacgacgccatgaatatatataaatatttcttgtctcgttcacttaccaggatctagattcatatttagactctaagagggttgtgggtttctaagcaaattagcatccataaatacctaaggctatatccaaaacgataggtggcaccagagacaatattttaaaccataaatagatatttaagatcttctacagtcaagcgagctccagagcctccactgtgatcttcaccaaaagcagaagcaaccatttttctcttttcttcctgcaaacagagtaaaatatcagttggcatatatatgaacaattcatatacgtgcattccatttcctcactgctctaaaacattctcatatcaagtttttgtgcggccatggccttaccacaggatcacaagatatagaagggaagtggaatttaagacttcttgataagacccacttgcaagcatctatgcaatgaaatgcttgtactgctatgaatattgtactaggtacaggtacaaccacagttttaaacataaacatctcactcctctgtgacactccaccaaacaccttacacaactaaccaaaacactatttcccgcacatatgctgactagcacaaaatctaagtatatgcaatgataaaactagttctatatacttctcattactactaccaacaataacaaatctaccgcaaaaaataaaaaagcacaacaatgactggtacctgcagagctaatatcctgtcttccactgtattttttatagtgagccgcgttacagtaacaggacgagtctgaccaattctatgtgccctatcaacagcttggtcttctgtagtgggattccaccaaagatccaaaaggataacatgacatgcagcaaccatatttagaccaagatttcctgccttcagtgacatcagcataacagtaacctgcaatacaatttagcaaatatgatcttagtattaagagcatctccaatagggctctccaaaattattctaaatttgagctaaaatagctaaaaattattttacacaacaacttctaagaagttactccaagcgtcttctttaatttagttacactagtacttagtaaacatgattggagaagtaataaatataggttttcttttcaaaagaaaattactctcctttatctcaaattgttttgctctctacatttaggtagtgattgacattgttgatgaaaatatgatatacagttagcaatttagacaaaggacagtaaatagctagcatggttggagatgctcttagaagattagagtaagttaataaaaaagttatttttgcacaatgttgtcaactagcaagctcaagaaaccatgtaaagattcccccagctgagtgaaacagaagtaacttgtatttaaacaaataatgttatgagtaatatataaaattttagtagagcccatatcaacaagtacaagaaagaatattcaacagggtggcaaaacatgtatagcaaataagcaagcaaatagggatacttaaagaatatcttggtagagatcaaacctctggatttgaattaaaatctttgacacccttgtctcttgagactagactcattgtcccatcaagccttctgtatcgtatacgagcttgttttagtgagtcctcaactaagtccagcatgctagtccactgggaaaaaataattgttttaatgggtccttcaattggcttgttcgaatatgttgttgtatgctttaacacatcaacatgtgaatggctactatttgcaaattcattagctaaagaagagcttccattgcacccaacagagacagagccacatggttctccatccaagttgtttggctttgaatgtgattgcaaaatttcaatcacagctttgattttagatgaattgtagtcactctgcatgactactgttttatcaacaaatgaataattcacaggactaccatcaagatcatcagagatgcaacttcgcagagtagccttggaaaaaacgacatcagagccaacttgttctttgcactcagtagcaggacatgtattgtcatccccggtcagatactctgatatacactgatagcagaaaacatggccacacatagtaacaacagggttttcaggtgtatcctgtcaatagcattaagtaccaaaatattaagtaatcagataagccagcgatggcaacaggaaaaaaaaaaaccagcctaacaacaaaaggtccatacaggagtcactctaatcaaaaaaggaaaaaaaatagaagtggccattaatccttttcttttcttcctaaatccttcagtttatttgcctttctttttggttgtagatactttttttctttagcctgatttgttgtactcttatcattttttattgcaataaaagttgtttcttaaaaataaataaataatagttaaacagagagtgatatgctcttgaaaactcacatcacacttactacagagagccaaagattctaagagattcaatagattgataagcaaatctctggggagtcttctagccatatctacagaatcttttccaacgcaatcagaattatattccttaacaagaatcgggtgatcacaagcctgccggagacgcaaaagcatcaaaagaatatttgcataattctgattcactgtgccagcagcagcatatgcctgccatgcatgaaatgataatatcagcgcatatgaatttcatccgcacaaaatttcagatgagcaaccactaagattcatgatcatgagagcagacagaatataactccactgtgctcttaattcagttgatattattaattttgcacattttatcaaccactatacatgtatgttatgcaatactatcgtgctttagttactacagtcataacttctatgttgaatattctgaaattagaattgcttttctattcacaggcataaaatatgagtagcctcagcataaactaagaattccaatgcaacgccaaaagtgtagtaatgctatatttatatataatatatatgtaccacttttaagtacttttagtatttttagtacatgaataagtatgtgtagtaatgctatatttatatacaagtaccactttgggtactttcagtattttcagtacatgaataagttgaaactataatagtttatcatgtagttttcggagatttattacaaattttccaaaacttcttggcaatttaggaggccgaaataagaattcaaatagtctcctgcacaaaaatataaatattgaaacaagcaagcatgcaacaagctttttgaatcccgatttcgccatcctaaattatttcaaattttctgaaaatttgtggcaggtctcctgtaacagcattatacaccgtagtgtataataaaatagagttgtaactaatttatgtgccaaatatattagaagtacttacagctagtgacttttactgtgtacctacagccagtgacttttactgtgtacctaaaagtaagcattttcaatttctcaagaagaaacaataaattaaatacatagaccttaaattgtgaacgtgaatcagcttctagttgagtataaaaagcccgctcctctgatgagaagtccaccttagacaagcaaacattctttggtggtaagttgattatgggctccccatcgatacatgttcctagagacagtagtagaagatgattagcacaaaagggcataaataacacataatcaagttagcctccagaatatagggttccagtatataagcccgtatattatgaagtttgtaggctgtgttattttgagtgtttattgtgattttctaataatgacactaactgttagatggcagggcaggactaatttcatgcaacactcttatgaacaaactacaagtactcaatgaaagtagagagaagtgaattaattttgaccacacacttttatgaacttaggaaatgaattgcagattggagatcgcagaaggttgatcccaaatcacgcataaggcaattactagctattatactaaaatcaaagatatctatataggaaccagctcccaaggttttcataaaaagtcgctgcatgttttgcaataacatggagaaaacacacatgaaacataaataataaatgggtataaacaagtaggtccataaaagaaaaagtgtttataacacaccatgtagactctgaatttcagcatagatcaaagaagtgttatgttagaaagagagagaggacatattcaccttttgttcgacgtaacattatagctcttagaactgcttgtagcttcttgtatccttgaactgcatttctagatattggaacctttattgtgttgcaaaatgatttatacatcgcataggggtcatatcttagaaacctgaagtagctatacaaatcatcaattgtattttgtattggtgtaccagataagcaccaccttcttttagctcgaagactgcagcaagctctagccacttgagtcctgtgattcttgattgtctgagcttcatccaatatcaccctcagccaaccaactcttgcaaggggaccacaatcataatcaacagtagagctatcaattccttttctacctttcctacccttcttgccaacatttgaagtcttcttcttcctcttatttgtggaaaactcggaagataatccatttttttcatcatcatcctcatcaaccagaggttgttttgggacttcattagttacaatggcatatgttgtgacaaccacatcatagctggccaagcaaacaggatcctttgtcctgttacctccatgatagactaggacatttaacaccgcttcacttgcaaccttctcctcaagctccctggcccactgtcgaagaacactagctggacacacaaccaatgtaccagcatctggcctccgcttattgaaaacccttgaagaggtactaacttctggagctaacttaacatcatctgattgttcagttttcttgacttcctctgggccaaccttaccatcatcatcatcatcaatgtccaaagctacagttttttgactgcatgactcctctgatttggattttttctgcaagaacctttgcatctgtatgagagcaatcattgatatagtcttgccaagtccctgaaagatatgcaacacgagtctaagtaagctaatataagacaagccaagcactaagctacatgtaagagaagggtcaactagactccaagcaagtaacctgatcatcagctaaaattccacccagacaatgtagacttctagtttccttctgaagcatccatgccaatgcaattttctgttgagttaaaaatacaagatcaagaccatgtaattcataaaaacaatagaatataaaaatagcaactgacttaatatacctgatgtctaagaagagatactgacaaaagaccttcaggtaaattagcttccacttttggttggttgagatcctgcagaaaccaggcatttttagcactaaaaatgagtagaaacccgaaaatgaaattggtaagaacaatactactctgctacagcagcacaaagaacaggaagtactgtatccccaataacaaaccttttttccaatataaaatttgttagtgaataacaaattaagaaggacagggaaatgcaaaggaaaagaaaacgtagatttagaagaaaacaaaagcacatagattatagagaatcaatacaatacatctttccaacaataaaccaaatgtttggaagcccaatacaaaggcaagaactttactacagaggtgagacccaatctaagagaagtaaaatactccttagaggtggaaacctaaagttatgctgagaatcttacaactacttcccataaacgagcaacaccatgcacattatcataaaaaggagaaaaaagaaaaagacatactccaactagatcagccaaaggacagctaatgacccttactgcctttctaaattaaaaccaactatatcccccaagcaaataaggcttaacaatttttttttcaaaaaaaaaaaaactggtactacattaatttccttttcataccctacttcaactagatcggccaaagtacagctaatgacccttactgcctttctaaattaaaaccaactatattccccaagcaaataaggcttaacatttttttaaaaaaataaaaaataaaaaactggtactaaattaatttccttttcataccctacttcaacctacaattcttgtctttcttaattttgcatgtgatcttctctactctcggctgctatgaaaaaataaatcaatgcaacacataaaacaaataaaatgatgataagacacataatcgaacatgttgcaattgtaaaaccccaaagtaatactagcataaacgaaaaagggtaatactagcatagaagtttattgcttctgcaaccaccaatagggttatggcacattagtggttgatacactcctaaagttagcatcaccaaattgaaaaaccatcatgatacaaacttgcaccattatgtacatctttatcccgagacatatgtactatggaatttttatggctctaaaacctgtgtacaactgcaatgttaaaataggtaatgaatacctccaatgcagcttgatatatcagcctctcatcactttcagcaaccctttcttccccagtcatggaccggtaaacggactcacttgaagtggcaaactgtgtaggagcagtggactttaaatgcatcatagaagaaggcagagtcctacccccattgttttcatgcatgaaaacatcattatcgttgcccatgctggagtgatctctcatgtggcccttgcttatggttgaacttggccctgttgaatagcgagaacttgcataagtatctcgaatctgattgctgcttctatttgactcagtacttatagtagaagacagaagagaagatggaagtatcctctttaaagcctgttgggaagagctattctcatgggcattaccagaaaaattagccttacgtggagtattggccggacgctgctgataagaattaacatcaatatgaaacttcgaatcatgtggtcgtccaatgaattgatttgagggacctgcatcatcactgaaatgaggatgaatctgctgctgcacccgggtatggccattaacactgtgtgagctcccattagaagaagatgccccatacttaggagaagcaacatttctagactgcccaacaagacctgcaagtataaaaaaaattgctttgtaattaacaggtgaaaatttaaaccttaaatagccaaatcctgtagaatcgataatcaatctgacctctaaaatttgagtttctgcctggtgctgatagcgaattaggaagacgtctcacagcggaagtacctctactatcatctatttctacatcactatcagatgaacttatgtccacaatatccgtcattgcaagtcgattttcccaaccttcaaccaattaaaatatatatgtacaatactataaaggttacaaacctaaagtgatttgcattcgacttataatagcaacaagaaaaacagcaaaaacagcaagcaacaatgtatttaaaaacaagtcaccagcagcctgatagcattcactagcttttagcaatgtttcagcaataagctgtaaatacatatccctagttttgtggaacacatgaattctgcaaggaagaccagaattcaggataaaattatacaactaaaaaagggagacaatctctcttcctaggcacagcgcaatgtgaaagcaaatattggatgaaatcaaaatgccgaaaaattgggagacccggaatgtgtcaatctcagcagggatttacaacacccttcaaaatcacaaacctgccccatcttttatttatttacttttttttattaagccgttcacaatgaaactcgcaagggcatttgtaacagacctatcaatcaagtttcacgttcagttggcattccaacaaatgaacttatcatcgtaaacaaaacaaacagattgaagtaggtctatcaatggaggagctaaaatatgaagtgatgagtaatttaagtccgtaatattttaattgagtcaatactaacaggaagagagaaaaaagaaaactcgacatacacgatcaaagccattcaaagattaagtaaaattatagcaaaaataaggtacattagaaaaaaaaaaagttacatagtgaattttataaccctcattcccctggaggaaaaaagaaccaaccttcaacacccaaaaccataaaattcaaaaaccagaccgaaattctgaagagtcctcaaagcaatcatcgttaccaagatgccctatttgaaattttcatgtaaggtaaaccgagtcgtgatcaaacacataaacaacactgaccgaaaaatcgcgaagagcaatgcaacccattcaaaaagtcaacacaaaatctatagcaatagcagaaaaagtaaaacaaacccagaaacccaatcaattaagcatgcaacggcaggaaaaaaaaaaaaaacagccatttttggtcgactacgaataacatcaaattctcacacatgaacaccaaaataaaaaataataaaacaaaatcgataatgcataagagagtgttggaaccctaacctgaaacaatcgatcggggttgcagttgttaacactgtggggtagggtttacagtgaaccaaaactaagaagtgagagagagacagagagagaggggggggaaaagcaacggtagcgtttagagcaaggaaaacattattaaacacaaaactcaaaatcaaaatcaaaatcaaaatcaaaatgtgtacggtgggaatgagcggttatataatatatatttacttttggtttggttttcgcagatataataaaaccccaataggttacaaatttagatccccacttgtttcgaattccaatctaagtgtgttcataaaattatagtttgaaacacattacaatatggttgtagtttgtatttttgctaaattgctcaatgcaatttgattagcggttcaaattgcactaatttttgtaaatttatacaataactaatatttttagaaagggtatctcaaaaaatacatttttataaatgaaattttaatttaagtaataaaacatatatttgtttttttaaaaaaaaaaaaaaaaattcatcatctttattaattgtaatctatagtgattatatgattaaaatctggagtaacatcactactcctgataacacgatcagcaactaaataggatgctcgagctaaggaatgagcaacactttttgcagaacgtctaataaaattgacataaacctctcgcaagtcatttaacaacatcttacaatcagaaataatactcccaaagtatgaaaccataagaatagagctacgtaacgcttgcaccacagtaagactatcagtttcaatgataacctttctccaatttttctgtttaacccaactcagtgcctccttaacacccaaagcttccaccatttcgagttgcaacacccctgaccaacagttggattaatgagagcaggattactcgaagttactcttgaataatcttcattcggcagccacggatccaacactatatttattcgagaagaaccattgaaaaaccgaggagttttttttgaaaatgtcaataatatatatatgaaaatataaaattgtatacgtctgcagaagcagaatgtaattctgttactgcagaactcagttttgcatcgacaaaatagaacagacagaatataaaaataattacagaaaataaaataacttgacacaagagatttgtacgtg

SEQ ID NO: 14656 - DNA, 8535 bp, Cannabis sativa
ttaaaaaaaattaaatatttatatataataaatttatgaggagaggaacaaagaaattggctaattggatataattaatgtaagtaaccttctctttattaagaaactacgtaaatgccacaatcattatccaacataaaataattttttaaccacaactgtaattcttctcatcaatccatttcatttcttacccaaaattttcatttttattatgttttttttccgtaaagactgaatttttaataactaaaaacaaactaacgaaccgacccttctgtcctctgttttcttattctgtgctaaaataactataaagtctccatttttcgaaaactaaacacactcactcacacacccttttctcccattaactcaattcaaccaaatttatcaacttttccctcctaaaccctaaaaccctagtggaagtggtggccaaatccatggccaccatccaatcattgccccaacctcttcgtacttcactgcgctctgggatcattctttttgacattgctactctggtcgaagagctcgttttcaacagcctcgacgctgctgcttcaacggtatcagtttttgtaggcgttgggagttcttatgtcaaagtggtagatgatggtgagtacccgtttctcttatttctctctctgtcggaagaaaatgcattttttgtaatccttttcgcacattttgtaggatcaggcattccgagagatgatttggtgcttttgggagaaagatatggtaataaagttgcttacttttcttttcaaattctgaaagattcatacactgtaactttactttaataatgtgtgggcagcaacatcgaagtttgatcatttagctgataaggataatgaatgtaagagctttgggtttcgaggggaagcattggcttcaatttccgatgtatccttgttagaagttgtaacaaaagcttctgggaggcctaatggataccgcaaagttatgaaggtgtgtctttttctttctttcttacaaatgatatagtttaagcagaaatgcctgtattgactttcctctatttgttgcagggaagcaaatgtttgtatcttggaatatatgatgataggaaggatgtgggaacgacaggtgcagaccctattcctaatattgttatatgatcttataaagatattcttgtgtctccagatataacgccctcccatcccatggacttgttgttggaacttgtatatggaaattgctatacttacgttgttgttgtgtaagtttaacttgtgatcaattggtttttgagtgagtctactatttacattggttgatggatgaagaatgctagttgctttgtaggttaatcgcttatgatgttgtagttttatgttaatttccttagaacaagtaaagttcttggtaattgttcattacctcaagttgaaatgggctttttttacagtttctgttcgggatttattttacaaccaaccaattcggaggaagtatattcaatcaaggtaccttgctacttgggttttctctttactttgttgtgatttatatcatgtgatggtttcttccagctctctttgtgttaatttcattccacaaacagtaattggaatggacatttatgtgttgttttgtttgtttattaactgaaagccctaagaaggtcttgcaatcgatcaagaaatgcgtacagagaatttcccttgtgcattcaaatgtatcttttaaagttgttgatatagaaaggtaatttctagtcacagttgaagttggatcaaatactcttttttcttgtttacaagatctatgatgtatgcagtgaggatgtacttctctacacactaccttcttctcccatgtccctattgaccacttgttttgggaccgagatctccacctctcttcatgaattgaaaagtagtagcggaaaaattgagctttctggatatatatcttccccttgtgataatttgagcatcaaggtagcaagattcacattttgtggttatgatactaaatatatggattttcttttgttagctccctgtttcttacagcttcatatgtgcttttgcaggtctttcaatatatctgtatccgattctatgcctgttaactctgaatttttcattgtggatgtattgtgctttgaataatgttcattcaatagtttaccttaacactaacatctgcagatattaattcacggtatgtgtgcaaagggccaatccataaattggtgaatcagttggcaactagatatcattggttcgatcaaggaaaagctgtcaataatttccaaaccagaaaacgaagtagagctcaaatataccctgctttcattttgaacataaggtgccctcgctccttttatgatttaaactttgagccatcaaaaacctatgtagaattcaaggtaatttcttctctgctttgtcagaagtactcatttaagttgagctcatactgtcttacgtgcaatacatcaaattgccaacttgctctaatataagtattaagttcctggagtgggtacagttacagaaaacagttggaataagcagatgctatggtgtctaatctgagtgcccctttttcttttcacaggattgggttcctgtacttgcacttcttgaagaggtcattcaagacttgtggaaggaaaatatgtctgatatcaagggcgaagatctactgttgaacggagatggaaacaccatatctttaggaggtaatgacctgtcaaatcaaccaacttgttgatgtaaaataacttttatccatttctatcagattttatgcttacttctcgttacttttgatttaagtaagagcctgggtaatgtaacattcttatgaagtcggttatttttgttgctagatttacatgatgttttcccaagaaactccacaactgggaataagaagggcagaatccaaaattctgaggactctcttgaccctatttcttctcatctgaagatgcctatcaaagagctcaactacatgtcccagaggaaacaggatatgattacaaataagagctcacaaaaatgtactcattacttcgatgatcaagaagatgagatggatacatttcatactgacaattctcttcaagcatgggatcagccccttgcccaatgcaagctcaaagtatctaaaaactacgagcaccagccgttcatttctaataaccactctttatctacagatgattattgcctggtagatgaatatacttctggagagagatgcagagtgagtgcagatgttaacttcagttcttcgtggggaagagattcgtttgaagctgatctcggtcttagcagtgaagctgttgatagttcattgtgttgtgatcatcaagaactcagcaatgatgtggcagtgagcagggatgggaagagaccttttctgaagagttgctccttcagagggtgccttccacaagagaggactttgtgtacagatgatgtttgtaagtttaaaagtgataactttaagatcaaccaaatgttgaactggccttatggcggggttaatgtttcagagactaacgagaattttgatttcttgtcatgtcctttgcgggaggccaacacatcaagatttcagtcctctccaactgcagaaatcggtagtttttcaagatcttccctaaggtcattcccactttatgaagagcctaccactgactataatgatggtttcttgtctgattcggttaaaaggatagagactattggctctaatcatctcaatttggaccctgaatggtgctctttgagcttagattcgatttcccagcccacaccttgggatgtagatcattacactgactgcagatatagtaatgatgtactggaaaagagatctagccaagaaaagtggaatgcaagctgttcatacaatgaattttcagatgcggacttgggtgaattccttcctaggcacaatttaaacaaaagacttccctctaagtcggtgaacatatcaaatcatgggacagactggttaagtgaagtatctcttggtaaaaaccagttgagtagtgagatgtacaaaagtcaaagagatcaaaatagttatgatgaaagtgaagggaatgatcatttctctaaacgaagatcaagaagccactcagctccgccattttgtagaagcaagagaaagttcttgaccttaaacttccattctacaggaaaagggggcaatgacccagcttatccaggtagttttattgaagtttttgtatacaaagttggtgctgatgcaaggctagctaatactgtaaaccacttgtaatgtgcagaaggtcgtgaacggtggaagcctatagttttgggggattcgctgttagacaacaggtactacatttgccattttcatttttttcatcaatagtaaagcattgcaactggtcatttctcttttcttgctggtgttgatttgacttcaggctagattggaagaatctacaagacctgaaggaagacttaacggagattagaagtgaggaaaggcttgaacagtctgtttgtttcgacattcaagatgctccatttaaaggtaagtccattgtctgttatagttaaaattgttagatatctgcattgacacttatggttgacagtgtttttctgttccatctgaattttcagataatgtttccctgaattgtgggagcaaatggcggaacagctgcccaaagactgctgtacttattttgccttccctcttttttcattttttttaaaaaatatgtaatcatttgatgcaataaacgttttccataattaatcagtgattaaagtgtttgttacatacatgcagcacaataataagttgcatcaccatgacatccagaatgagagtagtattctcgatatctcttcgggattcttgcaccttgctggtgactctttagttcctgaatctattaacaaaaacagccttaaggaagccattgttctccaacagattgatagaaaatacattccaattgtggctgggaaaactcttgctgtcgttgatcaggtacagttatcaaatatcccgactttatgtcggttgttttccttgccaagttagagaaccattagtttattcatgcatgcacaaacatgtgaagttctgacctcagcagtggtccttttcatcagcacgctgcagatgaacgaatccgactagaggagttgcgtcagaaggtagaaacgaaacgccttctgttttatgaacttttcgaaagatacactttcttgtgtttctcacaatgtagttgaattaccacaggtcttgtctggagaagcaaaggaaatcacttttctggatgcagagaaagaattggtatggtatgctgtctgtatttgatactcttagcaatgattttacttgataattgaaactctttctgtcataatattcagatgctgccagagattgggcatcagttactgcatagctatgccaaagaaattaaagaatggggttggatatgtaacattcatgctcaggattcaaaatccttcaaaaggtatgttcccatctttaaatatttataattatatggtacgaaatagatggccagcacagcatttacttcttattgcaggaatttgaatcttctccacaaccggccaacggttattaagctcgttgcggtaaagcactcactactccttttagctagtccattaaactaacttttctcttcagtatagctctactttggtaaatgatcattttaaaaaacgctttgtttaaattgaataacatacaggtaccatgcatcttaggagtcaacttgtctgatatagatctcactgaatttctccaacaggtacttacatttattgactcaatgatcaacttgtttttggccaattgaatatattttctatgctaacttttctttcaatgttttagctggctgataccgatggatcttcaacaataccaccctctgttcttcgcgtcctcaattccaaagcatgtcgaggtacatgcaagatcaaattttaatgtttttttttttcaattctcatatgttcatagattctcaagtgtatatatttaaggtcaataactgatgtaatatttaaaggtgcaattatgtttggggatgcattgctacattcggagtgttcccttatcattgaagagctaaagcatacctccctttgttttcaggtatttaaggtttagacacaattgttatattattattagcaacagaggagaaaacatcttcttaactactatgatttgtgcagtgtgcacatgggcggccgacaactgccccgctcgtgaacttggagacactgcataagcaaatagctaagactacactgcacactgatgattccaacgggttatggcatggcttacgccgacatgagctcaatgttgaacgcgctgaacaacgtttgatgtcagcatcttgttagagtaatataatagagagtttgttatcatagtgtaaataaaatacaaaactgcagattaccaatatggatttcacatttgatgatgtactttttcacttaataaatctcttttcagaaagttatgctactacatgttacatcttcagtttaaaactcatcaaaagacagggagttgcaatgcttgtaaatgaaaggtttaaatttgtttggtacccataaatgtatttacaaagatttttacaaaaatgaagagtgtaatctcaactcaagtgtctttagttgggttaacaacaccacacacaaggtgtgttagtggttaaacatagcttcatcctctgcaattttctttcgagctctcttcttccttgtcattgtcggttgtgacagcacacaaggccttccatatgggaacaagcatcttcgccggtggcctcaataccttgacaaacaaaaatggaaaaacaagtttgaatttaaacaaattggatggatagagcttcaaaagacgaatttgaggttaccttgaaaacagaaatgagttgttgttctccttgaacaatcaaagagaggttccagtaacatgtagctggagtcacacattccaacagaactggcttcaaaatcttgtctacagcaataaaccgacgactcactcttcctctgcaacaattttgtaatttgtatttacataaagctaaaatagacacagaattcaactacattgacttcagtacacacattattccttaactacctggtatagtgagtttcaatctgaactccaaaagcaggcatgagaattacagactctgagccattcagaaagtaatcatatattaaaagaaaaacatttttagtataataaattcatataatatgtataaagtactgacctttgtggatgggattcccaagcaacaactttagaagaagaagcaagctccatggaagaatgaatatcggacttggagtgcccaatttcagattgacgaaaaagaatgcaatgaatggggagaaaagaagaagaagaagaagaagaaaatggttgagagtaagagtgaggggattggatgaaggtgggagaatgttgtgaatctgaaatgaggatttgcaatcagtcaagtaggtgtatgatgatgatgaggatgatattgaagactcaaccattgcttctgggattcttttgcaacaattaagaagaagaagaaagaaagaaagaaaagtcaaattattggcatcaccacagattagtcttaattgttgctcctgtaatttaactcatttcagtcatttcataattagtgttaaatccagctccttttcttcttattattaatattagaagatttataagataatgtttattaattgagattcaatatccaatctttgtacttatagagcaaattaattgaatcgacaaagcaagagtctttctcaaaacacccaataactcattcatgatcttctaagatccaaaccaattacaaaaccaatcatttcttatatataattaatctgatattcaaacaccacatgtttgatcccttccattgtcaataaaacatacagttaaagcttgaattagtgcaaagcccaattgtgttttttcaacacaaattggaaacaaagagaagaccccaataacacaaattgcaaattctaattaaaaacctgagcttttacagaaagctgaaagaccatcatcatcatcaaaacaacataattagagaaattgaattgagattcagaggcagtgtaagatgattaagatcctaatgaatgaatcgtggagagcatgagttgggtatgtgaaagtgaaagagaagaggagagagagagagagttgtaagtaagagaaataaatacctgatctttattgtccaaacaaagcccagaagagaaaagatatagggcaagctgtaattagggttttgagatatagaaagaggagagggagatgaaaattcaggtcctgactcctcctcctgatcaagatcatcttatatatgtgtgtacaatacaaaacaatacatattctttcttacatgacattacattacataacataacatctattaaatta

SEQ ID NO: 14657 - DNA, 3758 bp, Cannabis sativa
atatatatagtaatattctagtagctgagaaaagaaaagaagaaaagagaaatagtgaatgaaatcagggaaaattctattgagagccaattggagaaaagtcataaaccaaatctcattatattacattacatgcatccaacaaaatattgaacttggactttttcctatttccattttccagtaacaattggtatatctgaattaacaccataaactatgtacaaagtacagcctcacataatttagatcgacagattacaaggttgggggaaaaaatgagttggaatcttcttcagttcatggatttcttagagctgctaaccgctgctcaagctcatcaatgccagaactgcaaggaagtgtaaattcatacatcaatatgattgttaatcgagatgatgaacatttggccatctcaattggatatgatcaagctcaaccaggacatgttgggttttcaccaaccacaaaagcaaataagaaaacaaagaaaatagaagtaaaaaggaagtttgtttcaagatagtgtgtaatgacttcgtcacaaaatgaaattgataatttactatttagctcctaaagaagtaaagagtttgtttggtacgccgaattagacagatgtattatatgttaaattttgatttatattaccatattgtatatttatatgctatataagtcaatactacacataccattatataaaaaatataatactatataatgtgatgcgatgtaatatggtgtaccaaacgaacacaaaattagttatcaataaagttcaatgagaaaggaaggaaggtacctgctagcatccccagtattttttgttgcaattcttccttttggagccgttgacaactaacaaaagttcaagtgtgttcacaatcagcttaaaggacgaagaatcaagttccgaataacaacaaagactagaagtaatggaataccaacctgtgagacaacttcaacgccaatttcatctagcacctgccgaaaaatcaagttaaagacaatgtcatcaattccaatggaccaaatctacttgcttttttcaggagtattccgaaaaatagaaaatatttggtcttgtagcagtcttacctggtttgttagctcatcagtttcctcttcggcctcatcatcatccaaggcatcttctattgcatcagacatcatttcagtctgcatgaataaacatattcataatcaagcatgaagttctctctatgtaaagttgttctgaagatagaataaaggatcttacagtcatatccatttgtgcagattgcttctggaactcccggatgacttttgcttgcttttcgggtgccatttgctgcaagcgaaacatctcagatttcgaaatgaacttgaatgtacaattatatacaatttgtgctgtaaaagtcactaaattctgaccttatttatggctgacattgccttactggcaccctgaatgccaacagcaactgaagattgagcatgcatagcctgcacaaaaggcaaaaataattctaagaacgaaaaaacacagggactcggtgaatacgattttttttgatgaagtcatttcaaaacatcaaaagatggctgaaaataaagaaaaataccattatgatttgttggttcccgaaacgattttagcctctagaagtcatatagaattgagaattctaatttgttttaattttagaaataagaaaggtatgccgataaatacggcattttgcaatgaaaataagataaacaatgaagttttgaatacaaacaatatacataaaaagcccttgttaaattaaagttctttctttaatggatattggtttcaatgggagccatttcagtttagtaaagctatatatgtatcctcaatttaaatttaaccatactgaaaaaaagaaaaatatagaatgatatatgatgacaaagcagaaccaagctagaagtaacaccgtgtcatgaagacagagagaattgacaccctacctgagtatgagttgatatgcctctcatttgagctcgactgccttgtaagttggctatctgttgcctaagtcggactagctgccgagccagagttctagttgctgcctgcataagagaaagcccaataaatatcggaaaaatttaagcataatgtgtggtgatttaatcactcaagaatcttgtagtaatcagccattaactaacccaatatcatgtactgttggaactaagtcttttacaggttatcgagttagagagagagagagcatcattttattacaaatttagtaaaaaatagagagatttctttggagagttgtcgaattgacttgtgattgaaccaagtaattgttggtgtgttcttttctctgttatgtgttcttgaccaaggtgttaattcactaataatgaatgacaatccaatcgaatacagcacagaacatacctcattccctgttttagcagttctctttatctcggcaagaagctttttttcctgaaaaaaaatgataaaaatacatcaaatataaatttttaaactttattttcaaaaaacgagtatcatttctaagatcattacttacttctagttgcaatgctccaatttccttctcaatacctgaaaaaaacagatttagacacaacaaaagtaatacacgagcatcatttgaatattattaaggttaaatactattttgaactctgcattaagttgaagttaccaattcgaccatctattttattaaataataatttaaactttatattttttaaaatggaacctaacaatactctgatttagaggttttatgaactattagttacatagcatgtagcattttgaaaaacactaaagagtaaatttggtaaccgaattatcacttaacaaaatagagactatgatcggtaactatcaaaatctataaatcaacaaagtcatataagaagatttccacacacaatcggttcaattctctactttttatcattaaaccttataattagtgagcctatttatagaacttaaaaccacaggacaagtcaaagccatattattgttccaacacgatcataaaaaataacgaattgattataaattaaatctgaaattttggatgaatttgtaaaaatttacctctggtagcattgttcatctctctcttactcgcccgaagagcctctgaatcaaaacaaatacccaaaaagaaaaccaaaagaaattcagtaatgatctaaaatcgaattagaaatacaacaacaagaattgagacataataaacaaacctttggcagtgggtttcttggtgaagatgttcatggtcgtatctgatagaaatgttgatcccaattcccaaaatcgtgtcaagcaatttaaagagagagagagaatggtttcaatttcaagcaagaagtttcgaagctttttctttcttacttcgttacgttaatgtaaggattgtagagaaggacttgcccgtaaatatccataacttgtgttttctctctcatctttcttttcactttcagttaatacatgtttcatatatattattccaaataaattaataaagaaatataatagaataaataaaatataattaaaattattataatatgttgtttattaaaattatttataaatgtaataataaaatttatcttatttactttatgtataaattgattaaattgtcttttatagttaaaatatataatatatgataattattttgtaagatatattttaaaagacaaaattatta

SEQ ID NO: 14658 - DNA, 3629 bp, Cannabis sativa
tttgtgtaatctgtgttgacagatatgggtggtgatgagcaaactctggtggagatcttagaggagcacatcccaattgatttctccaaatacattaattatgtcagtgctccacaagctggtgccatagcaacattttctggtacaacaagggacacttttgatggcaaagatgttgtggagctgagatatgaagcatatgtgccaatggctctgaaatgtgtcaagactatatgctcatctgcaagatcatcctggaatctccattccatggcggttgctcatcgccttggcccagttcctgtcggtgaaacgagtgtcttcattgctgtgtcatcagttcacagagcagatgcattggatgcttgtaagtatgtgattgatgaggtgaaggcatcggttcctatttggaagaaagaggtttattcaaatggagaggtttggaaggagaattccgagttcttggaaagaagattgtttgggaataatgatgatgatgatgggagctgttctgttaaagaagttgaggttcataggcatgagagaaagaaggggtgttgtggtgctaaggtgaaggttattgatgaaagtggaaatgatgatgagaagaggtgctttgttaaagatgttgaggttaatagaatatgagaaagaaaaaagtgtaggtgaaattccctttattttttctttaataagaagggctcaaaagtttaaaaaatttattttgttaatctgcaataactgtgctgcttctgcaaactgggctttccttttatttcttctggctttgctgataaattattgtctttttaaatcatcataagcaatttattggtatttttgggaaaaagtgagcttgagaaaaagataaaatgttgtcattactttatatacacaaacaaatatgcaacaacaaaaacaaacaatagatgtcatttctttgtttttaacaaaataggccacaataatattggtcctggtaataatactactacttactgagaagccaagctataataaaatagccacaactcttttacggatcataacagcaaaataatctctcactaatattggccacaataatattggtcatgataataatactactaactaagagccaagctatataatgaaatagccacaactctgttactgatctgatgatgattcagccagaagttctttggctggagaataaagtgcaacagcaccagactttatactcgagtatttcttgaacactgccttcagcttactttctgctgcacctgaatgaaagcccaccaacagctttgcacaatcactgttcaaataaacacaaaaacatcagatttaccattttgtattcagctaggtagttgaaggagaaaaaaaacaatgttcattttaattacatacatcagttgattttcagaatagccagtattatgctcaagagtttcagtccaagctggactcctcttaagtgtgcatcttgcagcataaacagctgaagcagcaatggttgaagcacaatgtgcaattacagcagagtagtgcataacaccaagttcagcaaagaaaaacaccatattctccaactgcatagtaaaaaaataatcaaataatttctttattaaacttaatccagaattctagatttattataacaaggttctacctcctcatcaacattaggaactgaggctttgatgtatctaacaagaaagacatagggtgtgggaactgtcaagtaccatcccaacttaaccaagattgccttctccatcactaaaatctgttctttcacataggcattgtcagaaatgcaaacaaagtcattaacctgcaaattttagagcccaatatcagtaatcagtatagggaaattaaacaagggggaaaagccacaattgaaccaacagttgttgacgatggtctgacctctggtgcccaaatttcttcatatttgcttgctagaagcattgagctgatgccaaccaactgcaactccctcctaggaacgaccttcattgaaaggaatctgtctacaatgtttatggtaaggtagagggtctcaggcatgagttcaaatttgtgatgaacttcaattagccaatcaattaggattgatctcatcttagcgtttatatctggctgtaaacccatgtagtcattcaccttggtttcatcctgtaaaagagagcattagtttataaatattaccacaggtgaaagaaaaatatgcagaataaaaaataaaattgataaggatggactaacctcagattgcttgtaatagttatacaattcatcaatgtattcaactacagccaactcattatcaccatcttttgcatcaatattcactatctcacctttaggcttgttattaattccacaagccgcctgtatttattaacataattcaaattttgagtatttatttattatataagagaaataacatttaaaaaagaagtaaaataccttgcttcgagcactgagggtggaggtaaaagtcttctttattggaatcccttccttgaatcgtctgaccggtttgacaatttcatctccattcttttgttcaacctttttagtggcaacattttcttcaacgatgatgggtttctgtaaattaaaaatttcccaacattttattcaaaaaatcagaatttttttacgctaacagatgttttagacaagaatttttgcagaaaagacatatctaccttgttcttcttctctacttggtttttcccctctggagctctatctttgactaagttaccaatatctttaagaactttcctgtttcttccttcaagaggtacaatcttctgcttaattccctctagaaaaacattaaaaatcaaattagagaactcattacgaaaaattaagcagaaatcaaagaaatagattttagaacatgaaaaccccaattaataaagagagcagtagctttggtgtacctctttgaagttgttggtgaggcacaacaagagtagctttggtagccatatccgaatcttgatcttgaacgctgcttccgaaaactccgccgatgcttgaaaacaacgaagataggaacacctggagacgactgctgcctcctcctcctcctccttgtacgtcggtgttttcgatcgccaccttcggcccttggattatctcactcaacaacacactccctcccaaatccttcttcttcttcttcttcacttatattttctcttactgtatttttcttcttcttcttgttcgatttctttggcggaatttgaattggaattttgcgaaatgtttgatttataagaagaagccgttggtgttggctttaccttgctgttgaagctgcccgaaacgatgcatctcccaacggtcgaatttttattgaattatggccgttgatgatgtttaatctaacggctttaaccctccttaggtgatttccttctttgggattttctagccgttgggtactggcttccgggacgagtcaaagcgctcccatccgtttataattgggccatgcaaccaattttctcttaaggcccaaacttgtttgttaggagatttaaaagaaccaattaaaaaaaattaggagtttttttttggtaaatatgaaaaaatgtagtaga

SEQ ID NO: 14659 - DNA, 15115 bp, Cannabis sativa
  modified_base (2046)..(2047): a, c, t, g, unknown or other
gctgcaaagagccacttttggaaagaactctcactaccaacaccaaaccagcagcagtccttgcaacaagacccacaccataacgcccctgagtaataaacattgcaccatcaacattaactttaacataagggagatcaggagcagtccaatggtcaacactttggacatgcaggccatcaacaggtacatcaataccattatgttgttgagcattaaaccagtctacataattcagtttagccaatgtcaccacatcactaggaactggttgcttggagttccaaaccaggtcattacggtgagtccaaattgaccaacaagtcatagcagcctcaatgatttcggctgtgccccaactagccaatccaagctccaaccaactaaagaaaagcatcgcaccaggtgcaaccgttggaaccttgattatgttccagcaactttgagcaaaaggacatctcaccaatatatgcagggttgtctcaggaacaacaagatataagggacacgttgaatcaattggtacatgtctagacgaaagctggaaacgcgttgggagactgttagaggacgccctccacaaaaaatttaacaccttgggaggaagcttaagctgccataactgacgccaaaaaccagagttatcaggtaaactactactggttttcaatgattgtagcatagcataagcactctttatagtgaacagacctgactcatccttcaaccaataccacatattacttgtcgatgacgaagagagaggaatcttccaaactagcgatagatccctaacattgagcacatctgtaacaacttcctcatcccattcaaccaagcctactttcatcaaagaatcaactgtcttccccacaaggcatggatgcaaagattcaataaaaggattcacatcatcaggttgccaaggctcagccaatatagagacgttagaaccatcacccacaattcgccgtacccccgaccaaactaactccttagcctcaaaaacacttctccaaatgtaacttggataactacccaaagatgcagtcaggaaagaccctgtagagaaatatctggctttaaacactctgcccatcaagctatccccacatgtcaaaagtcaccacccttgcttagctaaaagagctaaattgaagtctctcaaatcacgaaaccccattcccccatggttcttgtgattcttgagtttgtcccaacttaaccaatgaattcctttatctttggtcgatctccaccaaaatttactaatggcaccctcaatgtcttgacaaatgccaaccgggataagaaacacattcattgtgtaagccgggagagcttgcacaactgatttaataagaattccctttccatcacgagatagaaatttattgtcccaagactgaattcgtttctgcaccttatctttcaagtagccaaatatcacatttttatttcttcccatattactcggcagccccaagtacttgttgtgctcagattcttcagtgatacccaatctattgcatatagtaggtcgcatggtggctgaagtattagtactgaagaagacagatgacttaccaaaattcacatgttgccccgtagcagtagcgaatgaatcaagcaactgttgaacccgattaacctcctcatgtgtcaccttacaatacttttttaatatttatccatataaatttatatatttcttgtgaaactctttatcatttttctttaattgagtagtatgtattttcacggtgctcatttattcaattataaattctctaaactagccacattatttcattaacacactcctatgtgacgtttggtttgaggtaataaaatggaatagaaagaaagaaaaaaacaaaatcgattccattcatttgtttggttgcatattaaagtgttggaatgttattctaatgaaatggcttttccaccatttttgtgaatgacaattatattttaaaatagaaagaaagatcattcaaatgcataatgaaaaaaaatttaataatttttttatcaattttnntttttttttatatatatacattttaaaatttattctattccattcctattctcattctcattctcattcttatgttttcattcttcccaaccaaacaccaccttagagttaagatttatgtggtgtttggtggtaaaagttctatttggtgagttttagttaataaaatttcaaattcaaatatttaaaaagtttaagattattttatatcctgaatttagtagtttgtttgtgtgtagttttatgacttgttttgtatcatttatgccactatatatttatgtgtccaatgtaacttgtttggtactataaatggtagtttgcgatgtataatttttgttttgaattttttctaagaatgatgtgagttagtagtgatatctgttgctctccacatagatcaaaaataagtttttttttttccttagtattttggactatttttcaacatttaaataaagatttctcattttaatttaatattactattaagaagcatgttaaataattttgggtaaatagcggcaacctaaagttttaagtttgtaagcggcataaactcaatatttatttttagcggcataagtacccaatgtttgtaaatctgtaattttcctccagttttgtcagtacagattccgttttgaatttattaaagaaacattttgaagtaactaatactacatgtttctgtctagacctaatgatcaagaatctagaccttatatgtggcctgtttaagaaaataacagggtttgtactgacaaaattagagaaaaattacagttttacaaatattgggtacttatgccgctaaaaataaatattgagattatgccatttacaaacttaaaactttaggtacttatgtcgctatttacccattaattttatatgtttcttatataggtgagttctatttaacttacttcgctaagatacaagaacttgaagatatatgttttattataattttctttctttaatttttttttctttatttacttaatttcatactaatttatttttttttactaattttaataaataagtttttgataaaaatctataaataaatctgtactagttatttcatttaaattattattaaaaataaaatatattaacaaaattaaaattttaaaaaataataataataaaaaaatctcatctggatgaaattatttatctcaccttgctagataggatgaataatctcagacatatgaaatttactcaattagttatcaaaatttccagcatacccaaacacttgacatgataaattggtatatctaatccagtcaaatcctgtatactaaatggatcctatatttcttcgtacattttctttctattcaacttttcccccaaccccaaattacaaaccttttagctgctagcctatatttgttcgacatccataaaatctttagtcaatattccaaataatacaatcccatagtgataacaaaactcattaaaatggattttagtttcacatgcacctttcactcgaaaaataaatattttttaatttttattataacttcttacataatgtctgtatcaatcttttagttataggttggagttcgggtgggtaagaagatgcaaggcatggtagctttgatatgttgagctatttggtgagctcgaaataaatttgtttggaacaagaagatttcaagtgtgaataatgtgattactttagcaaattgtatcttgaacaatgaaagaatgtcaaagtaagccaatataaatgtttatgttgcattgtttgttgcgactcatcagtttggcatttgcttagtagcttgtgatcacgtgagcaatcttgttgaagctcataccatttgttgtgaagtggatgtgggtgaaacctaagttggctgaaattatgggcattagggaggctctcaattggactaaggataacaaatggccaccgatagtgtaggaaacatttgttcagtggtagctgagactatttgcagacacttgatgataactctccgtttggattagttgttaataacacttgtttagttgtttgagtgaagttttttttagtttgcttatcgttctgccaataaagttactcatacttttgctacaacttcttgtagatcgaattttcaatgagaaatctgttcctactaaatttatatttattcttttagacaattcgtcctaacgaaattatactttcatttagaaaaaaaaatcaacattcttacataatttatttaaatattttttaaaaatatgtctacatgattacagtgtgctatgaggttaaatcaattaaacgacatgattacattttctttggcgtgctctctcggacactttagctatgaaatcccatctggtctccaaacatgtaccagtcgatttggtatgtccaatgtgtaaccaagaggaggaaattatttttcaccttttagtttcttgttcttttgctcaaacttgctagaaccgatcttcgattagttcagtaagttattcgtttggggattttcgaagctggtttggcaacttgctactagttgctattgttgagattcatgaggaagtagccatggtttgctgagctgtttagaatgcgcggaatgctataatttcaagaggaaagagctcctctgcatttgaattagtgatgtcgactagagtaaatcttaatcaatggaaatctgctcaatcaaagaagaatggtccttgttagttctgttgacagagaatgaggggctggagccatagtctaaaccgcatattaataagattcaggtcaatgttgatggcactatttttacttcagaggactagtatggtgctggtagggtggcctgagactaccatggtcattttatggaggctttctctgttagtaagttggggtgtattgaggcttctatggttgagatctttagcattagagactttaagttggattaaaaggaagtaatgggttagggttcaacttaaaactgattgtctagtcgttatatgctttctctttttggtttattagttcatgaatgtaaactgatcccaaattttttaagattcattttgttaaacgttctgcaaataatgctgcttacactatcactcgtagctcttgtttttacctatttaaaaaaaaatacttaaacgactattattttaataaattactattaataaaatttcattatttattaaaaaaaataaaatatataataagcatactactcatatgttccaatgggcgtgaatgataatagtaatacaacattaaatgacaaaaatacccctaatcaattcaaattaaacctctacacttcaaaccctcccccgtaattttacacccaaaaaaaaaaaaaaactaaaaacaggtttcgaaaatcaaaaatcgaaaatccaaaatcaaatcaaagctctcaactcagcttcgaacaccaaactctctctctcttcttctccgttcaaatttgtgattttttctagagagagagagaaatctcagtagaatttgtgattcaaatcctcaaatttcactctatttgcaaaaaagcccctttttttagggtctgaatccccaatttggggaaatcgccgccgtatctcggccgttgccgccgttaccgttaaccatgatcgttagaacttacggccgtcgaaatcgaggcatttccagaacctattcagacggattaaacgacgccgttaacgacgaagaaggagaagaagaccctttcagttttagggattctttgtctcaatctcaagaaggagaagaaaacccttctcttcttcgttctcaatctcaggaagatcatctctttagtggtgttggtagtggtagtatacccttttcttcgcaggattcttggtctgcttctgctttcgatttcgatttcgattcgtctcagggtaatggaaaacctaagagggttagggttgagaagaaggaattaattgaggagactcaggagaagagttttcggccttgtattccggcggcgacttcgactttgatggaggctcaggagtttggggagatgatggaacatgttgatgaggttaattttgctcttgatgggcttaggaagaatcaacctgtgaggattaggagggcgagtttgatgtctttgttgtctatttgtggtacggcttatcagagaaggcttctgagaactcaagggtatgtttttgtttttttgtttttgatttggggtttttgaatttgaaacaagatcttgggggttttggatatttgaatttgaatttgattgttttagatggaaagggttgttgaagacttttcattttgttgattgtgagatgaatttatgaccttggagagaaagttagagagttttttttatttgggtttttgaatttgaaacaagatcttttggggttttggagattatagcaaagtgaatttgaattcgttcttgatttgttttgaaatttgaatgtggggggtttttgtttaagatggaaatggttgttgaacttgaagatttttcattttgttgattatcagttgaatttatgagtttagaatctttatttagaactagaaatataaccttagaaagaaaattagagattttgtattgatttgattcaaggtcaacctttactattcttattttataaagaatctttgttattagtgcattgctctctactggtaattggttattgaatcaagctgatatgactctgtaattaaattgcggactttgagctttctatttgtgaatttgtttatatttataaaagtgctgtttttcaggatggcgaagacgattgttgatgccgttttgggccttaaccttgatgattcagcaagcaatttagctgctgcttgtctactttatgtcttgacaagtgatgtaagttgcattttgagtttgcaactaatttattctagtcaatgttattacttttttttcttaataactcgagtcgtcttgatgggttgtctactactctctgtcagggtcaagatgagcaccttttggaatcacccagttgcattagatttctaattaggttgttgaaaccaatagtgtctactgctactgaagaaaaacttccaaaaattggtagtaagcttctagcattacgcaccgacattttgcaaaacaccaagaaaaaattagactccagttctgctgcacttttttccaaagttcgtgaaattcttgtgagttgcaaggagataaaatcgagtgatagtgataaggatgatagtagcatggaaaagccagacttatgtccaaaatggatagctttgctgaccatggagaagtcatgtttatctaccatatctcttgaaggtttgtgttctttgttaatgccatggatttaagctctgttgtatatcactgaattctatattgttagcattagtcatgctttttatttgccactagattttccgtcatctgttgctgatgttcttttatttgccttgaatgtggcaaatcagaaaccactgggacagtaaggaaaactgggggcaactttaaggaaaaaatgcgagagcttggaggacttgatgctgtctttgaggttgccatgacttgtcattccgatatggaggtgtgaacttgtatgttagtttgatctcactattttatatattaaaaagaaagggtcaagttaattccctttaactataaataacaaatacttttattaaagaaagggtgattagtttagagttcataatgctctaagttgtgaagagcagaaataatcataataggtgattagatttgtaaattgtattcttggttgactaattttgttttgtgatatggcactaatcattattgattaagacatctaatattggtgattaattttgtaaaattcattcacataattttagggttctagttgaagttttcattgtagccaacctcggtctgcatacctcaaaaactttttgaattcttgtaatttgttagttgttcgttcattcaattttatttttagagaaaataagaaacaaaacctttgttgattgaaaattgaattgcaataaaagttgtattcattctgtatctatgaagtattctgctgcatcatttgtgttctttaaatatacaaatttttatgcagagttggatggaagatggcttaccatctactcaggatgtaaaacatgaaatagatatgcaaagcttatccttgcttttgaaatgcttgaagatcatggagaatgcaacattcttaagcagtgaaaatcaggtactctcttctgcttgattagactttggctttctctgcataacgaaagtgaaaatgaatattcatatttctgctattgtaacagcaccatttacttaggatgaaacgcaacataccttcatcagggagccccctatcgtttacacagcttgttatgagtgtcattaagattctatcaggtagctaagaatgcacaaagcggtacttattttttatcaatgtctgatttgtactcataaagctaagaatgctaacctttgcattaattcccagatctttatttactcaaaacttctgctgtggcttcaactaaagaaaagtttgcttcaattaccggctctaaaggtaatatttgatgaatatgaagtgctctggattattcattatagtcagcaatatcaatagaaaagcaaaatataagactttttaagttgatttgctgatgcttcaattttcaggggatgacgatgtggatttattttttgatcccattaaaagcagcccagagaagattttctctgacaaaagcttcaatataagtcggggtaatcaatttttgtcctcttcacggttggattgttctaattctgaaactacgagcacctcaatgaatgattcctgttcagtaaggacaagacttaaatcttcttcatccagctcatgcagtggaacatctaggagtttacttggtatgcataaacttaagaatggttctagaaaaaatcttggtatcgtccaaggattgtataataatgaagatataaaatctgaacttttggaggaggaccaagatccttttgcatttgacgaagacgactttggaccatctaagtgggaagcactatatggaaagccaactacatctcgtactaaaaaaagtggggaactgagcagagaaagagaacttgttgaggattgtgtggctcaaataataatgagtcaacaggaatcaattaatcgagaagctaatcattcgcaagaagcttcctgctcttctgctatcagtgaagagtccattctcttagcggactgtcttcttactgctgtgaaagtaagtccattcttactcctgtggtactccttggtagttgggatatccttatatgtagcctcattttctttttgagctattttttttattatagtttgctttaccatgggataagacttatgtggcttcttcacaggttctaatgaacttgacaaatgacaatcctgttggctgtcagcaaattgctgcctgtggaggactcgagataatgtgctccttgattgctggccacttcccttcatttagctcgtcttcatctctttccaaggagataaaaacgaatggttcacctgttgatgttgataatcgtttaagtgatcaagaactagattttcttgttgctattttgggccttctcgtgaacttggtagagaaggacggtcaaaacaggttattcttctaatcattttttgaggtttttttaaatgccatattgtttctaatgaacattgtttggtttaaaaaagttagattctcacaacttttgtgtgtaaattaaaattaaaatgttttctgccaattgaagctttcgattatatttttttccacagatcacggcttgcatcagccagtgtacaattgcataaatcagaaggttttaaagagctgactagcaaggatgtaattcctctactctgctccatctttttggccaaccaaggagcaggcgaggtggcccaggaagagaaatgtttgcaagaggtaagtaacatatttttgccgaatatagaaacgttaaaatgtactggggtgcctcggttcaaaaagacttgagcagaatgcatttccttattcgggtattcacatgttcttgcatttcttacagaatgacgaggttgaagcagcactggtgcaaggagaaaaagaagccgaaaaaatgatagttgaagcttatgcagcattgcttctagcattcctatctacagaaaggtttgtctcgtctcggtctttttcccctttccccttattcagctcttttaaacatattctcaatgcaaagtttgtttggtatctaatacagtaagagcatacgggactctatagccgactgtctcccggaccacaacttgtcgattgttgtccctgttctcgacagatttgtggtaagagtttgttttaattttgtggcaatcaaacagtcataaatggcacattagattgaatatcttttttcctgtttgtgtgaatattaggcattccatttgtcattaaacatgatatccccggagactcataaagcagtgagcgaagtaatcgaatcgtgtaggataccctgagaaaacttctagagattctgtacagactcttacccttcatattcccgaatacaactctttcgttgttacgagaaacgaccaccagagatttgggtctgttgcatcataattcgtataagatttgaccaatcctgtgttaattacagtctagttgacatgtgttccctcttcttcttcttctctttataatttttgtatctttttctatttcattcttttgtagggtcttttttttgggggggtttctcaccaatttgatgaggaaagagatattattgtatacaaaaatgatagcataaaaaaaagccaatgcaaaatgtaatttgtgtttgtattaacccttttttcttttcatgagtaaaatatattgaatgaaaggggaagacaggtggttttgaagctgagcattgttggttaaacccgaaaagaaaacctttcgattcggggacggggatgaatgagggttttttggtttctttcaatcttaatgtgcaacaatgaaagatttgattattagggttttttacattggtcggaaatagtaatgaggaaatgggagttaatgttgaagtgaaagtagttgaaaaaatttaaccataaataattacaatccaaatttgaatgtttagtagttggtattaagggtttttttcattggcactaattaggaaatgggagttaatattgaagaaatagtagaaagtagttgaggaaaaattaaccataaataattacaatccaaggttgaaagttagggaggtggtatttagtaggtaggcaagggcatttatttgttgttgttactattattatttattgttgcataaagttgagtcatctcttatgtcacacacatcttgtgtaactttttattataaaatgtgttcattacaacataaaatagaaattgagacataataaaattctaagtctattagatttgaacatggtcttttaggaaggtgatgaggaattggttcactttgtttgggaattgctcttgcatgaaatgagttccatcttccaaaaacttaatctccaaaccaccaacataataatccttcaatttctcactcttcacatgctcctctattcccggaaacttaagaaaatagtcttttcctcccattatcaacattcctggaacttcgattcttggattacttattttgaattcgtgtcgttccctttgcaatgcaaataagaatagtttgattaagacaaaaagatatagaaaaatttagtgatatctagaatgatcgaatataaataataagcttacttgtaaggaatttgcattggagaatcaaatccagaattttgatataacgtagtataaatttcgagatcatcttgggttagccaaggaggaagaggtgtgttagttaagtccaccaaatccataatctctttatccttacttgctataggaatttcaggtctagagaagagaatatatattttgcttaaaattgttttcacatcaaaacgaacaaaatcagcttcaactcttccaggttcctgtaatcatatatcaaaattcaaaactcttactatgtcaaattcaagtataaaaaaagtgtgaacaaataagatttgaaccatcaatgtcgagtgtgtctggaaagttattttgtaaacaattatcaaaaagatattatactaatacgaagtgattataaaaaagcgaggctatttttgctaaccttccaccgggacaagtagaaaccttccgaaaaattcttgtagcgttgaggattaggaagaaggaaaggtacaccgagtgatatgactccggcaacccttgttggatgagttagacaaaatagataggcaacccatgatccaaagtcctttcctactaaaacaacctgtttaaccaatgataataaccaataaaaataataagaagaaatacaatagaactagaagcaaacattgatccatattccatacttagtaaataatgggggatcaaattataatgcttttataagttgtagtctttataaatttatgttcttttatttctatactcttatgtattttaaaactaagttaataagatgtaaaaacatatggaaaaagtgaattttgttttgtgaaagtacattttgtggtctccataactattggaccaagactttattaatctaacacttagaagcctaaatgaattaaaccgagtttaaagtacattttaccaccctaacggcgaattcaaaatttaaagtgagaggaacataatttattttaagataggaacaaaagtaaatttgaaaagaagaaaaaagtgttcttagtgagatttgaaccattacaccaaagctaatattatatttataaatatatatcgtaactaactaaaatacatatacatttttttctcgattttttagagggtgactttcctcctcgctttctagtgggtccgcccctgcaccaccccaatcaaaatacaaaaaacaaaaataatgttgaaaaattcaaatttaataaaacaagatcctacactaacactcacacacatgtatatataaatatatacatatatataatattcatataaatagtagctttaattaccttatcaaagttgaaaaactcaagaattgaaagtatgtcatctacaaattgatagaaagatgggtttgaatttgagtttgatttagaagttgatgataggccatagccactcaaatctaatgcaattgaatggtaaccaaattgagcaagtgcaaccatttggtgcctccatgagtaccatatttctggaaatccatggatgaatatcaccactttactacaccctatcacaacacaaaacaaatacacataattaaatcacatatatatttatatatattatataaagaaaaaaagaagaagatgatttttgttaaaattaaataattttttcataataccatttccaatctcagctatgtgaagctttgctcctccttttgcatctatgtacttgtgttcaatctcatccatctttgaacaaagaaagagaaaaatagagagagagagagagttgactaatctataatatatatatatatatataaatatttaaattaattttgattttttttttatctttaattttgatatattactagatttaaaaaagttatttgggatttatttaaaaaatattttatattaaaattaaaggtacaaaaatgcacttgaaatatttcttcactaaaggtattaaaatagatatttgatattaaagttaagaaaatgtatttatttattctatttttgtttaattagaagatatgtttaggttctctttttagatctataatataggtgtactttaaattcttgatatcttattatatttaaaaatatatttgggattttattaaaataaatgtttgatataaaagataaaggtatttatttattcttttcttttaagaagaaatgtttaagttcccttttgtgtcataggactatggattttttttttttttaaaaaaaaaagtggaaagcattttaatgtttatatcctattaaaaatatatttgggatttatactatatataaattaagaaaatgaaagttaattctaaggacaatctaaaaatgaaataatatgatatttttccataataagatttagttagtatgattctattttactctataaaacatctattggtatttagatgaggttttatgtatagagtaataatgaacctaaattcaaattgcaagttatttttaaatactaagatgtgtcattattatcaaccatgtaatatttttaagtgataatctaacattttaatttgaataaatataaataatttgaaaatgtgtctatataaaaatgaggctttaaaaatggtcatgattttctcaagaaattacaaggttttttttggctttgaactaattgtctcaacctttttctcattcttttattttaatttattattattattattattatttttgaaaaaaaaaaaaagagaaaagtatcatattgcaaaaagctcttttgcaaaagtaaacaaaataaaaattgttctttgactaaagcaaaaactatggaataatactcattatcaaataaaccaaagaaaattacaaatatgagctcaaagactttcataattatatttcatttttattcctcatttctattggttacttttgattgtactaataaggtttttgtttttgaaatatacacaaattaaacactttttttacatgtatatatatattgtggtgtgatatattatagtcattatacttaagaagtcatctcacacattttctcaaaaaaattaagaataatttataatgttaagaaaaagatgaaacattgctatgaaacattaaggtgttcgtgcaactgagtattcgatcccaatactttgtttataattaaggggtaagttgaaaaatgcatcttttattcatcaattaattaaatttacctctaattttata

SEQ ID NO: 14660 - DNA, 4396 bp, Cannabis sativa
  modified_base (1283)..(1287): a, c, t, g, unknown or other
ttataattaaaacttgatatgaatgggttagaatttaataggccgatctcattgggttggcccactaaaataacatcaacccggccaacccaacccatgcacagtcctaggttttataatgtaatgggattacaatatattatgtaatggtcattaaattgtaaagtcaccacaaaactttaaaagttaaaacaaacaatgtaatagtaataatgattctattacaatccttattccatcataccaaacatattcttagtataaattaatttaaaaaatcgctaactattcttaacgtgatatattagtatgatattggacactataatgtccctaatagcattcctcaattggttagtagtttttattaaatttattaaagtaaaataattattaaagtagaataaatgaaattcaatataaaattacattaataaggatattatatctcacagataaatagttatgttacattatctttatttactttcattatctttgaatgtgataataatgaaagaaagtagtgatgttacattcccactttctcaacgtttctttctagttccaaatagaatatcctcctcatcaatgatcatcactagtggacggtgccattaacaaaagagaaatggtaaaagtacctatcacttggtgtttatcacctttgtgatatataatattcttagtgtttgtttggtacgtcgtattgtattgtattatactaaattgtattagtattagtattatttaatacaatactatgtttggtattgactgcttgtattaatagattgtgtaaagttacaatatatattcaatacactcgaccccaacatcaattacgggtccgggtccgcgtctgagtcccgggtctgggttcgagtccgggtccgggtccaagtctgggttcgggtctgggatccgagtctaggtccgcgtctgggttcggatcccggggctgggtccgcatcccggtctgggtccgcgtcccgggtctagttccgagtctgagtccaggtccaagttcagggttcaggtttggggttcgggttcgggggctgggtttggggttcgagtctagatttaaggtccacgtccgggtttggagtcttagtcctgggtctgggttcgggtcccgggtcctgggtcctaggtctcggtcctggatctcgggtctcggtctgggtcccaagtccgggtcgaagattggtgttgaccccgaatctcttgcaaatattataacagaagctaatacggactatttgttatgtattaaatannnnnacatacattgtattaaaaattttagttgtaataattaatacaatacattgttttatcaaaacataatattatttattatttaatacaatacgacacttatacggtataccaaactaaccttatttgtataatttcatatggagtatcagatatattaatttaataaaaattataaaaattcactcactaattataagtgactacaatactatcctccacttggacggcacagttagtattatagttttttattgaaatttgaaataaaataaaacaaagtgagcacgttgtccatgtgcatgctcttactaaaattttcaagtaaaaataaaagtcaaaggttgactcactgtggagacctttttgttaattggccctaatcagttttttcctaataaagttccaatttttatgttcttttagtcagttaacacttctaaaaaaaatgatatttactcttggagattgttcaggctcttagatcagatccaatctatgtcatcaacaacaacaatggacctttctttgttcactcccacaacccaaattccaaaccatcaactacccattttttctaaaccaattttgagtcccaaaatcaccttttcagttcccagaaagataaagcttttaacagttacaacaacagcaatgaaaaagccactcatcgaaggtgtaagccatgagcttaattcaattgcttctcaaaatcttgaccaagcccctgctcgtagaagggttcgattagctttcactcaagttcaacaacagcttgatcattgcttattcaaggttgtttttttattaatgatttgtttttattttcttttatgattgatgattttgatttttgttgttttgttttgactattggactgttattgattggtggatagttggctccttctgggattagaacagaagaggtaagcatcaaatatcatttgtgtttgacaattttgtttattttggcatgtttttctttttgttcttgttttaagaaaatacccaacttttattttgctcataaaaaaaacacccatgaataaagtttggacctttttgttattttattgtagtggtatgagagaaattcaaagggactggaaatcttttgtaagaaatggataccagaagaaagtgttgcaataaaaggtgctttgttcttttgccatggctatggtgatacttgcactttcttctttgaaggtttgttattattactcctttttatgtaatctttcattattcttctttcagtgtaatcatgaggaattaaaaaagggaaattgaatctttatgtaaatacattctattaaccagttttttagaaattcattttctattgaatgtcgttataagtgcatttaaaatgcattttttttttccaatcttttaaatccacataccattaggaagattgaaacaatagtatacgagtttttaactcaattttttactgcattatgtatatataagcagttttctttcacttgtataactatttgatttagttcatctgttcgaataatgatgttccaagctgtgctctgtgttcagattgttatatggtcttgttgcaggaattatcaaagaatttcccacaattatgtttccttttcttctacttagcaatattgtgattgttcaatccatttttgcatattctgtatttaggtattgccaggcacattgctgcagctggatatgctgtatatgctatggaccatccaggctttggtctctctgaagggttacacggctacattcatagcttcgacgaattagccgataatgtcaccgatatctacagaaagattaaacgtgagactttcataatttcaatcatgtattgcctatcaatattcaaaaaaacaaagctcttgttgattatctttcattgttgaaatttggcagaaagacctgaattgaaaggtttaccccattttatattgggacaatccatggggggagctgttactcttaaagttcatctcaaggtaccaaatgaatgggatggagtaattcttgtggcccctatgtgtaaagtaagctatcataattaactgtccctcataatatttgttctttttaatgatttcttcaactaaaaagttctgatcttgggttgttgtaagattgcagaagacatgaaacctccactacctattttgaagattctaacacttatgtcaagagttatgccaaaagcaaagcttattccagcaaaggatttagctgagcttgcctttcgggatgagaggaaaagggaaatggtttgtctttcgtttcgtgttcatttcatattctttgcttaattgtagttattgacagtgtagacttaaggttgtgttcggtttgagtttattaaatggaaaagaatcaattttgattccattcctgtagttttattccttccaaccgaacgtagcctgagttcacctaaaagactcgctagaactacctgaattgctgttttgagcttttttttttttcgagtcttctaactcaaattgtttaaacctcctatttaggccgtctacaatgtgatatgttacagcgaccgaacaagactaagaacagcagtggaattacttgacgctactagtgaaatcgaaagacgtcttgaagaggtgagctttttcatttcattttgttagccttaattaattcatgagaatcaaacgatagaatcaaaaattaacagaagcgcaccggagtctataaaatcaactttaaaatggtatgatctttcaactttgcagtgaattttttttctagaatcttagtctcttgatgatgaggattcaagaatgaaaagatacgacactataaactggggaccattacctatgattaactgccaaaatagttagtaaattattttattgaactatttttatttggtccctcatcaaataaaaaattgtccttatagtatccacatattaaaaccatgacaatgatgtctttaagtcataaattttattctaaaatagaccacataactttgacttatttatataatgacccaacacacattttatatatacaattatagcactaaataaataaattcccaactaatacttcataacattttcgcatc

SEQ ID NO: 14661 - DNA, 3973 bp, Cannabis sativa
  modified_base (27)..(53): a, c, t, g, unknown or other
tgtatgtattgccctgaccaaaaattnnnnnnnnnnnnnnnnnnnnnnnnnnngaataacactcttgagattgagtgcaggtgcaaagtagagtcaagtggctagagttgcagctgactttgaatagcatccaaatcaagtttagtcttagcaacaacattttgtagatcagaataaccatctttgtttgtctccttcaacctgaccttaaactgcttcactttagtcataacctgaaacattttgctgccttcaatttctaggttccatacttccttcaaaacacaatcatactttgggtgagatttccacatcttaaaatatttgaaaggctttttaccacttaccaagccaggatgtagggttaagataccaggagaatggtcaaatcaaccctaattcagaaatacaacttcagcaaactcaaacttattaatccaagtttgttggctaaaattttttcaatttaggagaaattctatcttcaccgggttccttgtttgtccaagtgaaaaaattttcacttgctttgaagtcttctagctggcaaaagttaacacaatttaagatgtcaaaatcaggataggttttaccctatgcccaatcctctcgtctttggctaagatgtgattaaagtcccccataagacgccaattctcaacagtattcaagtcacataaatccttccataaaagccttctttcccctcgattatttgaagcatacaccagagtaagtaaactgttaaagccttcaactgtagaaatcctcaaatgcattaattgacttgtgcatttgatgatatcaacagtgaatatataagggttctaggcaataacaatcttccctcctgcatgccaagctatattggaagagaaacaccaaccttcaaataaattagagtacaaggttccaagttttggagcctttaccctagtctcgagaagcccaacaaagtcaaccttttgaatattaataaattgctttattaattgttgtttgggctggctattggctcctcgaacattcgaacatagcaatttattcattagaaagagagggctcccccccctctcctgtattaaactcattctccattgaagtctcacctataacattagttagatcctccaaattcaaggcttggaaagagttcttcaccactgtagtagctgtgacaacaacaatttttcctttcccatctatcttcttggcattagagacctttgtaaatccatcctcatcgatctgtattggcttcctattgtcttgtttgacaacccattgttgttttacactagcagttttcttacagtctgtagtagtatgtccaactccagaacaatgggtaaaagtgactggtttccactcatagttaatcccaactgttgtattcgagccaaattcattctcaaattcaagcaagtcaggcaatctttgacacattaggacctctaccaataccctagggtaacccaatctctccctctccttgctgacagaatccaccattaatggtttccctaattgcccaataattttatagagagacatttggccccaatattttagttctaaatcctctagttgaacccaaataggcacacacttcacatcatccttcttgaaacttacatttgggtcccaaggcttcattatgacaggcctcctattgaagaaaatatagcccctatcaaaatctgatccctgtattccattgaattgaaacggatgataaaaataccataagacagcatcttcactcgatcaactttttctttccaaatcctattaacaaatccttcgagtatgtgtaatggaggtttcactcctaaaacatatcatacaatcgacagtttccaaaacgaatctcctcctcaatattatttaaggtgatcttcaccttcctgctaccttgctcagagtttcttaatgaattatccaaattacgaacaacagaggtcgatcgcaaaattggaggaatcgaagccttaccttgtttaagttcactgttatattggtcattcactttgaggaattgaacaaaatcattccgagcatcatcttatttctgaattgcttctagtgaggatttaggggataaaggaggttgaaagacatccctaagagcaggatcgtcttccttcagaacttcctcatctgataaatccaagggattaatctctgtaaattgctccaacaagctagcttgattcacataagacaccaccttcccacctttctttttgaaatcttagcaacagacttagattttccatggattttcgacctcgttttagccatggcaccaactttgcacctgcaagggcaagaatctgagaaaatatcaattggtttattttcaactaataattttctcaccatttccctccaactatccaatgttgttacatgtatgttttatttattgtttatatacaaacttgttttataaaacctattattgtttgatctaaattgatatggttaacttgttgacagatccaatgatctgattttaaacatagtccaattgtcaataggtcaaataaataatttgtaataggtaaattttgtaatcttctttcatttgtatataaacctagtaacatgataggatccatccaaatcagtgtgtgcttgtgcctatatcttttctttgggcctagatgaatatagggagtccacttaattttgataattaaaatagactaggttgcaaaaataaaaatgtgacttatgatagtttctatttaggtcaaattagtactgggcttattcaatgaataacagttgtttaattaatgttaaattactctcttttgggcaatctgtgagagttagggggccattagtagtgggtacgacatactgaatccaactctccgtcacatgaataacctcaactttgaaggaccatttgccttacttgaataattgtaatatgttaattatactagtttaacctaatagaaatgattagcaacatcattaattttcaaaatatatgaaatttatttttcatcaaattattttgaaattaatttaagaaaaacacacttagtttactgaaatcaatttaagataaactatatgtatttttctatatgtaataaaataaagaagttataacaaattaaatttttctagatacttaattatttgaattttcttagaaaatatatttaagttgaaaattaatttttcaaattaaatttagatcaactttaattagaatatttttttgaaattaataattaagtagatttttctaggaaattagttattcagatattcttttgaaatatatttaagttgaaaatttgttaatttacaaattttagatcaaattaaattatgatatttttttaaaaaaaattaaggtgattagttcaagatacttaatttgttatttaatgaaattttttaaaactatttgagttgaaaatttagttattttagaacaacataaattagatattttcaagtatttattttattatatatttttgaaataattttcaaattatatttaatatatgtatagtttttccaaattaaacttgaaaattaaattaaagttgaaaattagttatttaataatttttggagcaagttaaattaagtaattttcattattaaaatatataaattaaaataaatgatgaactaaaaatacattatttaaataatgatctttaatcaaaaggatattcaatctttattgttcgttctacacagtttttgttttgatcagattcatccctaatagatgttcattcattcgcagtttaacaccgtagaatctggaaagataagtattattgtaattcttttacttttagtaatgatcaccccaatagtggctgctacgcgaagggcttacaaagtatgaaacaatagtagaagctcatgaaataggaatgaccttgactctcctctaaatgggacaacatcagattctcttttcgat

SEQ ID NO: 14662 - DNA, 10586 bp, Cannabis sativa
tataatttttttaaaattcaaaaaaaaaaaaaaaaaaaaaaaaaagctcaaggagacgctcttcaattttttttttcaatgacacgcattacactctaaacagagtgcgcgtgggaaaaaattactttcgaagagttcaacgactatatatgctgatcccgccacgtcgttccacctctattaactattaattaaatgtatatgtattttcttaataaattattcaaatgtatctttttacatcaaaaacaaaatttaataaataaataaattatttatctatcttcaaatcaaccattcaatcatttcaagtagagatcggttcatcacgaactcaatacagtctctttcctctctctctctcatcatcgccttctctcaaaaacccaactctcttctctctcttatctaataaatctttccctccgcgaatcggctaaggtgagttttgatagggttttcaatactttcaattttttgggttagttttgttcgggtcagccattaatgtgtttgtattttctggtcgggcttgagtcaattattgttggcgatttgatttgttcttcaagtatggagttttgggtatggttgaatataatactggaaatctctgattctttcttggtgagatgggaatgcgggattcttgggcatttaggggttttcgtccgctttgatctgagatgggtttatgtacttaggtacttttcttgctttagaggcattttcttttttctttttcccttttaattgggcggtggtggggttgtaagaattttgttctcaaacctgaagcttatttatagtcataactttctttttaaacctttgcataatcgtggcagttagagagatgagtctttttgctccttgtatagcatagtgaattagtaatataagaagatgtaagagttattttgttctttctgatgttttatggtcttaatttggggatgtgattaacccctaaaatggacttggaaagctggaatctattgtagttggatcctttttacctacagtatgatacttttaaaaccctttgttttgcatcatgtccttctaccttgttttagtataaccttatgcttggtcttctttctcgctttaaacatatgaagctttgccattgaaatatccatgttgttttcttcagttacatttttgcacaagatagtgtagagatgttaattttatatgtgattagctgttatatcttcttgtagaattagggagagacaatgccttctagtttgtcagagattgttttatcagtgtttatgctgtattctggaagacttatggttgagctgtttgaatgaattggagatacatacaagtcattcactcccacaaacagatagcttcatttccttattcagttccatttttcaaaattcaactgtgttctgcacggtttttcaatgagaactttctagtctgtataacaaattaatgcttcttgctctccagcagctcttatgtgttttcgaaagtttgattagttgtattacataatgttaaccatgtattgagtgctttaaaagaaaaaaataagtttatattcatttagccatttacttctcttacctgctatttgtttgatttgttttgtttttaattcatttttggtgaagcgcttattgaagcgggagtcttttcatggtttttgatttaaaatatccatttgtatttgcaactgatgacagctttgattttcttgcttttggacagaatagttgacatttgtggcccaaaattaaagattgccgaataattcataccaattcaccagcgggtgtttgcataaggattccgttgttcctttggttatggtaattatcttcttcttcttcttcttcttcttaaattggatatacaagccatgatgtacagttgttgcatgagtacaatatttttgcagttattgcctttgagatatgtttgcatattgtgaatagaggttgtgggttttgctatggaaaaagaattaaatatgttagtatatattgagcgtatatattacatatttaacagatgtattttgattttctttgagctagttgaacttttctaccacctactaattttttgttgtcttttttatcttcatcccatggtttctcaggctaccaatgagaatcttcccccaaatgtaattaagcaacttgctaaggaattgaaaaatcttgatgagtcccctcccgatggcattaaagttggggtgaatgatgatgatttttcaactatatttgctgatattgaaggcccaggtatgtagttatgtttaaaacttcaaccattctttaagaatttagagtattctgatatttaatactcttcaccttgcagctggaacaccttacgagaatggtgtttttcgaatgaagttggtgttatctcgtgactttccgcattctcctcccaaaggtatgcattaacatgacaggactagccagtatcaagaaaataggatgaaaactggctttagtcggaacatgaatattctttgtttgttactgtaatagttattagtatgaacgtaagcgattctgaataccatttgtttctatcatcttttaccagctgtaccttttcgtacttttctaaattgtaaataagaataatttacttatacattttattaacttgcttctttcaatctttttgtgtttcacaacactacctaggttactttctaacgaagattttccacccgaacattgcaaataatggtgagatttgtgtgaacacactgaagaaagattggaatccaagccttggattgcgacatgttcttatcgtgagtttttttttgacagatcatgcattcctgttcatttgaggagtgtctcagaaaatgcttgggatgttttattatctgtaatatcctgatacatgagctttttttataacaggtagttagatgtttgttgattgagccgtttccagaatcagccttgaatgagcaggctgggaagatgcttcttgaaaattatgacgagtatgccagacttgctaggtaagttagtttgctggcgtttttatccgccttataatatgttatagtgacatccggccttttgccttataatatctaaattcaatttgttctgggttcttctacgagtttaggacatccttgagaaacagtgatagaatgtccaagttcaatttgttctgggaccttgtatgagtttaggacaatcttgagaataagcttaaatgggctcaaactttgcaagtctggtttaataacataatttttcactcttaactcccaggctttatactggaattcatgctaagccaaaacccaagtttaaaacaggagctatttcggagtccacaactgcacttaacgttgaccaaacaaatgcaccaatgcttaatgcggaccagaaaactacaactgctaatgctgctttgccactgccattgccattgccattgccatctccactggccccttctacaactgcttccagaggaaatggtatggatcaggccgccaccattcttcccctatcagagacaggagtcggtgggtctactacagctgctgctcctgttattatccagaagaaagaaggtgcattgtccaaagcccaggccgaaaagaagaaaattgatgcaaggaagaaaagtttaaagagattataaagtgtttcatgagatgtgtttgtggcaatttgttgctcatttgaaggggcaaaaaaattgactgttgaaagagaggggaggagataaaaatgtatgatatgctgctgctgtaagggacgtttcttggggacaattatggatcaaagaatttaccaacttctttctcagtgtgctgaaacatttatttctttttgccccctaataagaaacttggaaagtcttttgtgctgaaatttgcctcttaatgtcttaattatgtggtagtttgagcaaaaaatgtagtcctagtttaggttatattaagtactctgaataaaaaaataagtcggatgagtattctcattaggttgctatttgagagagaaatgaatatgggaacaaaatttgaagtgagtacaaggaaaaaaggaaaatggaaaaaaacaaaaagagaggacaaaaagtggaaaagagcacctttttcaatgttaagtattaacgggcaaaagaaaaggtaagaactgaactttctaccttgaacaaatgataatcaggggcacatttttatcatttcaaatgctacgttgttaaaaagaaaaataataataaatacattttttggactttggtgagttataattacattcgcatttttaaaaacaaaaaaataaatctacattagaatttagaaagaatataatggatataatatttatatattcataatatatttgaaaaaaaaaaaggttagcataaaagctctcgggtaaggtaagtaagaaagaccgaggagatcgacccagcaaaaagaaaatattaacaaaactctgttaagggaagttccaaatacaagtcctgaccgttaccaaccacaatccccctttcccccaaaaaagaaaataattaaataaaaaaggaaatttaagaagaaaagtcacttaacaagagacttccaaactagttcagctagttaatattagtgaaattaccacaatacttaaacagttacaatttttttttacgcaagaaaagaaagaggaaaaaatggaaaatatagaaaaagaggtcagaatggagctgagcttgttctgcgaagctggttctttggctctggggatggtgcacttggcaacatcttctctatctcctgaaaaaagaaagccaatttatgaaaaggggtagtttgaaaagacaaaaataattcatggatgaatttgtgacagcataaacaagcatgctcaaactccacactcagtattcctatctagtttcagattgtcagtatccaatgcaaggcaataatacatactatcattactcagacaaatgccatataatgaaagatctgttgctttatggagaaatagaagttttatgaacgctaataaactcgtgcattttctctcttgggtactgttcacaagaaacatcataaggatattttccaagtatattgaagaaactgtaaactatcaacttaagctaatacaatatgaatctactttctttttagtacaagtatagctgtgatatcacaaacctttcaggtatattttaagcctcaaaagttgcagatagtgatattgtttcagttcataaagcagtctaacgaaatcggcaagagtcttgtaatgaagatgtttaaaacagattttataaaatagtagagaacgtatgcatacaagaaagttagagatatctaattccacactataagcgtagaagaaaatacgaataataatagaaaaaactctggtaaacaaaagaataatggttttgattcaacggccaccagaataaaaccgtcacggagcagactctagttttgtgtagcaagatgtcacaagtttctcaatcaagaatacattgtgaagttttactatcaactgatggcaaatttaaaataacacaatctagaagacctacaagaagatctgaaagtggttaatcacttgatcatttcttttcataagatatttcaccatgcaagaagttgctaattgcacccatagaatcaactcagattttagattcatcatgttaaatttttaaagggcaacacagctcgtaccataattcacagaccaaggattaagtttttatatatttagatataaaaagagagagggggagagagacaactataataaaatcagtaaaaaaaaataattccatgcaaatgaaaatgatacaaacttcttatcctttaacatgaaccatatgaaacataaggaaatgataatgcagcacttacactacaatctttactcaacattaccaaatacttctatcgatatagtgagttgactgcaaattttacagcatataaagctaaataaaacctattttattatatattaacagcgcctatacttgttaatgttacatcaaaaggtcaatagaatattactattggacttaatatataggtgtgtactaacaatcagaaagtaattaggctaatgataattgtcacagcatataagtatggcccagtctcaccattaaaaataacagaatgttttctggagatctaacaggtaattagaaaggctaaatttgcaagccaaaagatctaacttagcaccatacatgccaaaaaagaaaagattttgttttttctgcctttcactaaaacttaaagagtaagatttgtgtggtttaggcgggttggtgagattattcaaattgagatgtgccaaacatgccaagggtacagtaaagcattttcagctcttacattagatctgtgctaccaaacagcaggacatcatgactgttacttacagtaagtacagccgtctatttctgctgatgtcccatttcagccatttattcctgtgagtctcacgggaatgggcattgttgattggtcaaacgcttcactagcatctgaccttgtcaacacggctcaaatcatcaactgccacaaactgattgtgatcagaatgttgtgatataaccaaatacttgataattaattttacaaaggaacactaatatttttccccttgtttcatcatcagcagccatgacatttgatatcaatgctcagttttcagaaatatctcaatacttccattcttgtccaacggtccaaggtagagatatactaaagtccagttcaacgaaccaaactatcaaaacggaaaagcaaacatgatagaaagaaattcagggagttaaagatgatattttgataattaactcctactgtttattccgtcttacactattcttcgcaaggcatcagtcatcattattctaggtgactacaggagacatttttcacaaagttatggcttccagctcaagagttagaaatgataaatttaaaggctacaactacaagagaagtagtaataacaaaaacaatggtttttcttgattattcttgtacgaaaaatcaatctgtctaatataataatatgtattagttttacctagagatcttcgtaagctaataaaaataaaattatctttgtttaattaataaatccagtaagaaactgcaaaacagccaaaattatgtaaggttcaccagaactacaaaaatcatggttacaaactcaagtaattattttatatgaagcagttctgaaacttaaatcccagatgcaatatcctcaaaatctcaaaacttagatggttctctggagaagtggggaaagggatgaaaatggtggtctaacgtagccagatgccacggtataaggaaaaataaataaaaaaaaggtctcagaagcatagcaaaatccttgctacttttattatgatcactaacaaatgtaatgttgttttgaaaacaattaatatcacgtccattgtatgccttacagggcataaatatcttccttcaacctatgcagacagcagtctgtagtcagtagaaagtttataaaatttcatctttatattctcagtccaaggatgcaaaagcattgatggccagcacttaagaaaatgaggagctattggcttcaaaatctctagtcatttatctactttccaatatcaagcatttcatagtagtggctatgtatatagtttttactttccaacggtgatagtttgtaattgaaaaatcagaagagcaactaaatttaaactaatttgcgaaattgatccccttattagtacatcttaatacttcactaaaacgaacaataataaaaccacataattccagcaaacaatagataaatcaatagtagaaaccaatgccttccacaatacttgaagtagtggcaccaagctcacttcttgttctttgcaaatgtttccgtttgtagccaagacatcaattttaataccaacatagcatgaaaagatggcaatgatgaagaccaaaaaacaaaacacgaaaacaaagtaaattcaaatgagaagcagcgcaaaccttctgtcgtctcagcttttcattctcttcttctagtcgagagaccttgttttcgagttcatgtgtatacgcctaaccagcaacatagaaggatggttgagcaaagagggaggaaatcaagatgaaactagcaaaatcactaatagaaatcaaagtctcacctgtctccttgctcgtgaccgggctgctgattccctgtttttaatcattctcttctgtcttctctctacagttttctcaaccacgtcttcaggagcaactctttttcgtccaggcgtctgggtatctgagagagcacccatcaaagaagatggggacattatcatttggttttcagagtatgctgcttccaacataggattcccactgtctggaagaggttgttgaaccgagtggccttgcataaaaacagccattgaatttagctgatgctggcgctgtgactgctggactggagggagttgatactgcatccattggatatgttgtgagatatcatgttgtgcaggagcaataggatcaactcctaaaacaggaccaacgcccttctgggatgaaggagttttggcaaccacaccagctttcaccaagaaatcctcaagggtcatctcgccaagagtgggatgtcgatcctgcgctttcctttcattgtcgacgctctttttctgttgaatatccttccaaacctcatcaacagtcttcttgctaagatcagtgaacaatgtaaggctcccttgccgaggcaaagatgatgcagaggcaccctgactggcctgagcgcttgaattatcaacacccattacagtggcctgattagcttctgcagaccacacactcttcagaagctcatcaaggttcatgctacctaatggttttcctaaatccccaagctggttctggacctcatcaagggttagattgtacaaggagccttgcctagtcaaagactgtaacttggggtcttggactgctccgccttgagaccccatcgtctgagttctcattcaccaaccaatcaaccctactatatcttattcataccagaaacaatctttcaaagacctgtaacggaaaataagaacactcaaactctcaatttgaactccatgtaactattaacctaaaattgtttaaaaggcgatatctaagactaacaaatagctcaatggaagaaaacaaaaaagtgtacttttcttctatttggttctagcttaaaaaatgcccagatcagtgtaagccaacccatcaaaaaatttaaaccaaaacaaaatgttgcaaataacgaacttagaaaacctacaaagcaaaaaaaaaaaactccgcaaacaatcacatgcatgtagaaaaaatgagcattttcccaaaaaccctcaaaaatttataaaacccagaaactaattttggagttagcaaacaaaagttgaaagaaaatcctcaaagcataagctcatacataaatatttatattttagcttggatagactgagagcaacgataaacaaaatgacccagatcaaaacaaaagcaaatcaaataaattctgcagcccccatactcaaaacgaagaaaaaaaaaataaaaagaaaagcactgagaaaagagaaaggagaaaagaaaaatgtgcaaatcactacatgcatgtacaagatatcgacattcaaacagaaacccaaatatgcccagaaaacgaattttaagagctgttgaaaaaacccaaaaattaacagcttaaacaaaaaccaacgatgaacaaaaataggcccagatcaaaatacagaaagaaaaaaacccagaaaaaaattaaatgaaagagaaaataaaattgttggaaaagaacaaacttaccgagactataaacagcataaagaaagagaaatcttgaaatgaatcgttacatgcatgaagaagaacaaacactgtccagaaactggaaaatgtccaaaacgatatctaagtcagcaaaaagaataacccaaatgaaagtcttcaacttccatagacctcttctattacatataaataaatatacttataatgcaatcgaaagtggtataatttgtaactcccaacattttatattagctttccttaaacgaaataatgagtaaaaaacttggcactttatatttagctttgattttgtcttccatagttataccctttaagggaaataaggaatgtttgattgtgttattgtgctgaccatttgtgttattttctcaaggaggatgggtaaatatgactatttctatctcgtattttgttttattctaatggacacctttacgtttctaatattaatttaaataagggcataaaataaatttacaccaccaattttttattggacaaattacatatcgacatgtcatatctcaccttttttcctttttacacaattggggtaacttctttttttaatgaaattagagaaataagcgacactccgagcgggttcgacctcacttttataattcttttaattattttaatgtaatttttttttacattttatttaaaatataatttaaaataaataata

SEQ ID NO: 14663 - DNA, 4859 bp, Cannabis sativa
  modified_base (2155)..(2158): a, c, t, g, unknown or other
tactacatacatgtatgtagttgatttgcatatgtcggccggtacaatataagtctaactctcatgttgttaatttttattttatttatttttacagaacaaatgttatatatgggagaaaatgtttaagaaaaaaaaaaacttttcagaaccttttttgagttgaggtgatgtgaatagttttttatgtcttttaaagtgggatatactgtgcatgtttacatataatgtatatattttgtccatattctaaaacgagtatgcgctcataaagatcactcaaccaaatttaaattctaataacacaattaagttagttaaatttttagtcatgtattttccaacaaaaaaaaaaaaaagaacaacttcttgtggatctcaaaacttttatatatttctttcacatgtcatatatatgattgattacatgtctttgtgataattaatttggctactacatgacccattaaaagtactagggacttaatcttctttttcgttctataataaacaaaatgttccttttcatgagagcacaattgagatgcattaggggtgaaaaagccaatgattaactacctagccagtagccgtagtttagtataggaaaggaggcattgaacacatatatattaccatatatatcactccaatataaataattaatatataaactgattagactttggatgcagtccatttttcgttgcacattaatattgcgctaattattaataaataatatgctgactaacacgttgtatggacaataaaagattattttcgattaaaatataatatttaaatataagttatcacaaatttatttttaatcacaacaaattataatttttttgactaatacatttagccacaaattttttatttttagttacaaatttatttatacttatgttataagtagttaattgcacaaattaaattatagcaattaattaacagttcattatacaggaaaccattattttttttttgttccaattaacttggaaactataatctgtcgaagatagaagactaaaaagggtctaattatcgagtacaacttgcatgtgctcacaatatatacacatagtctctctctctctctctttgttttttttagttcatcaatttgtatggaagtgcagttcatggctagctgaatagacaagaccagtacaatcaaagcaaagcaaagcaaagcaaagcaaagctaagctaagctaggtagcctacaaaaaacgacaataatcattatatgtcatcaaccattcatctccactttcttccgggaatatctcttctttctttagatatatttggattgagtggaatattgatctataatgcagtactcttcttctaatcctcacaatcttactttcttcctttctttccttatgttacttttacatttaactatagaaacattattagtctaattcattttttaaattaaggagatcattaattattataacagaaaattattctctagcttagctgctataaattaatatatatttataatcttaacccccttagctaggttacaacatatagctagtcttatatatagtttaattaattagttaagatttggtgttcctttttagtaatataatatgtaaatgatcaagtgctgagataatatgtatacaaaaaaagactgatgtatatataagattaattcgatatatttctcatttctatttacatttcgatctggggaattaatcataaaagccccatagacagagtaaatatacactaaaattaagtaattatagctccaaactattctcatcatcatcatcatgagtactaaactagtataattattgataataatgtatgactatagtatatattgactagtcatgccagcatagaagcatgacaacacatctcctgataatgtaaagccttcctttctgttgtttaagatacccaccaagctttctgcatggatctttccttttggactgctcagctcccatggctacactactactgtgcatcttcatatttgttgatttgaaatagtaaaaagtactatatgtagtatagtatagtgtaaaattaagagtgtttggcttgtgagaaaatgaagagagaaaatgtaaatagtaaagagagagagagagagagnnnnagagagagagagagagagttttgtatagtgtagtgagtttgaaatgagtaggatgatatgaaagtgtggcagaagaggtttgtataaatagaggagagagtggtccagactataagctcagcgttcaaacaaaatatattatgaggccccctccctcttccatcaaccacattatggatatatattaacattgcacatatatctatgcgcccatggtatatattatatatatatatatataaatatatactcatatcttccaattcaatcctccaaagtccaaacaaaagaatcttatactttatatgtgtacacttgtatcataactttagaattaagcgagagaataagaaattacaggatactagtatgtacaatcttcttctttttttataactattagtcattaattataagaaaaaaactgttactgaaaaagcatcattttgcctatatatttcctttactcaaatgatattctctacagtagttttaataatagtctctggtactgatggtatcttttataaaagaccagatggtctaactctgtttttggtttataaattatgtcaagacttacaatttttttgtttttttttttttttgcctaactatagaaatagaaagttatcagtaaaaatattgaagatacaattattattataagtatatgcaaaaaaaaaaaaaatgtgttgtccctaaattggcttattatatcctctcttatccctacaccaattgtgttaagacatatcatctatatctattttttattattacataataactaataaagtagcatctaatctcgacttaattcgagtttatgtaatgttaacatattatcatcttatggagaaattatatgagacaataaagcttaaaagtggtaggcacttggtttataataatgaaattttttggcgcataaaattaaaatattaaattgcactgtagacttaactaccctcatttttcttagtattattttttcctttacataaacagccacgtccagtagaagcatttatttggctgggcacctaccaagggtattgtctgccatacataacgaagaaatttagggttttaaggaaaaaaacaattagaagagatttgggaaattgagaattggaaattggatgtctctttattgaagtatctttaaacaagcatgcatgtagtagtgcacttctgcttgctccatcagtctcaaccattattattaaataatacattccatacaaaaataaataatagcatgggtctagtataaataaatgtgtacgtatttatatcttttattattggtattattatttctaacgatatgtatacataattaagtatttcatattgattaatatgcatgcatatgataattgaatatggatgatagaattgtaactatgtggtaattgttttagtgtgtagagataaggccataatctgatcttaaaattggatatctgaacacagccaattggaggccatttgtgtcagagtttggattatttggcgcatttttttcttctctcctaattacaatgcatgtgtagatatactagagggattatgagtattggttggttaaaaaaaaaaaagtttctttgacttttaaaaaaatgaaatttaaaataattatatatcttgaatataaaggataatttaccgtataaatatttaattttaatttttaattgtaaataaatatttaagtttaatttttgacaataatattacttaaattatatttttagaatttcgtaagtatttaattagtcgaagttatgaattttttttaaaaaaaaattaatttaaatatactaattaaaaaatatcaaacaggataataatttaataattaattaacggcatgtattaaaaagttctatagcttaaatttataattgttaaaaattcaacttaaatatttaattataaccaaaaattaaatatttatgctgaaattacttaaatagaaatgaatacaaataagactatattattatattttatacgcggatacactagcaaaaaagattgcattgtccatagtactttgtacaaaacccaatcatattggaggttccacatttccacgtacatacattaattaataaaaaaattaactcaactaaataaataaacaaatgtactaattaaattattactacaaagagtgacaattatataaatatagctgtgttctcaaagtagttaattagtaatgtatatataccattattatacggtatataattaatatgaaagctcaaaactcaaggctatacaattacattaatctgaatgtacttcgttggtgagtatatagccaaacaaaagttgaaactaattaattgagtgttacagtctaaacccctaaactaaagcatataatcaaacatgttttgtctcgtgctcctcaagaatcatgttaaaaaacgtcaactgaaccagacatgaacctggtctttcctcatttcaatacaaacggaaagaaaactagctaattaaaacacactaatacaaaatattgtataattagctaattaagtcaacaaataatttttattgaacttttaccataaaaaaaataattatttaacaattgaaatggttcgagatttgaaataatcaagtttgaaaataataaaaattttagctatctttttaaatatgtctttctaaatctcct

SEQ ID NO: 14664 - DNA, 2579 bp, Cannabis sativa
gggtaggaaataattatttttgtttttttgctgatggggtaggaaataaattagtattgtgtttcaaattttcaatatttaaatttccctaaaaatgtgagcctaaagaaaagtaatttctttttatgtataacattgagtcaaaaacatgtcccaaggtgaagaagacaaaaggtcaaatttttactgcctttatcctatccttgcctttttttattatgaagctatttatgtgagtgtagtgaggatttgtttggtggagtccagaaggaatagaataatatgttaatatgttttgggtaaatataacatgttatatatgtatatgttgttcatatgataacttgtttggtagcttggatttatggtatggtatattgtgcaggtgggactacatggaatcaggaggaaaattctaccaagatatggatcgtgtggctgctttggagaaagggctgagaacatgggccaaatgggttgatgccaacattgacagaactagaaccaaagtcttctttctatcaatttctcctactcattacaagtgggttttctctctctttctctctcaaataattgagctgcatatacctaagctttcattactactatattgtacagaaaattcaagctccatacttagctgtattaaaagggaacagatcaatcaagtagaccctaccctgacccttgcactagttttggtcccagttggattcacatttaagccgttggtttatttaaactattatagagtagaaatttgttgtacttcggaggtctacagttaactgtacatacatctcgagactcaattcattcaagtgctctgccttgtttttgggttttgagaggtggcaaagaaaactttacccccttttataattttcttgaaatttatttacttagacatttaagttttgtcggttgcattaacacctgcaatgtccaaaaaataaaaaaacagaaacatagggtaacttgcccttgtattcatgatgtacttcacatgaaaccccactttgtgcaaaaggccaatcatttatgatttttgatgcaaattgcttgcaaaccatgtgcatgttttcttctagtttagggtgtagagtagttgtgtcggcatagggtatctaaacaagaccaaaaaatgtcacactaaatgttacacggccacttgagtgcacattcttgttagctttctaatcacgaagtttcgatttgcagccaaaatgaatggactgatgatgggacaatggctacaacaatggctgcaacatcaacaaagaactgttatggtgaaacaacaccgatgatcagcgggggcgcaacctacccaattggggcgtacccagctgagacaagggtggttgacagtgtgataagggacatgcagagccctgcatacttgcttgacataacaatgctttctgagcttagaaaagatggtcatccatccatttatagtggcgatttgagtccttcccagagggctaacccttctcgctctgctgattgtagccactggtgcctccctggattgcctgatacttggaaccaattattctacactgctctatttttctagttttgatgtagcttaacatagcaatatataatatacttatatgtataagatttgatttttttaaaaaaattctaggtgctatgatttgtgagaggtttgaccaaagtcaaatctcacattcttgtaaagtgaaatgtaaggcattgacacattgtttaagcggaagtactaaacaatttcccggttacctagcttttagtgttgtaatagatgctaaaatattataaatgggaacttcattgctttgcagttgttagttttcaacttaatcagaaatttccatttaaaatcgttgctctgaattagtcttatatgtttttgctttaacaatttacttttcagatgaacgtattatctatctaaaagtagtcgttttgtgctatatataaatatattgagagagaagctattaacaacaaagtggctgtagtttagtggtgagaattccacgttgtggccgtggagacctgggctcgaatcccagcagccacattattttgtctgaattatttttttttgggttttacaaaaatattaaattttgaataaaaatttacatttatactatcacgagaaaagttatatttatactgtccttgcttttttttttattttcttttatattatagatatcgaaaattacgagacttccatttttcacacctacgaaccgaactaccctagcaacacgagaacactcgaaaaaacaaccattaattccggcgacataaagctaaaatagtaaaatcgacgtcaaataaataatcatggttaaacaattgtaaaacaacactaaaacaaataaaaaaaataataaaaaaaaagattaaaaaaaactaaccatcttctacacaacttcaatactagatgcaatggtggctatatttgcaagcctaatcttaaaaaatcaaaattgaaaaactactaaaacaacacaaaaataaatgtaaaacaatgaagcagatataagcacttagaaaaacataaaagaacc

SEQ ID NO: 14665 - DNA, 5965 bp, Cannabis sativa
ggggcgggattccctgtagatcccatctttctcaattaatctactggaacaaggttctttcaaaaaaaaaaaaggtctctagctcctttgctctcatttatatctactattcatctaaagggtatgagatatacatttcaacaataatttatccttcttaatcacttaaccttaaccagataatagtttagttattagaattaacaatgaacccaagttatatttgcacaacccagattatataagaggattctgagtgaagaaatgaagaaattttttagagaatacccaacccatatgaaacctatggtatctatcaagaacaataaagatcttcactaatttttatacaaattgaacacccaaaaacactaaactaagtggatttaccgaatttggttgttccattcaaaaagggggattttttttttattaaaaaaaagggaaagccatttttttcttttttaatgaatgacaaaagcaaatgctcaaaagaatattaaaaactcatgggatcataatagtacgtggtattgaacaccttaatgtgttttatagcaatactcataatatagatgaattctgaatacaaccttactaaaatgcggctttcacaaccaacgaaagcacatgaatattatatcaaaggatcgaaacaaaggagaaaaattatgaagccctgtcatctacttgttccaaattctcttttccaactctgtagaaatccaacatttcttcttccaatggatgtgtattgcctgttataacaagacaatgaagaggagccccgaaatctatcgactgaagttgcttcattgtaccagccacaacgatttgatcttcacttccaattctagcaaaaccaacacactctgtgtcttcattgtatactgcaacacaacaatacaccaacatttaatgtaaaaattaacaaaccaactgtgattcagttatttgaaattggaagtttaaatatgaatgagtgatagtaatagtagttatccttaccagagtctacttttgcttgctcaacttccaggagctgctcaatggcagtatttatcgacatgtatctaggtggttcatactgtttcttccctctaaaattaaataagcaacagagaaaagcaattagttagtcttccgattcaaacagtattttcgacaaagtgctaagggtgtgtttgataggacatcgagagtgtctaaacagccattttgtaaaaatttatcaaaaagaataaaaaatggtcagtcacttggaaacatacctgcatagagattccagagagggttccttcacccgaatatctgtgaaaacaaaagtttaaagaaatgattgtgttaataagaatctgacattttgcagctcatatcagattttcagaaaaactcatctctcacctcacctaataagcagagagtatgtagaccaagattccggttactctgaattttctcatagaagctgtctggtctccatgtttcagtaaagaatgggattgacaccgtctctccataacggtagagctgcaacccacaaattccaatggcattcatcactgaagcattgtgtattactttcacaacaatacccaatttctttgcccgaacaacaagatcggtgtgagttgtcgctctgcatagtaaaccagatgttaaatgaggaagaataaactgaagtaaattgaataaagtatcacatgtatatttatgtcagtgtttggaaagtaagattagatcaaattaaagaaaataatgacaaaattaatccgaacacctaatcctacaattggataacttaatcttcatgaatatctatcaaaactgtaagtctgtatgaaattttctttttatccaattcagtactacttgcaaaatatgactaatatgaataaaaacaaagagctacaaacacaatcataacaactttcaaaggaccttatactgatctaagaaagaatatttatcatcatatccatggaatttgagaaatggccaaaatcagcaaaacacatatacacatacattcatcaaatcaaaaaaaaaaaaaatcagaaatgcaaaggaaaacagaaaattgaaggaagatacccaaaagggtcgccaacaacaagaaaagccacatcagaaacacgagcagcagagagtatttcgtcggctttttcctcaaccatttctctatcagcaagaatgactggccttccataaagtttttcctgagcaataaaaaattgataaagttgttagctttgaatatggatggaaaagaaagtaatgaaattgggggagaaagaggaagagaaaggatgtgtaccagtgtagaaaggccatccgaagaaataccgaaagagagaagagaagtataagcttcgatgtagaccttgtcgcattgcttcactgcctctaagcctctgagagttatgtctctctcgtcacccaaacccagtcccactatgaacagcatctctttctctctcttctgttaaaaccctagctcgattgctctgcttttgaagatatgagctgaactgcaatgaaatgccactaaaaccctgctggctgctgctccaaaaatttatgaattaaatatttaattcctcaaaaacaaaatatttaattatttaggagaactgttaattataatttcctattaaaatttcttaatcaatttaaactctcaaaatcatatgctaaaatattttttatcatttttttttataatgatatttgttataaatagtttacaatatcaaaaataaaattcttgatgttttaatctattatgcatgcgtgttcaaaaaactttaaacctatttttatgtctaattccaaatatagtagtagataacttagtccaattccaagtagatatcccttgtataattgtattatttttatgtttttttatatttatattgttgttttgtatattaggtgtaaaaaaattaaactaaacttgatcctctaattagagcttaaattttagggaaaaataaataaataaatccaataatttcattatttttgtttagactttagactagtgatctcatgtactgtttacttgaaaatgtgtgtacatttttttttttgaagtaattatagttttaaatttgagaaagaaaacatactatgaaatattaaggaaaagtgcttttatcttttcagcataattttcttggaaatttttcatttttattgttttttttttttgacaaattttacaaatatatcgttttttttcttaaaagaaaatattttgtaagaaaaattcataaaaaaagttcaaaaaatatatgaaaaataatttcagtaacaataactagaaggacacgagttgatcaaggtatgcaacaagtagaaatcatggcccgtgagtctcgaaatgagatgatgtcaaaaagaatttatcgaacacggtgcattgttgttcgaaatcaagatattggtattgaacttatcaatcgattcataacttttcaaatacaactcatctctattcgaactccctttaagtgtaaaagtacgtaattttcactattattcaagtcccttgcaaacgaatgaatatttttttaagaccaaaagaactttaaaattatcaacataataggaataaacttagggaaggaagcataaagaggttaacagttaactaataactgtactatgaaaagaaaaagtatcaatttttctatttctaaagatattttcaacagattttcaatacatttgccattgagctttccttcccctacacatatcaactaacaatgaagcctatttcttcacaaaacagagacccaacacttgcaatcttataggccatgattgctgcctacagagatcggttctacgaatctccattattttctttttcgatactatactccacatctaaccctacaatattaggggactaagacaatatgacttgaacatctgactctgtgagagcaaaccacatgcctcaacgtttgaactacccctctcgattacagttcctcgttataaaagcacatgaccttgtcccgcattgtaaaatcagcatagctgtgggagagatttaccagcagcagctttttctgaactaacccttcgcggtgtataggatcagggactggtggagccggaaatatccatattggcagaagggacatcagtatctgcactagtaggtgtgatagcaccatctctgctggtaggaatagcagcatctgcactaataggcgtgacaaagcctccaccagtagggacagcggcaaccccagagttagaggcagcatcaattccggttgaaggagtagttgcaatcctggcatcagggaaagctgcaccagcagcagccatgactctgctactctcttgcggaatcattccctctgctggtggccaaatacccatctgaatgttagaccgagcatgagtatcataatagggaacagtgccttccatagggggcgggaatggaaactcgtgattcatgtatccaccagcatatgaatttggtgccgtactagatggatttggtgttgtactagatggattttgtgctgtaacacatggatttgttaatactagaaacagactaacgaaaatttatgagtaacaaaacctactcaaatacaagaaaataaagttacccttggctttcttttctgcattagagacttgaatgcgcaacttttccacttctctagccatcgaaataagtttattctccattgctcgcagttcttcaacttcatcaatatttagcttcttttcgtactcaaatttgtcactgttttaagtacatacttcaagaattagcaaactacataatattataattcagcaagaaaatcaaagcccaaagatgacagtttttgctcatgtaagaaacaagaacaatgtttggactgagttgttttatacctttattagatagatgttacagttatagcattctctatagaaaatatgaggaattatcactagcttatcatttagataaacactactgcaacagcaattttgatcttaagcttatatgacaaagaagcataaatatatggcttcacccactaaaagtcattaagtcaatgatgcattcagtaaatggtacgaaagttgattgttataaattctataaagttagaggcatcattaaagttaacaattagcaatactcaccgcaatctctggtgctcttttcgcaaactgtcaagttcagcatgcaaatctggtagactcttaatctcaccatggactttctccaattccttagtggcctcttgaattcgaagagttagctctcgccgtgcagtgaccaagctttgtgcatccttacaagcctgtttcaggtcattcctcaaaccttctccagctctaatatcagcttccattcttttaatcctatcaatcaaaactcggagctgaacatcgctttcagtctggagatttctcatgtgcattttgagtctctgtatttcatgctgagcagttagaagctcttccctcataacaatatgagtagaagccaatctttgattatcccctgcaagtcgttttatctcagctgcctgagctgcaattttagtttctagtagttccacgtgatgtattgtttctaaagaacccttgccagcagcagagcctgagcccgaaaatgtaccatgtcggatcatccctgaagctttgataggatgtccctccgaagcttttgaattcctccttctttccgccatctatccagctatgtactcaaactaagagtacctttattatacaggagctgtacaaataccatctgctgcgttattacaagtcacattgcaccaattagaatcctctaagacagaactattcaaaagcagggagcgtttgaaatgatatgatacaacaactattcaaaagcaaaggaggttcaaacatgaatcataaaattctagtgaacccaatcatgaggtacttttgtttg

SEQ ID NO: 14666 - DNA, 7545 bp, Cannabis sativa
  modified_base (5465)..(5467): a, c, t, g, unknown or other
caaatttggagaaagatagtcgttatgaagtcaattatcttaacaaacaagattaaacaataatattagttagtcgacatgcaattttatatgtcaaaattgtatgtatctatcaacaatttcatatattttattattaaaagtcaaatatttatggtttctcattttttgtcacactgatctaaataaacctaaacatatacttattggccaataataacaatgttagtcaacaactatatttaaatttctaggtagtggtaaaggtataagaccctataactaaatgtagtttccaaaattgtttaaaaagataccaaaaaaactatatttaaatttcattaatttgcaaaaaaaaaaaaagaaggtagaattagcaagagacaaattagtaacacacaacaagatctaaccccattaatctcacacaaacttgagatagaaaaagaagaaaaaatattagaaaaaaaatgaacaataaaattttggacaaaaagaacaacctttttttttttttttttaagtcaatcaaatcatacatacaactctctacaaaagggtgtccaaaattatgattaatattactattttagttaccataataatagtatgatgaagaagttgaacaaggaattttgtcaagaacttgaaccacttctttcattgaaggtctcttttgtgggaccggtgaggcacaattgtacccaactttaaagcaacccaataagcattcttctttaccttccagctcagcacgaattgccacgtcagccattctcagagccctacacttgtcatcaaccacaatccctggcccttgaccagactcatccaaaaccacaactttaccagttagaagttcaagcaatattaccccaaaagaaaacacatcccattttgggttgggctttaggctcctaagcgactcaggtgcatggtaaggagatataccgaatgcacttgggcttgggcttgggctcggcccaggtatgaaatcaggaaaactatctctagaagctgttgatctcttgctaccgaaatttcgagctgagccccaagttttggtacttgtgtcacctgttacaagcctttcaagcccaaaatcaccaatcttgggctccatatcagagcccaatagaatgttactgggctttaagttaccgtgcacgtgcttcttttcgtggaggtaagcaagcccacgtgccactccttttgctatcttaagccgggcttcccaaggtaaatgacaaggtgaggaacccactttccctgaaaaaaaaaaatcaacaaagcacaaaattaaacacacctaaaaatggtcactttttccatttttgtaccaaataataatgaatgaactaactctcaaaggtcactgaaaacgaccttacaatagagacattgatatgcattgtttttccattactatataaaaaaacaagtatcactatcggcccattgggcctcctcacactaaactcactctctcactcctactaaacccaaatagttgactttgacttttagacttttacattgcattaacatacaaaacgaagcagttatacctactccaccgtcaaaaaatacacccggcgcattttagcaaaccgcttcccattctgctaaaatacgcactgaacctcaaaaagagaaagaaaacttactgtaacgagcattggcaaggcagccattggggacgaaatcgtagattatgagcttttcatcaacaccccaataaaagccacgaacccgaaccaaattcgggtgaaccaacttagccacgacccgaacccgattctcaaaatccttaaaccggtaaacactgctctctccgattcttctaacggcgaatgttgttccatcttcaagaacagctttatacataatgctcgaaccagttgctcccaatatataagccgaagctttcaacaatgtctctaattcaagctctttttcaccatctacagtcactaaagttccaacctttctctgctgatcattttcttgagtactacttttccgaccaccttcttcttcatcatcagaagccattgattccgacgagctttcttcttcttctgttctttttctaagacaagcccatctcgtaaatcctttagactcagacgaagaagaaggagatgaccattcatctttagctatattagcttcgttctttaatgaagtttcaatctttttcttcttcttcttctttaatctgtatatgtacaagaaaattacacctaaaatggcagctcctaacacatcccctgctacgattgctattatagtcgccggtttaagcccagtttgcttcttttcatgattcgccggagtaactgttgctgggtctgaatcaattgttctcggaatcgcagctattgccggaggagaagtcggagctgaaatgttcggaattaaagaagaaaaagttgaacagagctttttcgttggttctccacacagatcagaattacctgaaaacgacgtcgttttctgatttaacaaagcttcagactttggaatctgtccggtgagattattaaacgaaaaatcaagagtggccattgccggaatttttttagcaaattcaggtgggattgcaccggaaagattgttgtaagaaagattcaagtaacgaagattttcaccgccgaaatctgaacggagagaaccgttgattagattggtagacagatctaagagctcaatactttgaaacccactcggtaaaacaccagataaataattgttctttaaagaaacaatttttaaacttggtaaagagccaagattactgggaatatttcccgccaaagcattatcggaaagattcaaagcttgaagatttgtattcatcgtcgccataacttccggtaactctccggtgattaagttattggacaagtcaagaaacctaagctcagaagcttggaacagagattttgggagtgacccattaagggaattgttggaaaggtcgagtctttggaggtttttgatggaaccgaggtcgggagagatcggaccgaggaacccggaactgggtaaagataaagcggtgacctgagaaaagccattgcaggtaactccggtccaagaacaaggggagtttttgtcgttaatgttccatgaattgaggacaaagaaaggatctttgagaaggtatttgaaagagagtaacaaaacgacgtcgttgttgaagttgttgttgttgttgtttaaggaaagagattgaactagaagagaagacgagattaaaagaagaagaagaagaaggagaattcgactggtaaaaatgttcatgattttagttgatgaagatgatgatgatgatgataatccaacatttctttctttactattttgctctctttctctctctagaaaagagaattaagagagagtgtttttttggttagagagagaaagagaatttggttactgagatttattgcaaaaacagaggccatgtgacaaaaaattataaaaaaaaataaataaataaaaattaagaacaacagctcactataagaagaaccaaactttgttatactaaacaataattaaatatatgagaattaaagggtttaagtgtaaataataacaaaaatatgtgaatattatgcaaaaaagaaaaactaaaatgtgttatttctcattgtaaagttttttttttttttttctagcactcttttggaaacgttttcaatgagtttttatgagcgggttaagaggtcattagaatgaaaaagaacttaggttggatcaaaaggaaatagtgaattaatgttcagctcgagacaaattgtttagtgattgttcaagtcgtcatttacatattatctttggtttggttaggtgattcaagaatgtcagaatttattaaattctttgaagtttgtaatttttattagacgttctgtaaataaagtgattcattgtgtttcaaattgcatttttcagtaagacatttgcttgtgatgtttaattaacctataaattataattgtgatatttcattttaaaaaataaacaaaataatgtgagttttttccacacaaaaaaagaaagaaaaatatgtgagttttgttagaatatgttttatatgatcactttataaataaattgatttaatatatcaaagttattaattatcaattaaataaaatatttaattttttttgtcggatttaatattttaattaatcgatttaatatacaaatcaaagttattaattattaaaatattttgataattttttattgcaaagatttttatagaatgttattttttattttgagttctataattagctattcctagaagtgtttgttaaattgtgtgttctaaattcattttgttggtcatttttatattatttgtaaactagcattcaaacccaatggctctttaaaaaaaaaatgccattaacatgagaaaaatggttatttccacaaatatatatatatatatttattttttatttcttaatatttttgtgaagaaaaaaaaaattgtaaaatgatttttgcattattttattaaaaaacaattagaaagacataattagtatggttttaaacttaattttcttttattaattgtcaagagcaatatatattttcagaagctaaataataacaagtatcttatttttttttaagagaaaaagataattattttaaaaataattattttcacatgtcatgaatgaataatgatattgattagatgatgaatatataattaattctgaccgttgattaaaaaataaatttttttatttttgctgttgagatcgaagaaacacatccatgagtagcatctaatcatagctacaagacatatagaagaagttcgaaatcaaagaaactctttttatttttaattgactttacatacatacatataacattattaattaatatataattatatatatatttatttataataataatgctcttatttaattatttaatctaattggtctctctgttaattcagtttattttatctacattttcatgtgttaacatatgactgtcacagtacggtattatttaaattatataccaataattagttgtattcatctctgtcaaaacatatatatgtcttttttattttttattttattacatatatatataaataattgtaatttaaaaaaaccccatatttaaatgtactatctagaatgaacatttaaaatgtcttggcatcattattgcagtgaggggtccaaataccccataaagggtcccaaaaaataaaaaaataaaaaaataaaaataaaaatcatatcaaagttgataattaataatatataaattattggaattgtgacaatttaggtctatatttagtgcttcactgtttttttttctactattatttgagtatatggattattattcttgggatgctgaagagtgtaataataataataataatnnnaatagtaataataataataattaataataaacacttaattacagaagtgtactatgtttttattaggtcggtgagattgatgatatatataatttttgtagtactatatataatagtaaatatatatagttaatttacagatcatatttcctttgtgtttctaataatgtcaaaattaatttcagcatttattgaaggcatattataaattagcttttaattttggtcttgtttgcatggataatatatacaaaattaaattaaaatgttcagatatgaatgtgagatcaccttatatttattatgttccttttttgtttggaaacttatttatgttacataatttcctcacttagatttcttaccaccaaaactatatatacatttattcttaggattatttctttcacattaatttcttcaaattattactacttggattttttcttttttcttttactcaaaatagtttatgaatattaaaatattaagattcattcataaggatttttttttacattctaaaacatattttttttttacaattttacagattcaaatctacataagaattattggagcaactaaaatcgtaaatttaaaaaaaaattacaaaatgatatataaaataattccccttaatataatatatttgtacttaatttattgacaatatatatatatatattttgagaaattaagtgacatatattttaaaaaacttagtaaaaaaaataatctttttttttctttcttaaatgaatttggttaccaattaccaacaaattagtaaaccattaattaagaactaatgataattataatctaattgcaaaatagatattcatctaaatataagtaagttggttaattaatttcttaatttggtaatctactaattgagttaggactccaagaaccaatctacacatatgaaaaagaaagaaaaaaacattattatctcacccatcatcatatccatcccattatttctttttcatattctttttttgcagcttttaccaagataaatagctaatttataaaataaataaataaataaaaaaagtaggtgaaccatggttgtattatattatatataaatccaagattgaaagatctaatgcctctttgattttattggtggaccaatcactttgcatgcataaaaccaaagattaggaacctctcactttcttaattattgataattaatttcaataatacatatataaatagtttaaattaaaggggtctttttatatataaaaattcatgcatggacactaataaaaggtcctttttttcaaagcaatttttggtctttatattccatatgatctctctttttcttcgacaagagaatataacttaataaatatggctccaatctcatcatctaatatactaataactttttcattaatattctaaaataatatatttataaatatgaaggtgaaaatttaggaaagcccatatggggtcctctttttctctttaatttctcaccaagaaaagaatagaaaagaaaagaaagtaaaagaaaatagcttttagaaaggtcatcacttctttcctcaatcaatccactaaagtcagcatttttcaccactacaaacttacatacaatcaatacaaaccgacaaagtatatatttcgatagggcactcaccttcgtttgtctggcggagcatttgctggggaaaagagttgttgcacaaaggtttaatctcaaaaattggaaatgggcagaacacttccacgatccgtgatcattggatcccgggtattcgccaggtccctacccttgcccctgtccccgatacagtagcctctttcatttccccttcttctacctgggacctagttagcttgcaaagatgcttccctccccatgtggtcgagcaaatcctctccattcccctccccctgaacccccaccccgacgagttcatatgggaacattcccaatcaggggtctattcggctaaatccggttaccatctcagccttgcttccactcccccccaggacataccttcctcctcctccccctcgccttggtggaaaaacct

SEQ ID NO: 14667 - DNA, 14421 bp, Cannabis sativa
actctagcaaacagaaacttaacaagaaaagcttgttatctgaatcctatgtcactcaatctgaatctcaaactccctctacttctttctggactgcacatgtatcaaaagaaaaaccaaatgaacacccccaccccccaccccccaaaaaaattataataataataataataacaataataatagtgagaaaaagaatcccatcatttctaaacttcataatcaattgtactctccacagactcttctcttctatgatcaggatgtgcgagttggtttctggtccgtccacatcaatggtaacttcatttgtcatggctgataaggacttatggtgcctcttgtcgtgtctcagcttgagtatccttgataagaaatgcccaatgtctctcatggaaggtctttttttcggaataggattgatacatttgtatccaagtgctgccatttcattaagcccttctgcatcgaacttcccgtcaagacgagaatccacaatctcctcccatcctactttcccctctgtgttcattgcagaaagctcgacatattccatgagtccctgttgaggagttctgccagctataaattcgaaaagcagaactccaaagctgtacacctcacttttcttggtaaaagtccttgtagatatgtactctggatcaagatagccaaaagtaccccttgcatttaataaaaattatcacataccataaacttgccttttcccccataaatcatttcgctcaaatcagatctagttagattttagtggatcccttaatcaaacctcttatgaaagattttgtaaattcaatatttggatagataggacactcctaagtaagagactcactaatgacagtaacccaactcaaaactagtataaaaccaatctaatattcaattggtaagtgaatagtcaaggaactagttcaaagtgaatcccatatgtgatggataatgctagttgtgactgataaagggtgaagctacaaacttttaagtgaagtgatctcaaaagaaataaagatgctggaagagtttcactcatataaacttagaggtggtgtcgtttctcatgggagttctgaaatttctctcgggatatctttggaatgtgtgagaacaaggtcataatagtattaaataagaaaagtggaaacattgggtggatcaagtggaactgagttatgcgttaccggtttcatgttcatcataagaaataattggttcaacgatatatcatatgcaacctaaaatctcaatggaattctataaaacttttactaaggtaaaattaaaattaaaatcaaaagatattttactttattcacctacattgtttatatgatggagagtgagattgtatttaaccaagtagggaaatgttatgagtgaaaaaacataaaataatagcaataccaaagtaggtgtaaggatttggaagattacacaagtaggtgttaattttgagatatcgtgattagcatcaaaatacgactaaattaagtttagatcaatatggtatttaaatacatctaaacaagttcagcaatttgagaattttttaaatgatttaggcataaaagtagtcataaatctagttgagtggtgatgcgtcgtctgcctttaggcaacgcatggcctcccacttgaaggcataggaggtgatgtgccaccatgacgtgttaccatctagcagacgacgcatcacttggcatcatgcaattgcaaggtgcaacgcatcaccatttataatggcgacgtgtcgcctcttccttgaattttggctctaacattgttttttggatgagaaacaagtgggattcacctagattggtgtaacactatttaaagggtttcggcaggttcaaagggactgatcacacttttttcactgtttccctataccctcactagctctcaaagatcaactattttctccaagaaattgcttgcttgaagaattcataagcttgttatatcataattctcacttcttctttgtagaatcctcaagctatttttcctaatggtttgaaataaagaatttgaacaaagtttctcaacttgttcaagcctctttgtgtgttgagtttaattgctacattgtgtttttttccctccattgttgtccttacccactctcccccaacacaaagtattaatcaaaagtgggtgcatgcctaaaaatcaggaccagcatatggtaatcaacgcaagcaagggatctatagacatataaatgtgtaaagtgctttagtgctcatagctagcgcatcatcaagagtttaagacaatatcattaacagaattctagttccaaaccatgttatcactttagttgttagcatcagaagcagtatgttggaattaattgcctaatttttcagatggtacctctttagcttcttccatgagttctggtcccagcttcttcaacaataacacagtctttggtgtagttttccacataagcatttgttgctgtgtgcttggatgcgtgaaggctaaggatgcctctgtcaccttttctctagtacaagagaatccatctgtacgaaccaagaacatttcagctttctttcttgactgcacccttacaactccagttgtagaagcacacatatctccttcaaccaaacttatttcatcatcactagtaccaccatgacctttggtttctgattgaggtttgggataatcattattcttgttacttatagtagcagataatttcttctccacagctaagttcctgttgctgtcaccaaatccattcacggttggaccactagaaacgaaaccatcaccagtcatatgtctaccattgctagaaactgggtttttagactttagagaaagaccattttcattacatgatccattagaacttcctgtttcttgaagtccatgcacttgctcattaccaagagtatcacctctctgcatttcttcagtatacatatagtctgaaacaggtaacgttttcaactggtagttattataagtaggaggggatacccttttgctccgaaaaaacatggacatttcctttttggagataaaatttccaggaggaacctgggcattcaacgggtcaatttcagtggagaagtcagccaaagatccttcttcaccaatgcaagtatctaccagctccataccttgaatagaaataaggtcactgcaaacctcattggagcttccattcctttcatcactataggctaaagcatctgcacggtttacaccattcaaactattatttgaagtatcttcaagtttctttcccaagataggcttctgcttttctgttatttcattattaacttgtaacattgcattgttggaagcagttggttgactggagtcaagtggcaaaacatagcgagtcatgtactgcctccatctggagaccattgcagaagttctctgaactccttctttactatggagatatataggccttttgctggaatctgaaaccaacattgcaaacttctcaacttgctccttcgaaggtgcagtcccaacttcaactggaattttgactaatgaaatttcccctgatgcaatagcattgtctacggcctcttgataaaagttatccttcacattctcagctctaagatcaattatggttttgtatcctttcttcattagccacttcagaccttcttctgtaacctgaccacccctccaaaaagccacatccgaatctttgtatccaatgtcttctctagaagtggatagataaacaggagtccagtttgcaaacagagaatggtcaggataatcctctccacgggaaaagccaacatcataacacacgttctttagtctctgaagtttcctccaaacatctaagcttctatcatcaccaggcattaaatagttctcaagggcgacatgcaagctctcacagcaccttttcatctcactcctaaaaatggcaagcggaggaagcttatcctcaactgcactaacatctaccatacgaaaggagttcgctacagaagatcttccagaaagaatatcctcccttccttcgttcaggagggacaccatacaaccaagcactgaaacaattttatcctccaataacggcttttcatctgagacgagatcatatgaaacataacattcaccagttaaaggattgcataatgtatccattaatgcagcatgaagccattccgcagccctgaagattctacaatatgcctcaatttctgcaatatcccctggaacaggaccaacccaaggcaattgggttggttcatgaggctggaggaccttcaaatacagaaaaaaacaacagcgttaatcaatgataggcataactgcaccactgtttctcctgaaaaaataagtttaatccaaaacagttgactttggaagaacaattatcgagaagttagtccaaaatccaaatatatgggaaagttaacaaaataccatgaaaacagcttattaaacgctatattctaaaatcaacacaaaaatcacctcagttacagctacatgctacaagataatatgaacaaagaagataatcaggccgttgctcatccataaatatgtgtgtgtgtgtgtgtgtgtgtctatgtataaacctacacggtctacgcatcgagcagacttgtacaagtacaagtctaattcaaatcagttttaaagaagaagaaaaaatgtgtttcctaatttctaacccagtaattcagatcgacaatcactaaatttgagcttgcggacaaaaattcaaatcgaaaaaagaactataaaaagatggatcaaaagaagtagtaagtagcaataagaagtcgagacctgagaatccaagcctagactgagagagaacgacttcgaaagctcagcactaacgacgaacttgaggcgcctctgaaaccgctccttccggcggaactcgaatcggaaaccgaagccgacaactctggggctggcaatgaattgagtagtcttaaagggacatagatgagaagatgacggcgacgatactccagtagccgaacgacaccgattcatatcgacgacgacggccaagtggcatacaagacaacatgccgccaccattcggaattttctttttcccacgctgtttttgtaaatagttgtttggatggcgagaaaataaaagcgtggataataagagccagtattttccaaaaacaataaaaacggaattgagagggacctttttttcctgagaaatgctaaggtccaagcaaaaatttattatttaatttaaaaaagcgttaactaattaccccagcataaaccagtactgagtagttagtgaattgtttccttttattttaaatttttggccacaaatattttaattttcacacaaattaaatgaaagttcttgtgttgtgtcttgactctaatcttctggaattcgattaacaccacaccatccggaccgggaaaggaagacataaaacgcaaaatcaaagcccctcttttctcgagtcacgacaggtatgtgtactgctattgcggctgttgctacgagctagtgtgggccatcaactggatattaggataggatcaatttaagaggcccatacttttcaataatatttctataataatacaaattaaaaaaaaaacccaatcaaatattcaaatctctgtttttactttttcaaagatcaaatcaaataatgttatcttgtagtttgaacaaaataatatgagccatttcaattgttggaacaatacaaataattaaatatctcacctattttcttagctttttttgttttttttttcttttgggcatgcaatgttctataattagacacaaatacaaatgtaaaatctattttttttacaaagtgatttaattttacatataattgtaaacagaaatatacacatagggaatttattccatccaataagctcattaatcattatctagcatggagagacacgcctagccaaactataatactgctccaaaaaattagccaaaataaaggtttaaaacaaaacatgcaacacattagagaatcgaagtaaaatctaagtggtgacattaaactttaaaactagcattggaaaaaataaatgcaaacaattttttttttcttttcaatttggctatgataatgcacagcgaaatagaggactcatgcactgtcctctagtggccttaggcaaccttccaatttcccaattagtatcttaccttacagcctagggatggaaagcagcagatttagctttataattttgaatagccaggaaataatgagatgctttttcaccatgtcttacaagaaatgcagcttaaatcggattggatatcttctcttatgtctgaaactctttgacgtacagtgaatacagaacaaagccatttctccactttgtcaactcttccatataaagaagaaaaaacttgaatcaaatgccagacattagataattctcttgtaattactgccaaaattaacggcaattttctttctttggtcgtttttacaagaactatacaactatcctaagtcatattactccgggtacgcaccctgtcaataagcatttgcctgcctgacaaatcttcttcataaccaacaacctgcatttgcagcattaagtactaagaatgagatggaaaacctcatgcgaacaaaataggcaagaaattgcatccgcgtcatatacagattaaacactacaaatctgtagttcagtgcaaacagccaaaaaaattgcaatgagtaaaggattaaacctgggaatcggtctgtgtttcactaaatccatcatgcatgcccatgtttccatctccaaaagaattgtggttgtcatctttactcctataaatgatctcaaacatcttagccaaataaggtaaattttgcaaattcatttatatgcaatccacacagcataaggctatacagaagttcagtaaatcacccatctgtggttgatgaaaaatcttctacctcaaaaaaagaaaaaacaagttcgagtgataactaaaattatatatgcagttactttagctacaaaacaattgcctttgtggttgctaaaaatatttatttatgtacatgtatgtagacgtatatctgtacataaataggtgaactgggtgggagagtgatttgattattgacactttttaagtagatctgcagttttccttaaaggaacagaatatccatctaattagacaattcaacaccaagtaaaacattctacctctttatcttccttaatcatcctataaaggtaacacatgtagcaaacgtaaataagatgcaaccacctgtttaaccagtgtttagataagccaacgatggaatgtgtatctgaatggtcttgaccgagagttgagcaattggatggtaaaagctgttatataatcaaggaatacagctaatgtggaaaacaataataaatagaaaatagaaaaaggtagcaaaaaaaggacacaagaatacactttcatcgcaaccagtactccctggtgacttctgatcatgaatctgtgcaaaagaaaagatggacataaatcagaagacaaataaactcgtttcagaaaagcaattaaggaatagccagtgtacttaccttactagtctgctctaacaagtcctcaattgcagaagctacatcaggaacaacatgagacacttcatcggtatccttggacacatcatctctgatggaattagcattcgtgatggaaacacttggatgtaccgcagaagaaagcagatccctttgaccatcatcttccaaaagccttgcctttttatacaatgcacttgtatgtttagctccttctctaaaacttttggttctactaccaataattccagttaatgatgttttagtctcttccaattgacttggaaacggggatggaatgtctccagaaatcattcgaacagcttgtgtaggaaactggctcacagtgcacaatccagcctcttggtcttcagcggtaatttcttttggagaaaattgattaagaggaaccagtttgttctgtcaaaaagtgcagatttaagcataattatttcagtatgtcaacaaaaacaaaagaatgtctgcttgacacaatcacaaatccaatcagaggtaattgtatgtatccatagtacgaaacaatacctgcttgacacaatcataaatccaatcagaggtaattgtatgtatcccccatttacaagcagcctcatactttggtccacttgcaaacttgcaaatgagatgagtgaccttatttgtcaatctctctactaatttggttccaagaacaaagcataaatttctcaaaagcagccgatctttctcttcatattgtgaaacacaaaaccgaaaattttcaaatccagggaaaggaatccagcagggaagtggagaatatagaatgtgatcattaacattaagcaagcacccatccttcaaaagcaacattttcacacaatcagcttccaaatatatatcataaaacaattcagattatcagaatgataaatgtaaagattggattgcccgttgatattcactaataacaaactaatccaatttcttaaacattttattaaatagagaacggaatccaaaaaaaggaggataaagtatctccacaaagacaacaaaagtgtaagctaaaaaaactgaacaaaacacttactagattacattattttctcagccaagtgtgattagggacaataagaagaccctaaatgacaacataaaatggcatgtactgctaatttaaagaattaagcccttggattagatggtagaccatcaatactggtcaaagtcatatttagaaataattttattgggataaaaagtagcactaaagtcttgtttgattttgaaacaaatatttgtgcgataccatattaacaattagttgagaaaaatggcctgtacaatcaatgtggttgtcctcttcattcctacttttgtcatactcactgcccgacaaaataaagcatcgtaattggttaaacatgaactacgactatcacaacccacaatccatccacttgccaatcatatcttactaaataatctaacaaaaaaaacagcaagcttgtttgtcataaaaaaaagataaaaaataataatacaccagatacaagtcagtgctcaggtgacaacttttacaaacatgaagcaaatatcctctctccattgcattcaaagagtaacatataaagacccaaagaccaccttcatcaagatattatccccagaaaaacagattgaaccagcagtagattttagtaaaaaggcatatttaaaattatgcatcacacctctaaacacgagcggatccagtggcttgatacacatgtagtttgggaagcataaactaactttggtatcacaccatgacactcaactgtgaagtttacactctgcttcagaaaagcatcaactacctcacctcctccttgttttatccattgaacaatttcacctttctggaaagaaaattccagaatcacttggtagatattatttaaaacaaaaccccaaacattgtcccatatgatacatatgaatgtaaaacacttacccgctcttcaggaaaggaacttgagaatccgaatattttaccagaaaatacatttgaagtttttccgttttgagtgcttgaaccaagttgcactctctttggagctttattcttatcacttactcgacccttactttttttattgacagcagtaacgttactctgctgcgatgattttgctgcagttgccataatgttgacatcagtcgtgttgatttctggtttttttcctttgcttccgcccaatggtaatggcattccaattccacctcttatgctaccagataaaggattagatggcatgatcggatgaacagcagagactctagcttgatttagactggtcaatcctgtaattgctccttcaagaaaatttaagagccataaaaccggggactgtaattagagaatagagaaacaagcataatagacatatcagaacgagcatactgatcattgaaaccccaacaccaatagcagtctacaaaacttcacaaaccagcaatacaagaggaaggacttttacaaaataattaacaaacctttaggaaaaagtaaatcgtgtgcaatatgtctttgctcaacatggacctcttttttcttacgatcacaatcttcgagccaggtggtcctaaccacctgaatggtaccaaaagctgcaagactccttgcctccttcttttcactgggaaattgcataagcttgtaaggataattaaaaaataaataagttacacaaaccttcacgatatgctatgttcttgtactagcaccaaaggaaatagcgcccaacaagacaaacacacagaaaggtagcataagaaaacttacatctccgaagggaatccaaccactacatgtgtcaatttatcatcgaacatagcatatcgtgagccccctcctcttcgaatcatattaactagtttgcgcatttctgaagcttcaaaaccaacaagtaatattctacactcagacaagtagagctcactgtcatcagattgagaatcattggctacacaatcatcaaggtttatcgtatttatttcacttatttgagaatgcaaactaggttgttcactgtcactctgttttacattgactggagcaacagggaatttagagcacatcctttgtgagagggtagcttctacatctggatccataaacccagcactaagaatcactgacgaattggagtccgtagccactgatgatggtgcagattgcaaattgctaatatccttgctatggctaagctgcacttttacacctcttatacctttatttgaagatacagaaacaccctgaacaggataggactcctcatttagacgtgctaatcaccaggagaaagaaaacatatctaacgtcagatgcaaataataaaatctcgtaaaaataagtacatagattaattatccaaaacatgtgaattcaaattctatcaaaatatatagcaaggattacctcttctgactacagactgatcaaaccacttccgagtaataacatgaatgtggccccatctccgggccaccttatatttgtcaccttcaggagcttacaaacagtcaagagtacaaatccatgtatgcttgaatatattcataagagatagctaaaagagaaaataggtgctaaagagaagtgatcataaagtaataatgaagaaaacacaattacaagatgagcaaacatgacatcaagtaagagcgccaggattagatttcataactactttgtagaataatattaataataataataataatcacacaagtcatcgtacagaaatacaaaatttgacgagaatcttattgcactttgtcggttacttgaataataatctaaaaaagaaaacatacagaaacaaacagaaaacagatctgtgcagcccatagttaaatcacatacaattgggtgtacattaaatcataacagatttagaaaatttgcatgtatttaaaaccacttctcaaagggagcaacaaaaggatatatcacaaattaggtgcgtgcacttcttggtaagttcagcagaatatttcccaccctgttgtataataactttttccattttcttcctttcatctgaaaaaacaatacaacttagcagcacacacacatacacactgcaacacgacacactgaccagaaagcatagtttaaatacctcctggaatcccggtgacacaaatattcaatccagaaaaagggaggagtctaaatgattcctggggaacaattcgatgctcattccagcactgatacaaccaatccactgtaacaattggtttcttcaagatgtgtacagcccactgcatagaccgggaaagataagtcaaaacacctactaataagatatccactattctataacaataaggatctactatattttcctgtcttgagaacacttgaggtttttatgtcttggtttgcactttcccatttgttttgatttttttttatgctttatcttttctttcatatgaattttaaatgttcactaatcaacaaacttcaagatgttcatcgtttccatttcataatgaaaaacatgtaacacaaatataaaactcaccaaccacctcaaaaatggttgcctcatactagcttcctcttcgatgtccaattatttataatgcaaaaggatataaaagacttgcattggctaatcgtcttttgaatattttctaacatgaacaaatttatagagtaagcaatttattctcaactacaaagtctaaaatgaactacaagaaaagcaagaaaatatttcctaccttgtaattctattatgaaacaaatttcttagagccttacacaacagtatattgttatggtataaatgttaaccaggaacattgtaaacttcttaaagaaaaacatgcacttaaagttaaccaaccttgtatttcgaagccagaacattctttgcaatgacaaagctaacgtccaaagatgctttagaatggaatactccccccattgctgttaccaacttttccatcttaccctgcaatgaaaagttattaaacagcagaataaataaagaaggttgagtaagtaatataaaatccctaagaacctatactcttggattaaaatattacgctgtatgcttatgcacatctgttgtaattataatttcaggtaataacaacctctcagataatgaaggatgggaaatgtaacagaaaactcacatgtattcacaactataaacaataacttaggtcaatgcaaaagtaatgaaaactgaaatatatttacaccatcttgtagggagcggtttagatgttaaaacaagcatatctttaccttttcattcgcgtcaaaaccagaggcgagaactttgacaccatccattgcaaggcaacaggtgaacccttgtttcggaagagctctatgctcttccgcacacgaaaatacacattgcggacctgcccaacaatacaattagaaaaataaactgataaataatcttgacctcctagacaatgagtatcaaagattgaatagaacaaactcatgtagctctattactatgtcatttcaagtataaagtcacacaacatggctatatgatccaaaacactcaaattggaaagccagtcactgcttcaaaataagataagcatttaaggaaataaataaagtaaacaaagagtgagcacaaacaaatttcgaaaccttaccgattaaattataacctttggctctgagatcttcaaacttctcctgcaaaatattaattccaagagagaaatcagagagcaaaaaaaaaaggcaaaaagaaacgaaatttggaggtaaaagttaggaagcttcttaacatgatcgggagaagagatgatgtgaaaatcgtcagggccggaacgagaaagatcggaggaaaggaagacctcggcaccattgttcttgagagcatcgtgaagagcatcgaagatttcaggaggcacgagtttgggcgacatgaaaacgttggctccgtaaaacgtcttcgccttcaacatcttcagttctcctatgaagctgctttggtttggagatttttatcagtaactgacgactggtcgaccggaacgagggttagttaccaagaagaaagcgcgggaacactctctaaagcacttgcttttctttttttccttttctttaatttcttcggtggtacccgtggccgtgggtggaccgaccattttttatttttatttttttaaaaaaatatatatatttaaaaatgttaagattataactatttgaaaatagaaataaagtacacaagggaaattggcgtgattgtctatgaaacagtttgctaatgttttcaaagaagaagctaagctatcggtgtctttgttggatcgtgatcaagtggcaacggtaaggaggacagctggagtggtggttgtcgatgcttttttttaggcattcaaactgagagttgtttggcctcttctacattggaagctgagattagagcaagtattagtgttatgagacaagaagttctgtaatcttgtgttcctttcacattgcgtcgaaatctggggtgtggacattgatcctctttgatcttttggattctgtaggtggtgttttccgatggatccctcggtttgagaatggggctacagatgctttggcaagttttccttctataactctaaactcgttgttgctaataggggtgttcgcggtgcgggtggtgcggtttttaaccattttttcaaactaatccgcacatgcggtttttctaattttccaaaccgcacccgcaccgcgatactaacaaactgcaaaaaccgcaccgc

SEQ ID NO: 14668 - DNA, 34653 bp, Cannabis sativa
  modified_base (38)..(41): a, c, t, g, unknown or other
tattttttgttatacggtatataattttttttaaatannnnttaagttctattttctattgtacacatgatatataattttattagcattctagctatatattttaatttttatttattgttattattatatatatatttttattgtaaatattttctattatatggtatataaattttattgtataatatatcattttattttaaagaatgcatgtttagtttttattttattatatataatggtaatatataattttgttaatatgatatatacaatttttttaataatattatattattttattttttattgtaggtatatacattttcttgtatggtatatgagttttgttgtctataagatatcttttatttaagatgatatttagttttttttttttattatatataaattttttgctatgtattggtatatataattttgttagcatgatatatatattttttgagtaatttatgattactaactattttataaagttcatattgctagtaaaatattaataaaacctcacataaaattgtcaactacaatattaatattgccaaatagaaataatattgtacgttaatatcgtatattaatgttgtaatattctaaaaaaatattggcaatattaatattcaaaacctttatacaatactaacattttagtaatattaatatatattttcaaatagaaaattaatagtgttaatattttattcgatattgtatattaatattggcagtcttatatgcaacatagtttttaaattgtatattttatgtgtgatcattaatattgcgattactaattaaaacctttcatttaatatattaactattaattttttttttttttgtaattactaattatttttttcaaataaaaccataaaaattcacttataatcacatccaaacacccaattattttaataaatagtaattacagctgtactaattatacattacgtactctcaaattaacacacaaatattttagttatatgtatatattacactaaattgatcaaaagaaatagttcacataattacaatagcaataaaaaaaaagtactcaaaacaatattaaaccaatatcaacattctgtttaggacaaataaacaactattataaagattgattccaaatacattttaaaaaattatgcataaaactataattgaatcagagaatcatgaatggcctagattgaccatattattgaaactagattcatttagtgcaaattagctgaaatttggaatcacaaatttcgaatttatgaataagctcgcataatacacaaagaatctcgacagggactgatcatttacatcaaataaattataaatataaatatatatagcagcatatattataacataataaatataaatatctatggaacactagtattacctattgatggttactaaatatatatttatatatggattgaattttatcctgtgagggaatcatttcatctctatatcttgacttcgaattatgatgggtaacagtttgttaatcatcaaaaatcaaatacatcaaaccgtgcccatagtacatgtaactctaatcaaagcatataataaaacttattatttatagcaaaatgcattctatttttagaaaaaatttatatattgtttgatagttgtcaataatattatttaggttttaggttaagagttgcatgaataaaagataataccaagcgagtaacttctctaacaatcccccatcctcttttattatttacttctcatactttaaactttaaaggctataattaattaacagacaactttatgaatatttggagctcgttcaaagacatatctcacgtccaaaaaaagaaaaaactacgtcgtttgaagacttccggaattaagatgaccataatatgttttgctaagcataacaaccttctctatacaagcctaaactaacgatatgcttattaattgttagtgatcataatatttaataacaattgaattcaaaaacacatgtttaaacacaaataaatttggaagatctaattcgtttttattcaaataatacaacaatcatattatagatataattgatcaatatagagtagtttagagtaaagcaaaataattcctatatacttagatgatagcacatccattaattaagaagtttacaagaaatatattttcatcttgttcaacattcttgatggctccacagattagaagaaattacttattagagtttattagaagttgctacacatttttacaatagtaattactctaaaaatttctacacatttgtaaaaaaaataaataaattagagaaacctaaaatatttaaaagaatttagaagtaattgatcaagaaaagtctagagtaattatgagtcatatagaacttgaataatctagataaattattctagccacaaatataggaagcatacaactataaatacctcatcaaggttctatattataatcaagcttgaaactaaatcaagtctcctactacttccaaaaatactacctactcttctatttgcccatatacaactattttctaacttatttcaatcaagtatcaagtatcaacattaacatataacacccaaaagccaaaagctacaaacttatatgcattctctcttgtaagcaaaattatcctcatctactaaaccaacaactaatcatcactatactactttactattttacctcaacatcctttaaatacttaatgctacatattcatctattattaactaaatcaatacaaatttattctcaaaccattattggtatcagagctcagttcgatcatcaatgggcgtaatcctttcgctcatcagcatgagtttggagttcaacttctacctcttccaatttttcataaaaaaactatgatttttgatccatcaaaatgaggacctattttcgatcacaaaatttatggaaaattgttgaatagggagtcatcgttccgaaagacgttacatctctctcggaagaacaaaagaaggcattaaaggatagataatcaacaaaaaaaattctcatgcattatactacttgcagcaagctatagtagacaatctttgttcgtggattatgggcacagcaacaacaaaagaagcatggtacacgctataggaggagtttcaaggaacagttaaggtaagtatagttagactacacaagtttagaagagactttaagaatcttagaatgaaggataatgagaccgcaaaaaattactattctagaattgaaaaaataataaatcaaatgggagcctatggagaaataatttctaacaagaatatagtagatactaatttcttgtacaaaaaaatatgattccatagtttctatgatagaagaaataaaagatttagaaactctatcaccaattgaactaatggactcccttgaagcatatgaaagtagacgagaaaggcataaagacagtgaaactaaaaatgcctaactgatgggaaaaagatacaagaagaaaaaaaaaacgacaagcattctccatgtggcatttccaaaaacaaaaagccacttggagaaagactgtcaatttaaaagaaaaccacaatgccaaaattgaaaagaaacatgggcacactgaaaagacttgtcgtttaaaaaaaattcatcaagctaattttttcgaacagaaaaatgatgaaagtaatattttctatgtctgtcaagctacaacggaagaaatcaaagataattggtatcttgacagtggttgaagtgaccacatgacgaaaaatgaaagtatttttgtagtcttgataaattcaagactaaattcaaaattggtaataatgacttcatggaagcactggttaaatgcactattgccattgtcactaaaaaaggcaagagatacattaattatgtactcttggtacccaatatcgatcaaaacctacttagtgtaggtcaaatgattgaaaaggagcaccttttgcattttgaaggagcttcttgcacaatctttgataagtaagataaattctttcaaattaaaaaggtgaaaataagagaaaacagatgcttttctatataatggagatatgcaagcagtgtggcgatgcaagcacaaacagatgaatcatagctttggcatagaaagttctgtcacttcaacttccacgggctaaagatcctcaagtagaagaatatgatgcgagacctcccagcaattaaggagatcaacacagtctgtgaaggatgcatgctcgggaaacaacattgacaaattttcccatccagcaaaacatggagagcgtaaaagccactggagatggtccatacacgtctgcgggacaatgcacacttcatcaaatgaccaaaacatgtacttcattcttttcattgacgactttatgagaatgacatagatttattttatctaacaaaaatcgcatcttcgatattttcaaaaaaatttaaaccccatgtcgaaaaacaaaacgatcactagatcaagaaaattagaagtgatagaggcaaagaatacacttctaatgaattcaacaggttctgtgcagatgaagggatggagcaccaactcattgttggatacgcaccagaacaaaatagcatatctgagaggaagaacatgactgatatggaggcaaaataaggccatgctcctagagaagagactcccaaaaagattttgggcagaggcagcaagcacttacttgctcagcagatgtccaaccaaaattgtgcagaataagactcttattgaagcttggagttgacataagctatcatcaaatcatctcaaagtctctagttgcgtatgctacagctacattctaaaagaaaaaagatgcaagcttgatgagaaaattgaaaagggaattttcttaggctataatactcaatcaaaaggttatgattctatagcttagaaacaaacaaacaaacttataattagtcgagacataaatttgatgaagatgctacatacaattaggggacactagaagttgaaagaaagagactcaatattcctctactgtcaagtgaaaaaattgatcaaaatgaagtctaactcagccaaccgtaggtatggcaattatactcgcgggctcgcgtacccgcgggtaccctcccctaataggggtacgggggtcaagttttgggggcgggtttaagtattcatacccgaatcggggtcggggtgggggtattgatacccaccccaaaactgcctcgatatgactctaatatataacataaatttaaataataactgttgttattaatttacttcacgctggacaatttttattaattacatagaagttgactttttatgttttaagaaaatacatgtgtttactacttatttgaattaattttttttactactacccattaatgtacacattatttaattaaatatcttcactcatcatcattaccacctctcttacatgtctttttatattcactattcatccatccacatcataaatcacattcactcacaatttactattacacatacatgactcttcatattcactctccatcataaattacattcacatattacactaacataagtaatatatacataagagagactcacgaagagttattcactgatataaaaaaaataaaagcaaactgcaaaagtaaaaaaagaaaaaactcttcacttttatagtctttcttctttttgaggttttttttccaaaattatatttatgggtacccaatgaatagcctcctcccactgggtaatccttgctttgtctcccacttttgtttaaacgggtataaggtgaatttaggatacgggtatgggggtgggtgaacaattcccagcctcgccatgtctcgtttacgtccctatgggtatccgatgggaatctttcccccgtcgggtaatccccacctcgtcatcgctttaatttaaacgggtattagagtgtgtatgggggtgaatttagaaagcggttatgggggtgggggagcaatgcccgccctcgccctgtcccgtttacatcccttgccaaccgcagtggaaccgacataagccttagaatccccatctgactcactagttaggcaaacaagacctctagtagaaatttacgagacttgcaacttagtacttatggagccaaaaaactttaaagcaactcaacaacaagaaatatggatgaattaagagataaagatgattgagaaaaataaaacttgggattgtagatcgtccactagacaaagacactataggagtcaagtagatctccaagacaaagctgaacgtagatggctcaatacaaaagtacaaagcaagattaattgtcaaaggatactcgcagcaatacggagtcgactacaacaaaaaatttgctccaatttcccgcctcgacacaataagggctttaatttctctaaccacaaggaagaaattgaagatttttcaactcgatatgaagtcaacaaattttaatggttatcttgaagacaaaatctatgtggaacaacctcaagggttcatggtcttctcaaattgaaaatattttatatgacctaaagcaagctccgcgagcctggtacattagaattgactgctacttcactaaacaaaggttcaggaagagcaagaatgagtcgacacttttacatcaagactcaaggtacggaggaaacacttattgtctccttatatgttgatgatctcatctacataggcaatagtgagaagatgataaggaagtttaaagaagacatgatgaaaaatttcgagatcactgatctgggattaatgcactacttcctcggaatcaaaatgacaaaaaaaaattgggatcttcatctcacaaaagaagtatacagaagcactcgaagttcaaaatggaaggatgcaagactgtatcaactctattagacaacagtaaaacactcaagaaggaagatggctcaccgaaagctgatgaatcaaaattttcaagtctagtcggcagcttactctatctaactgctacaagaccaaacataatgtacacagttagtatcctatcaagattcatgcatgatccaagtcaagttcactatagggctgccaagcgaattctttgatacttgaaaggaacaaaattctacaaaattcttacaagtgactcaaaattagttggctacatagatagtgggcaggatccatagacgacatgaaaagtatgtcaagatcacgccttcacacttggatcaggaatactttcttggacatcaaagaaacatgcaacatttgaacaatcattagcggaaacagaatatattgtagtaacaatgactacaagccaagccatatggctgagaagaatacttgcagacatagaagaattacaagaagaagctacaaagatctattacgacagtaaatcagctatagcaatggtaaaatatccagtatttcacagcatgaccaagcatataagcatcaaatatcatttcatcagagaagttaaagcacacaaagaaattgagctcaagcactacaagaccgaaaaataattggtagatatttactaccaatgagcaactttgagctactacgagacatgatcagaattatcaaaatgtgtacgaaggaggagtattagaagttgctacacatttctacaatagtaattagtctagaaatttctacatatttataggaaaaataaacaagctagagaaacctataatatttagaagagtttagaagtaattaatcaagaaaaatctatagtaattgtgaattatatagaactagaacaatctagataaattattctagccacaaatgtagagagcatacaattataaatactccatcaagattccatattgtaaccaagcttggaaactaaaacaagttgcctactgtttcttaaaatactaagtactcttctattttttccatatacaactattttctaacttatctcaatcaactatcaagtataaactcatcaacaatataatagccaaaaaaaagtcaaaagctacaaacttacatacattctctcttctaagcaaaattatccttaactaaccatcactacactattttactattttacctcaatatcctctaaatacttaatactacattttcatttatcataaactaaaccgatacaaattattctcaaactatcaaagttacttcgatagattacacttacgtgactaatttgatatactaaaatctttcatgactcttttaataatacaatgtttgcatctaaaccatcaaatactctttataattttctttagttttattaccttatttgaatagtatatacataacattctatctcaaaattaattagttaattagttacgaatgaaataacttatactccaacaattagtataatactatcacacattttttgtgtggatactcttaacaccaagacaaagctcatttctctatattggtggatatataattgcataagtatcacaatatataattgcataagtatcacaatggttatccatttgaccgtcaatcgaatttatccttaatcagattgatgaatatttggaatcataaaaaattgtttacaaataatcaaaattaaaataaatagcattcttatgatgtgtttacattaatttagaatagaaataaatgattttaaattacaaaaataacactcattaaagttttacacatgtatatagaacttttatataaaaaaaaataatgataataataataattaaatgagagtgaaaatgacaaattataattttagaaaaaataagtgtggcaattacatgagtttgggccatagccactcccattcttcaaacccaaattagtgtggaactcacgtatttcattccaattccttaaaagaaattaagaaattaaacaaaattaatcaaattcattcttattcctattctctaatttcattagtaaacggacatgaaataaatgtttaaaaataacaattcaaagtgaaccactattgatacttctaacgtaatgcttcaactagaacgatgaaatagttttggctaatgcctgcttttgtagtgagaaggataagtagtatcttataaaggatgaagaaccagaagaaatgagcaatgtcaagtttttttttttattgtttagtaaagagattctatatgttaaactttgattatgatttttttaacatttttacctctaaaaaaactctctcagcccttcagtttcgaccctttgaattctcttaacctagttatatatggttttctcttggtcaaagcatcaccattcaccaacgaagcatatgtgttatggcggagctttggctgagaaccccctcctctgtagtttggtggcttactcacagtggtagataggcccctcatctttcgatcattattttcaattgatggcagcatgttatggcttctttggtggtttgtcaatatacaaatattgtgctcctctgtaatgtgtaatgtcgattgttcggtgcttgcttgacccttcgaattttgttttccatggagtttcaccgtttttttttaacattgacaatcttcgtagtggtcaatgtgatctctaactattgtgattctgttcgagttcttttttttaaaaaaaaaaacaaataattgttagtgttatggatttttttcagagaaaaaaaaaaaaaataaacctagtgtttttatcacctttgctaattgtccttggaggacttgcaccttcttctcaattttgacatgatttgtttccaccattcaaattatctttatggatagctcctgatttgtacatctaatttgacattgatagccaatttactatattgttttagataagaaaggcagtcattgatttattgtatctaagttctatgttcatgttgtgtgcttcgttaccatttatgtagatatctccttctgagatagtcttaagcatttcagaccctatttggacattgttctaatataaccattaaaaaaaattaataatttttattattttcaaacagggtatttgtcaccatgtacaagaagaaggaaagaacaagagagctcataatccctttacctctcttgtcttttcatctctctttcaaaaaaaaagtgtatctttctccctaaaaaatgtctccttcccatcaaaacatatcaagtttagtgtaattgaagtgtaataataagttattgatgatttatcaagtgatatacttacttgattgttataattttattttaccattaatatagttaaaatggaaatgttaaagaagaataattaggattgcagcaagtctgcataaccgacaaatctgatttatattttcaaatttatttatttattcttactcaaaataatttataataaaataatacattttaaaccgcatatgtatatataaaataaaatcgacacattatttatttgaattttatttttgacactataaattactttaaattgctcaaaaatttgtaagatgtgttaatacttacgatgtcttaattaagcgaagactgaaaagataaaagatgtatcgatacatctactattgagggatgcattctaagttttcctacttttatgatattctaaaaacatataaagtgtttttacagtgtccttaaaaatgtatatatatatatatgtatatatatacctttcaaatttttaaaaaatttatattttacaaaatagaatccaaaattcataaatacactctagaattccacacataatttttttttatggaaacttgctcaaagaagagataatgatattatagttagatttatttttagaggattgctaaaaagcactattggtgcttagccttctcctcagtgtcatactgttattggtctaattaagtaccaagtctcatataacttaaataaataacttttaagaaatatcgttgaccaattgtggaacaccacttattaaaagtgttgagcaccactggtgtccaatagcaatatgtgaaaaaaaaaaaaaaaaaaattcatagatctacataaaattaaagagaaaaaaaaattgctaactattatctttttcttcttctttcctctcttattcacttaaatattagatataaatattgtaaaataaaataacattttacatgatgtgcatagtaacccctataaactaatactataaccataattttttatttttatttttatttttgcaaaaatcattcaaaatagtaagacaccttgaaaaaaaaaatcttgtaaaataatattacaatatacataatgtataccatatattacagacaaaaaaataatttcttaaattaaactatttcttttggtatccctttctttctagtgttgtcatagagtcttaggtggtattatacaccattagtatccttcaacaattctttgttagatagcattagtgccctatagcaattctaaatggtagtctatctattttgatttgtttcttttctaactttagtatgacacctcaagtattgttggatagcattgttgatatgttctctgaagagggtaggtatggatttgctttcgttgctcaagactcatggtccgttgactgaagcacacaactagtgtaaaccttgtagtgtacgggtagaactagctgaggtgttaggggtaaaggaagctttgagctggttgaaggattttcgaggaaagaatgccatagttgaaacgaattgtcaatttgttgttaaagttattcatagctcaaccattatatcttcttcttatggtttgatcatttagtgtcgtgttttactttcttcattagagaatatttctctttgttttgttaggcggtcaacaaacattgttgctcattggtttgcttgagcatcatgttctattcctaaccgtattattaaagtggataattgtccccttgagttgtctcgcttttgattgttctgaataataaaagttacaatcttttcttttcttaaataacaaaaccattagaaaacacaaaaatcattaaaaagcttttaaaagtaggtcttggtctctaaaaaagcattgatcatgatgccaaacatgcttaccacttttaagtgaagatcactactagttagccacattatcacttttgattgagtagtaatatttccagtgcctaataccatgcagttaaatgtgattggtttaatttccaactagaatattggaactagatattaaattgcatcaatgatggtttggcattcaatctcaaagtgaagatcacgaagtttaggtttagcggagcacaattgcagtttgtgtcatggatctggccttgggctggtggagtcgtgtaggttgtctgtggttgtgggtaggggtgggtgatttggcattgtgggtttacatccaggaacaatcgatgattttttttttttagtttttataatggtgtaacatcaccgccttgctattattttgatagtagggttagttttgtttatggtgataatagtcttgtttctcattgggtcactagcttagtaggtggcatgactattcttctaggtgttgggcaattctcatatttttattaaccagatactttgtggttatattcttcatcagaattgctataagcatggttagttttgctatttctatttattttaagttgaataatggagttgcattaccgaatttttattggaagatcttcagctgatagtcattgataggtgtaatttgtcatatattcattcatgttaaaggctaacattctttgcactcctttaatgcttcactgttgtcagcttatcagtcttttaattgaatgtggtgttcaggttttctttgttaatgacgtggttagcatatttttgttaattatgctcttgagtgatatcactatgttcaatttaccttttgacagaaatcctcatttttctattttatcttagtgtaaatgcaatatttctggttactcaaagttttattttttccttaaggtgaagaacaaatcaattgtgttgactgtcgatcatttcaaataaaataggattttcttgctaagaaatgctaaagggcacccaaggtgtctagtacccttgtgatgtgtaatactgttattggtgcaaatcaatatattaggtcccacatattttgctttaataaatattatagagaaccgctaaccaattataaggtaccacctcatagtggtgctagatatcttgatgcctcaagtaatatgacagtaactttactacctaaacttaatccaattgacctctatcaaaaaatcaatcctacaatgttcctctcctaatcttaataaatcgaagagttgttgtacatggaatgttgagctcttgagcatgttgaatgtttagtctaattaacgggttcaaaagctcttagccataccaaaaattttggtcgggagtagtaacacgccaaggtaccaaactaatctcgaagcaaatactttaaaactataccaattcgctatgtaactttggatatccttctcattatcgaactcatgaaaggcattttgtaatttccccccacaaccaaattccgtatgacaaaaagtgcaaacttcaagttgatatctagactactcttatatggcagaaggtccaattttgcacaagaagagagtttgtttgaatatctttcttaaatctatgtagaaagtgggaaaagcttttatgacagtcaaagtcccatgattcgtaaatggaaaaattgggtaagttatgcaattttacatcgtctgagaaatgtcaagtgtaataattctaagactgtgtaaatataggactacacaattgaaaatagcttaaatggattgatgtgtactacttatgccaacaacatacatcttttcaatagtccttcacttaagaacttcaaaattaagtgtgtttgacctagattactcttagaataagtagcctcctaggaagttttcctaaaaagcgtacaagtgaggacaaaagttgttttccagagaattattattctaggaaacaaccaaagtgatgtacccgtgtatactatgtaaaggatctatacaagtgaagcgagagcattacaatttttgctttaagtttagctctagctgtggaagttctgtttttttaggtttttcctactttaatttgtaatttttgttttatgctttttcttattatttcggtttccccaagttgtctttaaaaaggaaaagaagatatcttgactattcttggtgtgtaattgattatcttccaactccattctttctccctatgtcgaagaaccaactctgtaaatgggccattttttttaacaatgcccatgcagagttactaaaccctatccaacacgtcaatctcatccatagcaacacccattgttgctagaatcttgatccccttcgagatcaacaaagttgcaagtgaaacaagtgtgaccaacatgttatcctctttcgaataaaatggaccacaaagcactaactcgttaatgaggacacaagtcctgggaaaataggggttccacttgctgatctcaaaattggaggtgtggatatgaaaatctcgccccaaacacttagacccacgtttccttaggttcattaggctggcttttgaaccatgcaatatcaatcaggcctctcgtgttgattcgttagtgtagcttgatcattgaaccttgccccaaacatttagtacgtgagtctttagttgccatctagctatagaaggtagttctaatttttgcaaagaactcgatctcactgtcattgagtttgtggttgccatattcatgggattgtgcgccactttttctttagccttgactaaagatggaaaaggatgtctctgttgtatattcttgaacttctttaagtcacttgatgagccttatattcagtttgtttacaaaagaaggaaagtcaacaaaggccaagtataagttagtcttggaaagttttacttttcattgtatagttgtcttaattgttttgagacaggtgttcagtggttattagaatttaattaggttgttgatgtggcaagttctatgctctataaatagagtaagagaactcggcagtaggtatgttttgagagaataaaattgtcttgagaggtcataggagagaaaaaatctcccaaacagatttattgtataattcttaaagattcaataaaagttttctagtgggatttcatttttcttgtgtgtttcgaccgtataccaatttattcaagtgtcttgttgttcgtctccattttgtctactgctatgatagtctcctgctctgcagccattctcgttgtcatttacttggcaaccatggctctggtacggtttatctctaacctttcagagagtgaggaaaccatttgatgggccttaatcaaaacaacatatggcaatctatgatcttgaataatcgagccattatcatttctcattaggattgcaccttgaactttgtttgagtgattaaacctttagcgaaagcaaaacgaatgatgttggcttacaatgtggctcattctctatctttgttaattctgtcataaagtaccagccctcagcagtggtttcttcccatcaataggatacctagcactcttgtcccttctcgttattctagggtaggtatatttaatcaaaggcctatcaatccttccctcaaaactgattaacaatcatctttctattcatgttttcctagagaactaccacctctagttgttgtactacatcttattctaaccgttttctattttacctaattgtggatgtcaatcaatagcttgatctagcatatctaagagcataactatgaatcccgaaacccaatatactcaaccatttagctagaagcaacaaaggctagcttagaggaatggattaaaagtagaggtccaatattttgaccaagaacctccctgttgttttctttctggtgtggcaagtatgctgaccatataaaataataagcatagttttgcaactttccctcctttaatcttggtttccaagttaaaattgttgtttacttgccaattgccttaaacattgttttgccctggtatgagcaaggcagctgcagaactaaatcaccctgcattttatactttgttagtaatgtatgtcaatttcaaataggctaatattacactaaagtagtcagattgttctattcctaataagcctagcatttgaattgtttgtaataacatctagctggggtcagaaaggaaaatttaaatagatgtaccaataataatgtgcaactacttgtttacaaattgtatatattctataaccattcagagattggtagaacgaatgaacttacaaattttgtcgtacaaacgaaagcatacctgtattctttgtttcaatcgttatgcattctttgaaaactttgaaaccttgcagagaaacaaactgaaatacacccaatatgtacatgctatacaattcaactcatctgagaaatactaagtagaaaaggctcaaataaataaaataccctttagctaagttgtacaaagattgctgaaatttaccataatttcattcccaaattctcaaacggataatagtacttatctggtgaaatttccttcttctttgacagcatgaaaacaataattgaccgatacaacaaagcgaaagaggatcatcatcaaccagggaacccaacatctgaagtgaaggtatcatccagttcttgtcatttttgttttggcttttttcttctaagcatgtttgagaagttagtgaaatgcttatcgattatttgttacataacaacttggtatacaagggatcaacatactgaaatccatgttcatttttgtagttaaatagcaatctagcaataccttaaatttcaagtacaagattattagctcttatttcacttttcatacaaaaggaatgcaatactttaaacttcaaaaacctatctcttatttctagtgtaacatttatgaaaaattccacttccaaggagtcattgcatttctctcgaaggcaaggaagatacaaaaatgtctgcagaagaacaggatgccaaacaaaattgagctttctattaagctattagatacagtagaacaacgatataagggtttcccattctctctcaaaattaagccttcgtttacaaatgcaattgaaactgcttaactatacagatcaccacttaataatttcctcatattacctgtttgcatctagtcaagacagattgcagccttgctttgtgttaaacgtaaataatgagaattgctaaaggacaacatcacattaacggtgttataccgttattagtacaatttaatatcagattttacatgttttaattttaaaaattaatgtaaaaaaactgctaaccactataaagcgctacctcatatggtgtcgggcaacttaagttgcctagcaatactcattaataatacatggtgggtgtatttctccaagtccaatagttgggtcttgctctgtgtcagacctaaatagtttcttcttgtttcatttgttttattatagaataaattaccaaaaactttcatttgataaaaaagtctatgctataaaaatgctagccaaatttcaaagaggttgatggcaaattagctctaattagagactacataaaacaaagagttaatcatgtgcactttagcaaactaacagcatggacaagtccttgacatttagctgctacaggtcatgttgcattgaaaaatgtgataaagattccatattgcctaccaacattataatctgctggactcctataattcaaatgctaaacattatatagcacattgtaagccatgacatgtctaatttagaagtcgaacgcagaataaaaaatgatgaataaagattcattttctcatagagaatatgacttctgcttaatatagaaaagatccaacaaaagtctctagtagctaaagaaaagaaaaaataaataacaaaacaggacaaatatattgagttccaatccgccaagaatcctaatcttctattagatattttgataatgtgattgcacctctaaagttgatttcaggggtcaaattcttactattgctaaagataatgaatttgacattgcaccgacagtaaatatttacatgaacagataaaacactttcattttgattaatattttcatgatggcatttcacattcaactagtaacaacttaaagggaaagtattgttctcaaaataagttgtttgtttatttttacaataccaatatgtattgcttattcttgtgataatattcatcaataatgtgtgttttgaatagttttggcaaagggaagcagcaatgttaaggcaacaattacaaagcttgcaagaaaatcaccggtatgtatagtcaattcattttaacatgagctatcgttcaagaaataaggatattagagaaaatacagcaaggagatgaaagactaaccattcgagactcgagagtttgaattatcttgttgccctactagctagttacaagctcaaatgaatcaaatttatcaattactggggctagctcagacactaccctaaaaatgttgctacactgtccttcacaaacaacaacacagctaatagattataactgtactaatttaaatttttaagaaggattgtcaacataaaaaataactttttagttacgtcctgacataattctttcaatcacttcagccctatcatgtgaaaattaaaatatagattagtcatctatgactacatattcattatctcaaagaacatgtatccagccacagatgtccaagattggctataaaaggttatgataaaatagtggtaaatcaagaaaacatttgttttatcttcaaaattaggtggattttatagtagttcttcacatattgataccaaacaccaataaggaaatccatgattgaggagctatttatttcaaacaaaaggctgtgatttcaattgttaaatatttgttcgtatgtttaaattgaatatcaaggatctatgtgtcctctacatgtagttccttgtaagataaagaaaaagaaaatcaaaactttctagttgctgaaatttcaatttaatgagattagatttgataaacttatacaatgtaatgatgaagagtcatcacagagtgaacaagcaacactcagaattaacagaagctatcactaagttcaatacaaaaggtaaccgattactctccaactcaacaatgaggcaggtatagttatttgttgagaattgtaaacgagagaaagaatgaattgaacatgcatttctcattactgattcaagagagttgaagctctttaaatacaagactaagctagtaagttaggactgacgcataacaaaatagttgataaatacagccatgtacaatctgttaataactgacagcttgcctaacattattacatcaatgccattagtgttacaaccaccacagtcccaataggctagccctgtgagaggaggatgcccaactgattatagaacattaactacacccatatgtagttgatgtgggattctaacaattacacataggcaacagtttaccagataaagatgataagcactattaactacaaacccagaaagagcaatagaatagaaataatgcacgtaacttgtaattttctttttttttttctttttttttttgacatagagattaaaatcacttcagaatttacgatgctcacatccgcaatcagcgcaggtaacttgtaatattgaaggtttagaaattagagacaatagtcgtggcatggagtgctattttctataagttatcgagagaattgggtagaaagttagaagtcagccaactttttgatgatagaacaatgatttggtgcaaagatgagaaggaaaaagaggagctgattggaattcattagttaaatgtactgggggccaacacagtagtgtctttcatccattggagctgggaagagcagagaaaaaatgtgaaggttgattgcagaggctcttggattagaagaaaaggtttaactttgaacctttggaacatgaaaatgttcaggaagataggagccttatgtggagggctgctcgacgtggataaagacactgccgaatctaatattttgtctcatttaagactttagttgatgagtgatgagtatggttttgtccctgaatctatagctttacatcatgaagatattgtgtttgagcttagcctgttcaaacttaatgatgttagttatagatttcatggatatttcaatatttgttggttccaggacagtgagtacgccaaaaaaaaatggctatggaagatgaagcagtcactgttaatgttatgggaaaagacgcaaaagaggaggagaatgggggagtgaacaatgggcctattgacgatgcttttccattacatcaaagtctcaggcgatggaggccatactgtcggtcgacgtgactatgattgttgaactcggcaagggcaagatgtggaaatcaagaatggtggtggaaggcaattaatggctcttgatgacaactaaagtcctgaggatgatagctgccacaccattattgaaacgcacgaggttgttattaccaaaataacagtgtgagaagcgagggagtcggttggccttcagcaagtttttaatcgtcttttgcaaaacatgaatgtgataagccaccaattcgttatacctatgctagaagatctcacactaattgagatgagttatttaggaaagttgatgatttgttttgccttatgatttaattggaattatttgtttctgtttttgtgattagctttgtttggaaagtttaaagaattaaaatagaggagaatgtgaggagggtcaaacctttaatttgtaatagagcagtagttcttggagagaaacaaggtctctcgaatatcttgggcaatttcttattttcaatactctttgtttctctatgtacattcttcttatattttccttgcatctttttggtttggttcgatacacttctggtgcgtatcatttagtatcagagcaccgaccgggaccgggtatgactcgaatggaagttgtagaaggtttagtagttgcggtacaaaaagatctgggaacaatgaaggaagaaataaaaaaattacctctgctggaaaatggaatcactaccctggtacagcggttagatgattttctacagagccaggaggagcggcacaaggcgcccatagaggaggagcaggaccaggcgtcggcaactggaaaaaaaatggcagctgatggtggcgcccgacttatggcacctggtcgtccgttcatgattaagggagtgtccgtgtatgttgagggaagtcgtggaaacaatagtgggactcgcaacaaccaggtaacccacgatgggatattaggcctcgctggattgaactttctacgttcgacagcaacaacccagacgaatggctattgaaagctgaacgatatttttccattcatcgtatgacaaatcaagagtgtttgaaaactgctgtaaatagcttggagggagaggctttgatttggtttcaatgggaacatcgtcgacgaccatttttcaattgggaggacttgaagatgcaaatgattcagaggtttcaacctctgctcgttgaatcaatgtatcgaaaattccttgccctcaaacaagaagctaccgtacgtgaatattgtaagaggtttgagttgattgcctcttctttagaaggaatttcagaacaaatattagaatcttcttttattaatgggctgaattcaaaaataaggtatgaagtaaccgtaatggccccaaatgggctggaacatgttatggaattagcccaaaaggtggaattaaagttgttggcccaacaaaagcaaaaatctgttatacaaagctctgtttcacgattccagggagggctgactagaagtggtgaaagtagcttcgttccaagttcaacaaatttcaaagatgaaggtcagccagctaggaatggattttgacagcccacggagactgaaattcagcataagaaggctcggggattatgtttcaaatgtgatgaaaagttttcccctggtcatcggtgcaaaaaaactgaactctaggtcattattgttcaagaattcaatgaataaagagaatgaaacatagatgacttggacgaggttgttgaagaagaagacaccaaactggaaaatcaagtcgtagaggtttcccttaattctgttattggtttgacatcccaaaaactttaaaattacagggacacgttagttctcagtcggtggtggttctcattgatagtgggacgactcataattttatctcgaatgttctaatacgaactttgcagctgcctatcacagccacaactccctacggtgttgtattgggtgcgggacaatcaactgagactcgaggcatatgtaagggggacaatcaacatagactcgatgcatatgtaaggggtgtcactccctaaagtgttgtatttgggcaatactaatataattttgggtatacagtggttggaaactatgggtgtgactcacataaactggaagactcactctatgaaattcatggtgggaaacacagcagtaagtttacagggagacccaactttacataggactcttgtgtccttaaaagctatgatgcaaacaattaaacgagagagtcatggattaattattgaacttggggctgcctccattgagaacgggaatgatgaaatacctaatgaaattaaagaagttttgagtgaggccaaaaaaatctttgaaatgccaaccggactttcaccacttcggggccacaagcattctatcttcttacaagaaggtacatcgccaataagtgtccgtccataccggtatgcacaagcctaaaaggatgtcattgaacaattagtgaaggagatgttagctaccggcattgttcaaccgagcgtcagcccgttctctagtccggtgttgttagttcgcaaaaaggatgggagctggcggttttgtgtggactaccgtgaattgaaccgtgagacagtgccagagaagtttccaattcctgttattgatgagctattggatgaactccatggagccactatcttttcgaagctcgatttgaaatcgggatatcaccaaattagagtgaaaccttccaatgtgcctaagacggcttttcgaactcatgatggacattatgagtttctactaatgacatttggtcttactaatgcctagacaaccttccagtcattgatgaatgaggtatttcatccccatctccgtcaatttgtcttagtatttttttatgacattttggtgtataataacagcttaagcgatcgggtgcaacacctttccaaagttcaactcttgtccaaacacaagctttacgctaatctcaaaaaatgttcatttgctcgtcaaaaattgaattatgttagagtggcctgaacccaagaacatcagggagttacgaggtttcttggcttaacaggttgttaccgcaaatttgttaaagggtatagtgaaatggcatggccattgacagagcaattgaagaaggacaaatttggatggaatgatgctgcaactatcgcttttatagcacttaagcaagctatgaccatggtgcctatattggctctgcccgattttgaccaaccctttgtagtggaaactaatgcgttaggatatggcgtcggggatgttttgatgcaaaactagcggcccgtgtcttattacagtcaagttttgggacagcaagcaaggttgaagcctatttatgaaaaggaattgatggcatatttgcaatccaaaaatggaggccatatttgttgggaagaaagtttgtagtgcggactgatcagcaaagtttaaagttcctactcgaataatgtattgttgccctagaataccaatgttggatggttaagctcatggggtacaatttgagatttagtacaagccagggacggaaaaccgagtttccgatgctttatcacgagttcaccaaccactgaatttaaaaatctacttgtttctcaaggtattgactgggtagcagtgcaacatgaagtgcaacaggatccatttttgaccagaatggttgctgatttacacaggagaggtcgagggcaactgggtcttctttggacatgggaaattaatgtaagattcctactattttgcgagaataccacaattctcatttgggtggacattcaggtgagaataaaacattttataagattgcttctaatttttattgggtgggaatgagaaaagtggtggatgataaggtacgagaatgtgaagtgtgccagaaacataagactatgaatacttctcccgcaggttcgttgcagcctatagcattaccctcgctggtttgggatgaatttgactggatttcatagaagggttgccccattcgcatggcatggacactacaatggtggcggtggatagattgagtaaatacactcatttcataccactgaagcattcttttactgcccgtagtgttgctgaagtgtttttaaaagaggtggtccgacttctcggcattcctagttcaataatttcaaacagggacaaggttttcatgaatcacttttggcaagagctctttaagttgcaaggtacgaaacttcgacatagcactgcatatcatccccaaactgatgggtaaacagaagttgtgaattgttgtttggagacttacgctgttatgcgtcagatcagccacgagcttagatgtgttggctagcttgggctgagtattggtatccaagcacactctatttaaactattatatgggcgtgatcctcccgcgcttctttgttaccgaaagaatgcgactccagtgtcttcgatggatgaaatgttagaagagcgacatgcgcagctagatgaccttaaaatgcacttgcttcgagctcaacagaaaatgaaggatgtggcagataaaacgagaaaggctgaacaatttgcagttggtgaaaaggtgtttgccaagctcaaaccttatcgtcagaaatccttggcttctcgacgcaatgagaaactgtcacctcatttttatggaccatttgatgttttggcacgaataggggctgttgcctatagcttgctaccagccacttcctcggtgcatcccgtgttccatgtttcacaattgcagcgtgctcatggggtgactcattcttcttcattactgccaccacaactcagtcctgatttggagatgatagttgagccagctgaagtttttggtgtacggaacactcaatctgatggaatgggggaaatggaggtcttaatcttatggaaggacctgccaatgtttgaagctacttaggaaaactacaacaaattgctacagcaattccctcaattccaccttgaggataaggtgaaagtttgggcagcgggtaatgataagcctccaatttgttatacctatgctagaagatcttgcactaattgagatgagttattcagggaagtttatgattttttttgccttatgatttaattggaattatttgtttctgtttttgtgattagcttagagaagagaatgtgaggagggtcaggctttcgattcgtaatagagcagtagctctaggagagaaaccgggtctctcaaatatcctgggcaatttcttattttcaataaatactctatttctctatatacatttttcttatattttccttgcatctttttggtttggttcgatacacttctggtgtgtatcagaatggaccacaattgtttaaaaatcacaggactaggttttctctcaatattaatggcacatgtaattatatggaaaaaggagatgttatttctttggccctagacatattatgggtcgatgtcctgatggatttattaataccaagaaaaactcaatgagaaggtcgggattgggtcaaaccgatttgggccgaaattaatatatacacaatgggccttacagtattattttggcccaaaagagtaaaagtttaagacttggctttaagcccatgattgcggtggaattggggttgtcggcaagtgaaaaaggttaggaagagtccagattggtaggaggccttttaaggcattgagaagagaagttatgggccctattaataacaagctggccttggtggaaaaaaagaatccagtctaaataattcacgattttcttgatcgctgcctaagaaggattcgacctaagaaacgtgcaaattttagggatgcagccatcaattttcgggcagagtttgaagaactgatacaagaaataggatcatcagttctgcataattcagagaagatagaaccaaaagagttttttgaaaacgaacaattgaaagtctacccaaggaaaaggaagttaatatgcccaaaccgagaggaaactatcatgaaaaccttcagggattttcaatttgatgaattggaagaagatgaagatcctcgagaggaggaaatcggtgaatactttcccaaaaatgatggttcaaatgcagaatgtgacgactactctgaagggattggtgaaacatatgttgacatattaggcgatatcaaagaattgtggatcgagaaagacactatgatggctggagggacgtgtagcattggtggggatttaagtaggggtgatcatgaattggtttcgtctggactttcataatttttgaaccaaactagtataatggttttttaaatattggaaaccaaaccagactaataaatttctcaaaccaaaccattaagaacggtgtggtttgattcgaaaccatagtttaaatggaatttataattattcatattttttaagtaattgtattatttttactaagtttttaattttatttttcaaaatatatatttaacatgttaagtaataaatctataacatataaataactatataaaaacattctcaaaagtcaaacataacataaaaatctaaaattcatgcaataaaaaacttgacacacaaaaaaattcaaaattatgcatatagtcatatataagatatatataaatcaattatttattataaacagtccaatccgttttaaccattaactatttattacgaactgcaaccgaaccattatgcagtaaacggtctggattaaccagaccaccaataacagttttcccagttacgatctacagtagatcagattgtcgtggtctggatttaaaccgcaattttccagtttcgatgaacagccctagattcaagtgtaaaggaaccctcattatcctcatggccgaaggtatttgattccatggccgcgatggggatggaattaattattaaagaggaagtaatggctagaagtgaggcgaaagagctagcaaagagctagtagctaaaagaaaatgtaaggagttgaaaaaattgacttctaacattaactatgataaaagtctcaaaaaatcaaagttggacaaaaaattccaatgaaatttctcacctggaatataagaggtagtagggacaaggagaagagaagggctattatggcaaacaatgtataagttcaatccgaatatagcaattctacaagaagttaaaaaggaagtggtacgtaaaaaatttattggaagcatttggaaatctcagtttaaagcatggattctttttccatctatcgagaagtcaggggcacactgatgatttgggatactagaagcatcacagtgtttgattcaatggtggggaattctctatttcacttttgattcaagcaaaaggaaaagaacctccacggttttcaggtatttatgggccatgctcttataaagcaagacttgatttaagagatgagctttagatggtctcagttcattgtgtggagagtcatgatgaaacgagagtgattttaatgtggttagaagtgtccaagaaaaattgaatagcatttcatgcactacgagtatgaagatttttgatgaactagtgcgggaattacgattaattggtcccgaactgaataatggtgatttaattggtcaaattttagagtgaaacccatttttagtagattggatagattcttgttcgccaacaagtggaacataatctatcattatgttagacaagagatggtcgtgagattggtgtccgatcatagtttaataatacttgactcaaacccaccaaaatgtgaagttcctagtctactcgggttgcaacagcgtatggaacatgtgaatttggcacaggtgttagttaatagtagaggttggaagccagaatatggaggttctttctcatgtaaatctgcttttcaatggtttacttcaaaaggtaatgtaccagctaaagttaaggtatttgcctagttggtggctttgagaaaagcaaatgtgcatgcaattatgcaaaagagaagaccatatatggccttgtctcctgacaggtgtgtttgctgcaagtctagtagtgaaaccatagaacatttgttcttagaatgtacttacactgaaaaaatccggtcttcgttctacaaagaattcaagatggtttgggtgatgccttagttagtgtctcaagtgttgttgaataagtcgttaggtggcaaaaggagagtaaagttgttgaggactgcactattggtcattttgtgtgatgtttggaatgagagaaatagcagaatcttcgaaggaattaagaaatcaacggagaatgtttgggagggagtcagattttggacagtgacatgggtctttagaacgaaacattttgagaatatttccttcctagacttgtgtagggagtggagtctggtgatgtaaaaagacctgatgatttgttctgttttgttttgtgattttactttctgctattttgtactaaacttttgtttaacaaggtattcctccgccacaagtgaggttcttaatacataatggggaggggctagtataagagaagcagtctctttctctttttcaaaaaaaaaaaattaagaacacccagttatacaatactcagcataatccttaaacatccccggtgctcatagtaaaatcccaatctactgtcatactagctatgcaaaattgttaggaaactggcccagctttctagctaggatactcacacctgacacattcatattcctaaggcaagaataagtgatccaaataggaggactaccataagagtaccctacaatttaaacaatgctttcatgataccgaaaattcaaatgttgttgcggaataggaaacatgacaacataatataaaaggggcacttgtgtgaagtgaggagtccagagttgatcatcctagacaatggctctataaagtaaatggtgagaatgttgtatcgactaggtagtaattataactacttgaatgacattttgacctcgtaggtgatttatgtcgctcactttgtgagattggtcccactagaaggtactaactctaatacctttgctaaaaccaaggttgacaatattgatatctaatgaaatatcaatattctgattttatagagaaatcttttatatcaagtctaaacacaaaaaaaaatctttgttgactctaagttgaatatgctgatattttctaattacattattacaataataatataatataaaaggaaatgtttatttattatttatgagaattatcacaaatatttgtccttctctttagtctttatcaattattgaaatcccacttatatgtttatcaccatattatcaatagtttaatccttgattaaacacataagaacttactcctagaatcaaagcaacggttttgtgataccaaaatcttcaagttggtcacaaaacacacaacacaaaaataacaacatcgagtaatggtaagtacactgaaaatatgcacccaaacattacatacattgagtcccgatttaaataaacgttttaaaaactatcatgtcactgtgtgcaatgtttaagtgcaatgtgcacatatcattactcaacaacataatatgcaagttaccaatgaatgaatattctgagcaataaaagtcaaactactttagcatcatagaacaaaatgagggtttctacaaaaacttgaattctaatatgtaagtcagatcctagctaacattccaatatgattaaaaacaggcaaatgatgggtgaagaactctctggattgaatgtgaaggaattacagaatctagaaaatcaactggaaatgagtctacgtggtgttcgtatgaagaaagtatgaagttctaataccaagcaattgcatactatctaaatgctaatacttctacaatgcatgccaatggtacttacatgtttgttggttcaataaaaacttttgtaggaccaaattttgatgcatgaaatacaagagctgaacaaaaaggtcaatcccaaaacaaggattactgatttttaaactaaatagcttatttaacctcatctctttatattaaaaaactgaattttcatcttgctatgcaggggaacctcattcaccaagaaaacattgatctatataagaaggtaaacctaattcgccaagaaaacatggaattgtatgagaaggtattcatttaaacaattaagacaaacattaattgtgaaaacataaaaatctctctaagattcttaaataaagtagtgagatgttttatagcaaccctcagtggaaacatttcacctactaggtctatggaacgagggatgtcaatgaagcaaatagaattcctctactgacagaagatttggggatgagagaggaatcacacggtctaggtatggaacaagggatgtcaatgaagcaaattgatctccagcttagccagccgcaacaacaaaactatgaaccaccagcaagaactacgaaattggggtatgattcctccataaaactatacaatgaatcatgattagcaatacttgtatcccaaacttactcctggatgttgcagcagattacaactgcattaacactggcagaaaatcatcagctggtgtaaggtggcttactaaatttctatcaacaagactatagttacaagattatgcttctactgcatgaggtgatacaagagaacagaccaatcgattaaaagactttggtttgaaacaagcaacaatgtaacaggtctgttgtgatcttgtgactaaagacaccagccacttatgtaaaggtaaaagttagacataacagaataattaaagttgcactaaatgtgcatttgaattcttcatgtgattgaacattttaataatcgtttcatctttcattatccttgagaatggagaactagcttgagctttcaaaaaatatatacatattgataagtatagcttaagggttgctaaatgcattcttatggaaacatactcttgtaaccagatgtataaatatagcagctattatttgagaaaattaattgagggaaaacgaaacaatgctaattgataacaaattgaaacatgtaagcatataaactaatgaattttagtttagataaagttgattgggttcatgaagtatgtatgtaccttgtttattctggcccttaagtagcatacacaacctgtgaaactgatttcattgcatagagattatctgtattggacaacattggcattatgttcggatgaaatacatcatagacacagtaaataaacaagcataaacaaaatttagacaaacagaatatatgacttcaaactttttaaatcatttcctagcagaaactaaaaaactacattgcttttgtgctaaatagcataaattttaccacgagcatagctaataaaatattccatatatctatcatttaatacaacagtgtcattattgcaaagtagtccaagccatgggggaacaaattataattaccaaagagaactacaaagtccaagctaacccaggtatacactaaacggacatgctagcaatcagttttgttggtagctttatttgtatcacagaaggaaatatgtacagaaacctaatttaaagattgaagcttcaattaccagcaaaagctaaggcaaagatatcttcaaaataaatgagagcagaaacaagaattgaacaaaggtattaaacttcacatttcccattctctagaacagagagtcttaagaaagattgaaagataggaaatttacttttccagcttgggtttccaaagaggaagaagacaacaccatgctgcaatttaagattgggttttacttaaaacagaactggcatgaataaatcaggacaagtgtgactaagaaacttcataaatctacacatagagttactaataataactaattttcatatataaaaaacatgagaataataagattatgagcctgaggataaattacaaatccctgcccaggcaaaatcgcaaagatgggtacttgttaccaaaatagagcttacaattcaagaaggttggtcaaatcacattctagcatcatcaagaaggttggtcaaatcccatcctagcatcatcattgctcagtcttaactttcacattgctttcttttaccattatttttgtcaacattgggatgactaattctcagatatttgttatttaagaaatgttccacacaatcagtaagcccaaataactatacatccctctacagtctacacccaagtcttgattaaatttcaatgacttatacaaaaaggtaacttttttttcttttttgaaacaatactgccttgtattaatttaaaagaaaaatataaggatgtggaaaaaccacaggtatcaccagcttaaaaaaggcaatataaaaaaacagtgacaacaaaacaagggatgatgtgtactgtccacatacgctgccttgtttttcaaaaatcctctttttcctttccaaccataagccccatttaagagctgatgcagcagtgacccagagaatttgccattccttgcttcctctaacataaaacatcaacaacttctgacaatcagcaggagttcccattgaatcttaagctcatatcatttgccttttcaaagtcaacttttgactaggcaaatactttaaacaaattctttttaacacctcctagttatccttatagacaaccaacgtagaaccatcaggttctgaagccttatctccagtgcactcaaaaatggcttcttctagtctcttccacaataaaaggtctttttagccactctagtgcaatattaggatattatgcttcattctaacccttcaaagcccacaaaattcgtttgagtcgatttgtataagaatttataaaagctaactgcctcattttctatttcatttgccaaatctaaaatggtccatcattttctcaatttaggaaataaaatttgttgcccttctaagagccttgaattgtcatcaccatccttggctcatagtaactcaggctatatctaacagctcgatcctctaaattattattattattttttttgcgaatttttggcctagactactcgacgaggagacctcccagtggcccaaggtttccgagtctatgggaatttaagcttgttaggatcccatatattgatcatggggttagtagtatataactacttgggtaccctcctctcttagacttttgggagtaagttctacccaagtggttgtatcaagtgttatcggagtcatgaccctcaaattggaccgacattgcaaaagaggacatatggaagggccaacctgtggattaagcctagaatgggccaacgcagagtaggtcattgtagagtgtgccgtcatagatgtcaactctaaagggaggtgtactgttaggttcctacattgattgaccaagtatgggattggttagtagtatataattacttggccctcctctcttaggctagcttttaggagtaagttctacctaagtgattgcatcagagccttaaaccaatgcctaacaacactttccaatgttcctcctgattcataccacacctttggcaatagtatcaatcatcacttgaagatgatcggagatagccctaacctgcaaagattacctaacaaatgaaacctcccttctcactattgagtaatcaagaatctatccagcctactacatgttggaaactctcaaattttaccatgtacattggtcatggtttaatctagtcttttagaggaagttcctaaattaattttaccatgtacattggtcgtggtttaatctagtcttttagaggaagttccttgattagatcatggaataatctcatactccttgtgttttttccactactaaattttttatgtgttccttacaacatcaaaatctccacccatgcaccatttctatggacgcaccaacaatccttaaatagatctcaccaacgacagctgacaagaccacaaaaagaaacaccattttcatcatcttcttcctacaacaggattgacattaaggctatgtttggtaggaaggagggagagttggatggatggagagttgatgaaggatggagaatataaaggagggagaggagagtaataatccttttatat

SEQ ID NO: 14669 - DNA, 2661 bp, Cannabis sativa
gaatgactatgccataactaaatactgttcaatcacagaaaataaccgcatcaacaatatggcgtaccaaacaatcatttatggttgaaatatattaatgatgataatgaatctgagaaaaatacaccttgaacaactctctcaaattacaaagaaacctctgagtcttgagatcaacacactcaagctcaatttaaaaccctccaattctaagaaattacaatctaataagaatgaaaaggaaatgagatatttatacttgggtacagaactaactaacaagcaaaatattaaaaacagaaacttaactaattgctaactaaaagctgatttgtccattccaagatgcagaaccaatgaagctctgcaaccccatcaaatagtagtgatcaagtgactcgaaccacaaattaataaaaagacaaaacaaaaaacttgatagtaattttcaaacagacacaaatgcaaggaattctttgtcagtttcaaggttagccatgtcatttctgcttaagctgatataagcttctatcccatcacctgatttggtgtctaaaaatgtaaccacattgttgcaccacaagggagccaacccaacccaagtaggctttccccacccaaaatctgattcgtacagaggaaatctacaccaactgctaacactaagagcaactgttgtctctctttttaataaccctttaccacttttcttcataaattccaaatgttgggttccttcttgtagatttttaatgtacttatcatcaatatgactcaactcttctctcatctgttttatgatctgatcatcattcttttctgatccaacagctttaattattacaaatcgataaagatttccaaacgaggattcagagagtgaaggctcaaacctcgttcgaagattcactagctgaaccatagcataagatgttttggaataatccacttgcaattgagtaacagccacaaaacgattccatatgaatgtagacaaagcctcaacacgagaaacattactaatgttaacatatttttgtttaagattttgtatggttgaagcattgaaaacaaaccttttggagataaaattgttcttgttttcaacatcaactcgagggttgaacccggatatgttcttgggaggaaatagcgaagctgcttcgaattgtggcggtaggcatgcgaatgaggcatcgccacgagatatggcggcccatttgttgaggaacatgaaaaatgataagccatcagcaatgatatgagagatggatgatccaatagctatagagccacaactaaagatgttgatttggatgcctaggagtatttcggaaaccccatgatcggtttcgaatggaattaagttgttaagttgaattggatcaatggggttttgagataggaactcagatagattacaattgagtagttttgcttcaatgaaagggactcccatgtcattgcattctatgcaagaagcattctttttgagtcttcctgcaagtggataaaatagtgtaagtgcatgagacaaggatgtcttgagattgtgtaataatatttcaacaccaccaataatattaatgttattatagaacataacacaattggtgtaaactgaaggagataattgatcaagaaatgagagttggtaagtggcaaggtgatttggagttgggttattaggtttgatcatctcttcggatactatatttacttccatcttcatcatatgtaatcttagctaattgagtttgtaaattgctttggtatttgcctcgtcgatctctctacagcacacacatatatatagccttttaaaaaagatgcattacccttatcttatttacctgtttattataatataaaatagtcaagcgtgcaacacaatataaaattatttcgaatatcaaagcaaataaaaatgcgtattccttgtaaataagtgtattgtagaatttttgtatattatatatgcccttgccttgtctcatttttcctcttttaaaatatatcccattatatccggcactgcatctgcatgatctcttatataattatagtttagtagaacagctattaaacattattacattattggtagttgaaaataggattatatatatagtatattactattagcacgtattagcacaatcatttgcccatgtattaagctttacatgtacaatatattatttgtaatttatttgagatagaaaattttatattgttaaaattgaaaagataatagaatatataaaattgagtgagtaattggatttaaattatttaaaacaagcaaggtagtcacatggccaactcacataaatgtagcatttcttaatggctcatcaacattactcttgagttaatggcggattacattaaaccagagaaaagaaaagtaaacagagaatccaatatcacatggtagcagttcgatggtacaaaaggaaaaaagaagaaaaacaaacaacaaaacaagtgccatctaacctaattaaacagaaataaatcgaagaaggggaaaatccgtatcagccatctgccttctcatggagcagggagctgttgaaattggacgaattgaagtagctaaagttgttgtactgattcgcccattgagccatattatgggccacacagttgtaattt

SEQ ID NO: 14670 - DNA, 20255 bp, Cannabis sativa
  modified_base (8888)..(8891): a, c, t, g, unknown or other
  modified_base (16712)..(16724): a, c, t, g, unknown or other
cacaagtgcgaatttgcgaattttgaattttgaattttcattttctaatccaatccaatccgcataagtgcggatatacacactttacaaattagattgaattggatcgtagagattaaattaaattgacaattttataaacaccccttagtctaactaaatatcagtcccatataatttatgaatgctaattacaatctcttagtcaaccttcatgtccaaaattacatgccaatttttttcgtagtggtattcgttatagttacagtatcattcttgtaaatttttgaaaaatttcgaatagtttacaatactgaaaagagagttcctgatattccaagtctaccacgcgcgtttaaaaaacttcaaacgtatttttgacactgtaaattatttgaaatttttcaaaaatttacaaaggatattgtaagcataacacttctgtgaaaaaaaaaattgaaaaaaaatatacccatatctgtttttaaggaaagaaattaactaaaaaattataacagaaaattaacggtacttctcataatttataataataatttttaaaaattattactagccatcacaatgacatgtctattagataaacaatactcttttaacaactataattgttgccccagtactctttttccttttttctttttcaaattccaggccaaagaaaatttatcaaaatacaatctaacggcatagaacgttctatcataaccaactgagccatcgaacggttcatttgcaatttatgacacgcgtcaacttgtcgattcagccccttttttgcctcgagaaactacatcatcaggttgcttctctctctctctctatacttcttcttcttctcataaaagagtaaagggtaaagctcctgttgctctgcaactctcaccaactctctctctctcaaagaagctaatatcattaaattgaaggctcgctttaatgattcttactggtagaaaaatgtgattatacatctctgaaatgtatacatcgatgttaaatatattgcgactttattttttgttatacttgttttttttttgtctgaaaaccttgttctgcgtttgatgattttaatggaggaagcctaggctttttcagagctttgagagatggagaattcgtggcaagctaaatttagttcgaccatgcagtcttcagctccgtctgtggcttcctcttcgtctcaggagctccggaatcaggtattttgatgtttttttttcttttcttttcatcttcttcgaagttgtgcatgcatgtgttttggttccgactcttcttctactagtaaggtcttcaccggttcatattgatgtatacattatcatacatatttatatattttgaagacaatacagaggataatgcgtggctatgagttcgttagcatttgtaggctttcagatttcctactatggtgaaggaacagacaatacacaaatacatgtactagctttttacgggtgtgtgtatatgaagacatgtaacgaggtttatagagtacaataactcgttgcctagttggtttgagcaatgccgaaaaacattttgaatgaaatgacgatggccgtattgttttggacaatcccagtaacagttctggttttggttttagtaatggagtagttaatttctcttttaaaacccttgactagcaaccctggttttggcttaatataggcatttgtcgtttttaaatcaagaggcatcgttgagcaataatgtactcatcaatcttcatgcatcctcatttttatgtaaatatggacgttttccacttcagtagtttcatttacagaaatactttttcattttgcttgtgttggcagctttggtttttggctttcttctgtttttacttttgcctccctctaaaattttcagagtttccaagtgtgtaagagcttttccagcctcttgcacatatttaattttgaggtggctggtggtggtggtggttttcattttcaaatttctggttcttttaccatgtttattttcatattcttacttgatttttgtttttctctttaattaaattaggctgagaggaacagccactgttatccctatctccacgattcacacgattcaagacagaaactacttggaatggtgcaagatcccccatttactagctatccaaatctaatccaccacaaatttggtcagggtaatcttggaaattcttttctggccctcctgtctgggtccccatctctcttgcagaatgattttaaagaattacagaactcaaaacctatgagtgatagtaatagtgtcgctgtcaacaatattggaagtgggttcccattgacatttagcaggctacaatcagaatatcctagtgaacaaaacctgcaacatggaacatattttcgcccctctatcttaagtagggtggtagaaggttccaattctagtagctgttcctctttcactggttttcggagtcaatgcccggaaacaagagccattcattgcatggttcctggtaatgaaaatgcaaatgttttttcttcaattggggaattgcatggtataaacacttcaaatgccgggaaggtttctgtcatgaaagctcatacttcgcaactgaagtcattagatgcaaacacttctctttccaaccactcgtatagttttttgagtgattgtccacgagttctttgtttgggaactggttagttcttaatttctttggtatataacaatttcatactaacaattagaagttgcactgtttacgtggtgctttctaatttttgatttgccggtttttttttcttcaaacaggtggatatctactcatcagcaacacagggcttcttggcattgtttgctcatgccattgcatccacatgtctgtcttgaaattttgtgaggttggtgtgtttatctccctaaaagctttctgcttaatctagacttaagcacttagcactaggcacacattataactattaatgattttaattgtgtagcattcaggattatatgatacaaaccctggcgatgctgttcgtatggacaatggtgaaaccatagctcagtggcggaagttctacttccagaaatttcgggtatgtattctagattgttttcattttgcttcgtgttactttttcatactattgcatctattcatgggattttacatgtgtgattggtatgcatttgcccatttgagaataatcattgcagataataatatgccctagataaaagatatgttttctttgttaacctattagtattcatgctttagaaacttttttcctttagtgcgactgcttttattttgaaatcagtaaaatagttttcttctttttctatttttttattttgttttcctccatgaagtagaatttcccaaccctttggtttaggagttgatgtactgaacttagggtgtattttttataaatttaatctatttgggattccatgctcaacatgggtatctatttccttgtagtcagtgtgtacatattcaaattacaattgaggttattttctttttttttttttttgaattgagaattgaatttcttatttgcatgtatttgaagcatcgagaacactggatcgtgacgtttttatgatgctttagattagggttccagaagatcgaagtgattgggactggcctgatggattatctgcaacttctgattttatgaaaccgaagatgactttgcccaacgttcccagcgtttcaagtaactgctctcttgtggttcatccatcagaaggtttagtatggtctgggcaactttttaacaatgctgtgttaccaagaagtcttcatgcagagcaatgttatcttatggatgccttacaaaataaactcaagagcaatgttgaagacagtaaccacgtcagcagtttcatgggaacttctcagaacaattttgagtgccgtcactctacatgttcaacagtttcaggatctgttggtagtggttttcaagatccccatcagtctattgtggcttctattgattctaatttgaagaatggaaattcatcatttactgctcctggtatgcaggatgtgagaactatgggtgaaagatctgatttctgtatgtttaaaaatgcatcagctagtgtctttgcaggcaaggatactgccttttcaaatgttgaattgaagcttggacaaccatatcaaatttctaaaaattccgaacattcatcttctggaccacaactgctggatgcagttgtgaatccatcaaagctgcacccccgtgagcagatgacacacaatagtgcgtcaagatgacttccctaccttaaacagagttcatttgtgcttgcatacattattatatcataccacccgatgttttgtttctcttaatttgactaacaaactacataagtctgatcatttatttatttatttgcagtagcagactggggcaatgcgggagttggacaatctttgtacttttctgctggaccatgttcttcccttgaaaaaagagaacgaaaccagttgaatcttggtaaggtcaacaacactgctgcagtagagacatccagaggcaatttatctcagaatgccgtggtttctctactcaccaatttcaacctgttagttgggaatggcagtcaagtaaaacccaatgataatatgaccagtgtcatagagcacactgttcctgacacacaatatgatgaacctcgctttgccaagtttgatcaatctgatgttctgtgtaacagcaggaatggtctagaaaggcagttaaacatctctggaataggttcccatggactaatgattgacaaggggaaatggggaggttttgttgagggtggatcacactttgtgaaagattcagggagtagaattccaaagcaaattgagatttcaacctatcatcctccactttcagctgcacaaggaagcagctgtagtatatatcagttggctagtgtaccgcctgaagcacctgatactagaggcgtatctaatgatgttgagaacatctgtacttttgggagtagtctgcatgttgatcatgtgaattatagttcttcagcttcacccattgggcatgggataactacaccatctcaagtgacaaagggagttcctttagcttcatattcttgtttggtggatcagccttcaacttttcatagagaagaaaacattagtgttagctctcatctggttgatgataatttgagaatgcttgccctgaggcaaatgctgggacaaaaacatgcctttccttcttttggaatcaacaaagggaatggacgacgtgaaggagtttcttgtttacatcattctcttgctgagtcttcagcacgtggggaccagtgtaatggacctggtcataccagtagtagagaggtttttgaagcccccaaaccacacccaccttcaacttgtgctactagtaagttctgtgatgattcactgttatttttatgacacaatattgcacttaaaaatctcttaatgagaagtttgcttaatcaggaatcttagttttgttgtagtgtggaaattttaaacaataatattgtatttaaacaggtgtgagtggctgttgtgatttatcatcactgatacgaggaagttcaatacattctaaagaaatcgctgtgccatatcagctttccagtgaccctattcaaaatgagcagctctctatgaggttagaaatggggctatcatgatttattttattttattttttcaaaaatgatcctgttattttaggtcttatttgtttaattgccaactagtccattttcacatttggtataaagtagttttatacgttagctagttgattgctaagattggccatcagttggtagtgagagagagcccctgcagagctttctgtggcactttttttaaatagttatatattttttttcggtgtcgcaagactcgcaactgttttatattttctttttaattgaaaattaggccacgagtttcctcaaggaactagaggaactttattaaattcaccaccaccaccatccttttttttttactattatattttattttaaagaagtgtttgagatataatagaagcaaaaagaacattgttgggctagatcattaaattcatctttttttttgtttgccttttaatgtttgtatagtagaagcgaaaagaacattgctagactatcagagcaggaaaaatgttctggagttccttctacttgtttccagcgcaattgcaacccagtccataaaaattgtttgcagaatttggagactgttggaggttttcctagtgccttgaaggagcaaccagagatgccttatggtgaagcatctgtaatttctccaaggttctgtaagaatcatatttttcaaaatgatcaaggaggatcatgtaatgggaaactactcaggaacactgttatccatgcttctcagtggagagatgtcccaagcaaggtcaaagggattactaatgccatgtgtggagatacttctgctaaacacaatattggtaccacacaggcaattgaatcctttacagagcatgaaacttccaatatttcttctgggtcttatgcccctgcaatcactcagctgtcagttgacgttagcaacatggattgttctagtgctgatgctggaaatactggatgcattagtaatcttaatgatgaagggtccggcattgagaaatgctgctcatcagatgatgcacatggaagtgaaagaagcccagaatttcttggtgatattggcaagactaacttgaatgagtatgcttcttccaataattcaaacaatcatccatcgagaagtcttcttgatgagctcaagctcatagatactatgacatggaggaaaggtggaaatcaatttgaacctggaataacccttttaaacgaggagacactttccaataaggttaatagatgcttgaaaaaggggaagaagaagagcggccgttcatctttgttacagtataaaagtaccaaactagctaattcttctgaattttcatcttctgactcctccaaaaggacaaaaatgcttttcttgtccaatggcaaaggaaaatcttttgaatcctgttttgatcaacataattctaaccataaactttctttaatttcttccacgaagaaacctcctcgtaaaagagatctctgcaatctttataatgacagcagagggaaagttgtttgttgcacagaacaaagtcctagcaattgtgaaattccaggggcatcaaatgcagagaaattcaagagggaatgtattttcaataatgagactagaacagtgaagacatacaagttcacaagtgagatgaattcatcctgtattttgcaggaagatgtttgtcggtggaaatcaagaccaattgtatgtgggaagtatggagaactatctgatagtgacttggtggaagaaatgtcgaaaccggcaaaaattgttcctcttggtagagtccttaaacgtgcgaaaaggtgcaaacttcccaagaatgaaaaagctttatttacttctatggaagagttgaagataacaggaaatggtggtactgatgttaactgtaatccatttcaccttttggagaccaataaaaaaagtagaagccatgaaactgctgtctctggtaaaatcactaaagaggatactttcttggaaacaatgaagaatggatgcgacaacagagataagaagtacgctgaagagttttctgtgttggagatagagacaaataatagagccgagaaagataatgcaaaaggagattgcattccccatgttcggatgaagctcagacctagagaaaatcggaagcgcagtattcacgatctgacaactgatggtaaacagttcttggtttttcattttatgtttttgttttttccttcattagttatgagtcttcatctcaaatgttttctgaaattatagaggatcaactttcaaggaatgatgaagatatgaagcatgaatcatgcaagaatgatgaagataggaagcatggattatgcaaagttgctgaaatgtaagataaaaaaattactttcaaagtaatcttatgggttacgtctcaggcagtagaatttccagagctcgtggatttagttaccgtatattatgctatattataactggagaaatttggtatcatattgtgagtatttcatttaacatattggtgcagatctctacaagagcaaacatgcacttcattttgctgtgtctgtggtagctcaaacgaagatgaaattaataatatactggagtgcagtcgttgtttaatcagagtatgtgtcatagatagtctgttcaacatgagtgttttttcttatctttttgtgccgattatgtgttgttaaaattttacaaatggcaggtacatcaaggttgctatggcgtttccagattaccgaaaggcaattggtattgcagaccatgccgtacaaattcaaagaatattgtgaggaaagagcttagtctactatttattttagtccacatttgatttgcttgtttcgtgtactatttaacacacgccttttgccttttgtttctctatattttaatgtttctcccaataagaaattagtttcctttccgctatgtatgctattctacagcttttgttggtttttgtatattttcatgggaaaggatcattatttgtggggaacataaaatttataaccaaggaaaagaaatcttttggcagaaggagaaatatcgaaaaagttgttttccatctatttttatttattttaatgaaaagtaaagtatttttttttcagattgaaaaataaagtattaattgcacttgaaagaactagaagtttggcttagtattattattattattatnnnnattattattattattttgtaatggaagaattggagagcttactgaacgaggaagaagataatataggttaccaaaaatttgtctctagtattaacctctgcctcattggtcatatttatcttttgttttcttccattattttgcactgttgacctgtgattttctagtgaatatttgtgattctcactggtgatagtatctttattttcattcttattttataggtttgtgttctttgtggttatggagatggtgcaatgactcaggcattgcgaactcgcacaattgtgagaagccttttgagagtttggaatgtggacatagaatgcatgtctagaaataagcatttttctgccaatccttttcaaaactcactgagcaggttggatttctctgattcaaaatgtggaggtgccgctacctcattccctgttcgacctatacataccaaaccgatggcttcatctgtcttccaagtggatatgccttgtcacttaaatgctgtacagatttcccccattagtgagttcagggtagataatagtataacagcaggattacttgattcaacaactaagcaatggattcatatggtttgtgggctttggactcctggaacacgatgcccaaatgttgacactatgagtgcatttgatgtatctggtgtttcatgtccacgagcagatatggtaataattgaacgaagtgatactttatggaagtagctatataaaatatgaagaatttaaaatgacactttcgaaatactttagttattgaacttgttcacaactaagattgctaaagtgggtgtggtaattacatttgttgaacataccaagacatattggaaaacagtgaaaagggtttgcttgctgtgtctcttgacattcattatatgattgatatataatcataaaatcatagctaagaacaatatgtacccaactatttaaagactggttctttccttttatgaccttatttttggttttctttaatgtgttggctggttatatggttgatttttttattttttttttttaaaaaaacatttcccaggtttgctctatttgtaatcgacctgggggttcgtgtataaagtgcagaaatctaaattgttctgtccggtttcatccttggtgtgctcatcagaaggtctgcttcaaccctatctatttttattagcttgattatcggctaatgttgaataatcattcaaggcattttcatatttgtatagcattttttctagcatcctagaaaaattgtctaatttaatttcatttgctaacaatggataaaagctacagttcagaatcgtggtggctgaagttgaataattatttgacgcattcatctagagtgtgtttttatagtattgtaaactaatattgattaagacaataagcagaatactgtcggaattttgacattatatagttgaagtcaaacccagagtaggtggatgacattgtatattgactttatttgttgattccagggtctgttacaaagtgaagttgaaggtgttgataatgagaaggttgggttttatggaagatgtgtgcttcatgctacacagtcaatgtgtgaatctgattgtaacccaggtgatggggtaactggtagttcagggtcagaggaagtaacgtgtgcgaggactgaggtaactgttattataaaggcttatttagttctgaaagttgcttcttcatccgccggatcacatgaagatgaaagggatccatgtctatattcactttgtttcttctggatatctgcagggttataagggccgtaaacgagatggtttctggtataaaaaattttatagtcaaattaaaggcaggggtggatgccatgttcctcaagagcaattaaatgcttggattcacattaatgggcagaaatcttgcgcacagggacattcaaaattgacaatatcagacattgaacatgattgtcgggtatattcgagctttttgtgtacattctttgtattaggtttttaacatgtattgtagaaattttttaacaaggctagtagtgatcttacttttggacttgctcataattttatcagcactgctataaggtaccttagggtgacaacatcctaggggtgtggtaccctaggacatggcatattgccatttatgcaatttaggtcatagcatattttaaattgacatatgtgagatctgacattgatttgcactaataattataaggtctcgggcacataggtgcccttcagcttttttttaattttggtgaggactgctctacattttgcttatgttatacagctattttactatatgaattttccaccaattgcagaaggaatacgctcgttataaacaatcaatgggctggaaacatctggtggtttacaagtctggcatacatgctcttggtctttacacatctcgcttcatatctcgggctgaaatggttggatatcttcaagttgttgagtacatttcatcgttcttcaccgttattgcagaaatgatagttttggtttactttgtaggttgttgagtacattggtgagatcgtagggttgcgtgttgctgataagagagaaaatgagtatcagtctggaagaaaacttcagtacaaaagtgcttgctactttttcaggatagataaagagcatataattgatgctacttgcagaggcggaattgctcgctttgttaatcactcatgcctggtaatgtttctcttctcatttttcttttagcagaatctagattaggagtttttaaacatgcttaaagttttgatccgatcaatatacgaaatgagatgttatatgaccctaatgaattctattcacaatggttttagtcaggtgggttttgttggatgttgggtgtaatacttcttttgtcactcaagtttctctcttttaatttaattgtttgtttgtttattatttacattgaccagccaaattgcgttgccaaggtgatttctgtaaggaatgaaaagaaggtaagtttatatgtttgtacgatattgcaatttcgttttttttttttttgaaaaaacattgtgtttgccatataaagtctttgcattgcctgttctggtttggtctatttaatctgagtgcagaaattttgaccgcaaattttcatcatttgttctggtttcccaggttgtctttttcgcggagagagacatattccctggagaggagatcacgtacgattaccattttaaccacgaggatgaaggtaagaagattccatgtttctgcaattcaaaaaattgcaggcgctacctgaactaagatgatgtatctacttgtttctcgttgcaaaatgtttgtaaattattggggaagatgtatcttcattgtgggttatgtaaataggatctcatcatcaaatagagactaattattattatggtaaaagtgcaaagccaaacgggtacataggttggttgctctacacccttgctcatcaaatagatgaaggagagatgatgtattagtggcaaactattataattattattattgttgttgttgtagtagtactttgcttttataaacatcacaactattctatccttttttcaaacattagataaaataacccttctatcaacacctctttctctctctctcccacgatggcattgtgtcaccatggcagatgagcactcaatagtgttgtaaatataggttgtgttttttgacacgacacgaaaaacatatgtgcttagatacgatacaaaagattatgggtttaggctcgatacgtaaacacaatagattaatttaaaagcatgacacattaaaaagtaataattttataataatagcaataataaatatttatttattaattaaaatgataatacctactattaaaaaaaattaaataattaaaactataaaatttacatatgctttagtatttgaatgattgacgataaaattctcatattttaatttttatacatttagtctctttatttttttctttttatggcaatttttttttaagttttttattttttaacaaatttgaggcatttgttaaatattaatttagatgattactctgtatatttgtatatgcatgaaagtaaaattttgaaggcaatacaataataattcagttaatatttaatgatgatatctaacgagcatttcaaatttgcaaagaaaagtaaacataagggattttgtcacaagaaaaaaaaataaaggagttaagtgtaaaatcaaaacataagaggattttaccgcaaataaccctttagtattcagttcatcaattataatgaaaatgcaaaaatatggaacacgaatttgagctcgtataaaaaaacatgttctatttaagaaaaataggccaacccaaataaagcacgagacgaatccgagcatgacacgaaattactgaacttgcagactgttagacttaccctataaaattgttgcacgattcagcatgatacgactaatatttttttatggcacgacatggcacaatccatactttttatggcctcacctgccacgaactatattttaaaaaacccaaaaaatatgaaccgaactagcacgacatacacgtatttacagctatagctagcacccaatgctgccactgccatctcaaagtacctttaattcgtctaatcaaagtaatcttttttcaaataagtgaaggcttctaatacatttatgtatggtttattttctcacattttgttttctttcaggattaaagctccaaattttttgaacaaagtgatgttccagcgatgcattagccatgcctaatgtcaatgatgctgtactaaataatgatgttatagaaacttcagttttaggccaaaacaaaaaccgatgatgcaaaatgatggtttgtgtcagtatgcgataatctgctataaaatttgatataatttctagtgagctatataactctttactcgtatgttaatttaaggtaatattttttttctacgagatgcagaacaataaatttgaaatttgtctgtttgagaccataatgacgttttgacgcttgagatacaaacaattgatgttttgtgacttcacactccaaattgaagattctacatacatataccaaatgtgtacatctaaaaaataatatttgaactaaacaaaaaaatacagctcaaattgaatttcatggttgatttagccatagcaaagtatcgttaaatatcgttttttgggccaaaaagatagttttcatcgcatcatcgtcaaagtacgcatttttttggggcctaaaaatcaaatttttgtcacagtattgtatttttttggggcctaaaaatcgaattttcgtgatgccatcattatagtaatgttaaacatgaatggagcatcattttatttaaaattttacagatttttctagttttaaataaaagaaaattgacccacttcaaaataataataataaaataaaagaaaattgagcaaaatcagtaaatcttacataaatgtgttcgaaattatgtcaagtttacattcttgaggttcaaggtttattttttattttactttgaatcaataaaacacaaaaaaaaaatgacttggtgcttcaatagagtaattcaatggtaatgggatgtggcgacgtcaatggcaatgacgattgacgatgttaatagtgatggtggtggcggtgccattgttgtagtgactagcaaagagaggagggacgattttgtccaatatttcaaaaattgaatatttttgtgatatttgattatgtaaccgaattttttaaaaatataactttttttttatattttatttaatgcctaaaatttttatttataaaaaaaatatttgtaaaattttaaaattataaaaatacattttgctcggtgaaaaataaaaaaacgactaaaaaattaacaaaaaatcaaccttataacaactataaataaattataaaacaacaaaaaataaccaaaaaaataatctcacagcaattataaaaagataatttattatttttatagaaaagatatttttataaataaaaaatttcaaaagtaaaaatgaaattttttccatgacttatttttggtgtattatgatataataagatgcataaacctcaaattttccattatgtttaggtagtaaatgaaaagtacaacacatcctgagagtagtgatgtggagatatatatatcttttgttattcaatgtagacatgttttattcccctatagttgaatttagcttcataattagatgcaacctacaaaagaacccaaaaaagaaaaaagaaaccaaggaatgaagccggagttaagagaactctggcagtaggaaccaataaattgccataataaaaagggtctgtgtatttaaactcaaataaataggcggtgactcggaattttaacttttaatccacggtttacgccatatttacgagaaacggagggagggtccatccagcagagcaagtaccttccttcaatagctccagccctctcgcctatgatccccaatttggaatgtttgctgtcgcctcattgaccattttcaccaatgtcacctgcaacgtttaaggagaaagattttgcaactaaataagaaatactagaattacagaatctgaaaaaaataaggatggatatgatcatatataggggtggcaatcaggtcacgacacacagatttgacatgaacacgactcgtgattttacgggtttgacacgacatgaaaattatacgggttgtgttcgtcttcgtattttatcaatttttcatgtcacatgtcgtgttcgtattaactatttaaaataaatttaaaaacaccaaattacacgaacacgaaataataatactaaaaacaacaatttagcttactacacgagatttcgcaagtttgaaatggtacgaaatttatttgagccgttttcgtgcctgtgttttataaattttttgtgtcacgaatcgtgtttgtgtcgataggtatataataaatttaagacttcaatacgacacgcgaaattgctaccactaaattcatgaattatattgagtgcaacgtgtaatttttcgtaattcaataaacaatagagatgattacgattgtcctaaattccccataatgtttaggtagtaaattccctctaatctctcaaccagacaactcttttgctttcgtatcattgagacccattccacaagattaggtaaagaagcctaaaactagattacttccaccactgggtaatgtggccaaagatttgtagatataaacttatatatttatatatatatgctttatttacaagcttaaaattttttatttacaaaaagaaaatttaaaattatacaaataaactttactaggtaaagtgtaagaaacgaaacaacttaaaaaaaatatttaatctcacaacaaatataaataaactataaaataattaaaaaaataactagaaaaacaaattcatgataactataatacaaatataaataaactaaaaaataatttattatttttactgaaaaatgtgtaaatctcgtgtaataaatttagtataaaatatatcaattatttttatttagtattgatatatttttgtaattttttttaaatttttttagtttattatataaatcttttaaatatgtatataaaaaacttaattagaaaaggataacacagcaagcaaccaaaagttgaccaactgacacgtcaccattcttcaagtgtacatttttaattggcatctaatctctgtagagggaataacaataataataataataannnnnnnnnnnnnaataataataataataatagtgtggtgtcaaccttgacttgttgtgtggatctgtaattttaattttgatccaatccacattgatggtaagtgaatatatcatttaaaattaaatttgatcaatcccccaccctcccctcaacaaaagaaaaaaccccacaaaagctcagaaagaaaaaaattaaaaaaaattggggtatatgtcaaaacaactccatgatactcacttactcaggaaacggtggatcagttgacaataacaaaaagtaatcaaagtttaatgatttttctgaactaaagagttatgagcatggtggccagcaccaccatgaggtggcaccctggtggtgctaggcatccataatggatgccctttaacattagtctgccaaaaggtggcttctacctaaaaatgttggagactagaaattaaggtactgcacataagaggagatgacaatataagtgaaacataccacactttctggaacaccaggtggaggtagaggtagatttcttgggggagcaactctatcataagaccttttgtcaaatctccactctccaatctttccatatgttaattcaccctgaatataagagtatggacaagtcactaactattaaaaaccaacactaaaacaaagacattaaggaatagatcagtaacgaatgataaattaccttcaaattatagtcacatccataagtgtaatgaattataaactttttgcctatttcagtatcccatggaggctattatccagcaataaacatatgttaaaaaacacttcacaaaatcttcatgacaaagttctatcttatctagttcactgagtaggaatcatggaaatgttataacaaaacctgaatcatgaaatccttgtataagatgttaccaacaccatggagagcagatgaaacagcataagcatacctatttgccaccatacaaaattttaagcaaaatactaatgaacaaagtgagtgcaaaggtcacatgtaaaaacagagtttacaaaagaagagtagagtatacacacatctcaagaacccaaccaaaagctttgtctgtttcaggatctttcttcattgccaaagacacattcatccaagtgggagcaatcttcttaagagcttcctaataatgtttgattaagaattgatcagcacactatgaaatcctaagtaaactaaattgggtactcatatgcataaatggcataccttcccaacaatgacaggagaattcccgatcgggtcgattttagttattggtccattctccttagggaagtactttctgagaacagactcgtactttttcggttcaatataaaagaagggaaatgcagctccaaacccacctctagataagtttggtatgggcttaacaatgatatgatctggctcagacatcagtatgtaactggatacacatcagaattgaattaaacaaagttaatccttgagacatatataatcacctcatcagaaaaatttgaatcaggaatggtatcatttcttactcttctttaatgtctgccttttgaagccactgcacaaacgcccatggcctattgagaactatatagccctgtgtggaaaagatttaaaaaagtaactaatttcttctcataaaagaaagctagcatcttccaaataatcctagccttattgatatgaactccacagttattattatttgatatgaagcaacataagttgtaataaataagacataacaagatgagcttcaactaagaattaaatttgacctcaaagtcaacgggtcgatttaaaacgaccgaacatctgagctcaaaattttttagttctcaactgtatttaattcagttttttttttttttttggtttggggggcaaagttctaaacaggacaagacaccaaatccaataaatcagacaaaaacctagattttagggaaactcagatgattaacacaatttcattttgtaaactctatacatatatgtggaaggatagaaaagtgaaaacccagaacctgatccattccggcaggtaaaggctgagcaacgaaagtagggatctcgtccatgtactgatcaggcttcccagagtgcaagatccttgtgaagccacccatctcggaattgggtccttccttaaactttttaaaccagtagtacatgaccctgcactgccacgtgttgtagacggagtcagacgccgtcactgccgtgtgaaacagcctcttagacccagatttcccttttgatttctcaaccggcatctggataaccgggtccatggaaatcgatgaagttctcgatggacctgggaaatcctgcttcaatggagcatttgctgagattattatgttgtatgtaatcaaagctacagaaaaggttatcaaagttgtgaagaacaaatttccacaacccattttctctctctgaatctgctcctctctctctctttctacttataataatatatctatattagcaaagctatactagtgtagttgttggggttgtctagagtttcactccatgatctatctggtcctctctctatataaataaataataaaaatataaaagagagagggagtcagaaagtcgtcggtgaagcagtcgggttcaacggcggcggttgttgatgaaactttagttaatacttaatagttagttatattacaattctctgtaaaaatatttcatttttattttcttacccaaccgtgtagcaataatatgtattatgtaccaaaaaaaagactattgtcttaaacaaattatatatatttataataacaataatattattttagtactatttttaatttaattttttataaaaaaatatttcatttatcaaaaaaaaaaaatttatatttccttctatctacttttaaaggtgctctttgtgtttgtgaggacaagaactcaaggaaggaacgaggatattgtgattcaaccatttttttcgcttctgttttagaagaaacaatattgggaaattttaggatgtaattcaattcatgtacatgtattgattaatttttttttttgcttaaaggattgtgtagatagtaaataattataatttttttgaaaattcaaaataatttgttgtgtttaaatatatgtatgtgttttattttatatgcatgtgaaattaatttttaattttatttttttatatagtaaattataatttatttaaaattgtataaaaataattttataaaatatcttaaataattataatatatgttatcatgtaaaaaatagagttaaaaatactagctaaaaataataaaaaaaaaacaatacatcaatatgtctattttcttgagaatatccaaaaatatgtttttcacatgcaattttcattttattctttttatagtagaaaactatataggaaaataaatgctccaaaatttagtcaaaatatttttttcagaaaatgatatgactttaaaataagtttgtaaaaatatggttgtttttttgtagaacaagaaatcattttatagt

SEQ ID NO: 14671 - DNA, 4787 bp, Cannabis sativa
aaatcgaccgccaaattcggtgatgacgtggaaccgaaaattcggttacggtctggtcggtttgatggtcggtttcggtttttcggtttttatgaacacccctagctcgagatacttcttaaaaattgtggttgaaaacatcccaggttgataaaatattgacctgggccctgggtgcatcaccaggtgcccggggtgctccaagcaataattcagggttggacccacatgtaggcgaggcggggcagtcgcgccctgaaaaaaaaaaaaaattggaaaaaaaatacgtatgcaatttagttaattacgacatatatttgtaaaaaaaaattatatttattgacataatatttaactttagtataattgataaattagattacatatagggtagaggtcaatggttcaattcccataaagagcattacttttgttttttaagtttacttttgcccctgctttataataaaaaattatgccccctcactttaaatcttggtccgctactgcgcgaattgtttcgaatctgatgcatctaatatgtttgtgataagtcttcttcatatctaagtacaaagtttaagccatttacactaagatgggctcaaaaatcgaaactctagttaggaatgtcaacttgggcgctgagtgaaaatcctagacgctcgattgactactgggatgatgtttagtctcttttttgttttcaagcctcggacttggattcttcttgtctttttggttcaaaatattgaaggatggtgagttagaaacaacttggcgaaatccaaacacccattccgaagttctcggagttaacctggacccaaggctagggacccctcataagtcgactgctatgacttgatactattcaacttcgtaaatgttttccttattgtcacgtgtcaaacattatttttcacgaggatcaattcgggcaaacattttctattgtaattagcacaaaataattttttaaaaaataaaatttaagaaaaacttaatagtgattttttagaattaatttaaaaatatttattttttataatagagtgtaattcatgaaaaataaaaataatagactaaatttgtgggtgtaaataaaaattatgtacatattaaacataattttttttttttttttatataacatattaaacatataaaaattggtggaaggtaaagggaagaagggtaaaaggataatttcaataattgattgaaaaggagagatgtttctataaatggttgcaccttcttcgtttctctctctatttgtaaaccgcgtctctagagaatataaaatcatgggagaaatagagaagaaaaactaggagactcccccaaagaaaaaagagacccaaagaagaagaagatatcaaaagatgaagcactgtgagctttgtaagggtttggccaggacttactgtgaatcggacaaggctagtctttgctggaactgcgacgttaaggtccacggagccaactttctggttgctaggcacacacgaagcgtcctttgtcatctctgccagtctccgactccatggaaggcctccggcgctgaactcggcgtaactgtttcagtgtgtgagagctgcgtcgttgttgccagaaacagtaccgaaggcgagggcgaagaagacgagagccaaggaggtaacgatgttgaatttgactctgacgatgatctaatcagtgaagatgacgacgaatatagtgatgaagaagatgtagcggaggagcaagaggagttagacgccgatgatgaagacggtgataatcaggtggttccatggtcggcgtcctcgacgatgacgccacctccggcagcgagttcatctagtagtggagagtccgtaagcactttctgtaatggcggtgaagaattttcggaaggattttccctgaaacgaaaccgagaggtttcttcccatcctactcaggtatctattttcaccctctttctacggttcaaattatcaggacgtaattagcaaaaaagacaaatattcaattagtactaattcgtatcaatctacaggacaatctggatcatccatttcctaaacggagatacttttcagcggtgactgctccggcagatgtgtccggcgccaacggaaaggacagttctgcagattcgaagccatcaaaagagcttaaaaccgatgcagagcggtctggtttagaaattagaatcgcttaagaaatttcgtcggcaaggatctggagccattgatcttaattctgcggagtattatgacagtgcgatctaagataatgataatagttttttttgtttttttagtctgacccaaaccaaaaacaattaacccctaactgctgattagattagataactagttgatttttacttaagtttgtatgaaattagtaaatttagattatatttcattcgctatttaattaaattttgaagagatcgaaagtgaaatgtctaattcacttcttgtcgattgcgctatttttgttcatgtcaaatattttaaagacaagatatgaatataatgtaatcaatttatactattaagctaccatgtgcccattttttaattttttatttttcttatttaaagagaacttccgttattttcttttcaaactaatgatcaaataatagaaaaagtgctttcatgtgatgaagaacagaacagcagcttattacttattaaattgttttataatttttgaaagttgaatcatagaaatgacattataaatatagtattcagtatgaatgatgacatttcaggaacatagaatcaaataaattatattaaatttgattattaggcaaaggaatccaaagaacatttctttcttcaatagaaagaaattcttttaaagaaaagatcccgattgattgtatggcaaaattaaattttccaaatagtaagtgacattgttgacacaacgttgaaacttggcctatcaagtcttactgtgcagaaaaaagaatatgacaatcaaatgatggaacattgtagatagccagatattagttgtattgagcctggaaacgatttaagacaaatgttggaatagatagccagttagtttcactgagcctggaaacaattaaagacaaatgatggaaccttgtagagccagtgagatgcattgagcctgaaaatttaagaccctttgctcttaaatagcagctgtcagaaaggtcatggctgaagatgatcttaaggcaggcatgccaagtaagctattaggtgctttgtttgtgggggacctcatatatctccaaaaacttgtggctatttctgaatcattctttgtctttagccttcatttcatgccttattaagctataagtccacactccacacccttgtgactcatacttccaacctgtagtattattaaaatgcaaaaatagaaagaaaagaaaaaataaaagtgaaaaatggaggagaaataatcagagacgtattgggtgattattacttcttggtgagtaatgggaacactatgcatgtcttttgtgtcttgaattttttcttgcaaaatatggaaactgagtgtggttgttgctggagctagtgggttacttttaaaaaaaacattggctaaatatagagtgtgatcaaatcacgccagtcacttttagcttaattgaacactcggtcatattttcattgatgggatatttgcttaattaagtaatgaattatttgattttcttgttgcataatttaatcaaactttaatactgtattaatcatgttgattcaagtggtatttgtggggagtactcttcttatttttattttttttaataccaccttagctaatatcttggagctcataatagaaacaaaagtttattgtctttattttaatgtattttttttctttcaatatttagattaatataaagcttatggccggccatcacatcatgtgggtacatttcaaattcaacttttgagttataggaattcaacttcattatttatgctcataatcagtggttattattatacataactacataaaatttaaatatatttattaataatttaagtaaagcctactaacctcaacctcagaagatgtggtggctgaggaaggttcttagcaaccacatgctcatcgaccaattataatgtgtctattaactccttttttataatttcaaggttcgtttagtgttattcataaggaaccttggtataaaatatgaatcacttggaaggaaaatatgaaaaagtatgaggtgggccttttgattcatgtggtggagaattgttgagtgtttcaagggattgtttttgtggtgactaatgataattgtgtacttgataaaattaaataaatatgattttttttttctttttctgaaaaataaatatgaatttaacagccagatcattctctgctgtcgttgactatgtattatgtgaaaatgaagaaagaatttatttaccgtttatttactctacaaccaaagttttattttaggttgttattttagctaaattttaaagaattattacataaaaaatataaatttacactttatttataaaagtactttcataaggtaaaaacaacatttatacatttatgtgattttaattaccaaaacactatcacttacacaatcaatcgatggttgttgcatggttgctgcgtgattgttgcatggtgtggttgcatcagatgaaattttcaatgagacgatggttgcagggtggttgcagggtggttgctaggtgataggccgaaggttgcatcagacaaaagtt

SEQ ID NO: 14672 - DNA, 4370 bp, Cannabis sativa
tagtatgtggagattccaaacctccgggtgttcctgggcaagcaatggtaatcctagtcacaattttgggatttcaaatatagggttaatcccaaaattcaatttcagataatcatataatttgcattccaattatagataagcatatagagctcaaaatgagctttccaacgatataaagatcgtccaaaatggagtcccaaatcaatagttatggcaaaaaaaaaaacctaaaaattctcgaggaaaatagggccttgccgcgccgagtaaggccacggccgcgccgaggggccctgtaacccaaaaaaaaaactgtcattttcccaactttgaattcacacctaaaactcataccaatcatttcaaaaatatgcataacatacattttaaatcaacacaacccaactaactttgatatcaattttgagcatcaaaccaagttcaaaacaacaccaaagatacacaaattggacataccataaaatctcactataaccaacaagttgaactataaacaacaaaacattcacaccaacaatacttgcccaaaaaattagagtcaaaacccaaaaatcaaaccccattttcaaccctaaaaatcacacaaaacactcaagttgcaatccaaatagtctcaatggctcaaacacatcaaaaattactaatatctcactcaaaaataacaacatgcatcatcacttcaagaacatcatgaacaacaaatagaaagcttcaaaaaataagaattcaacttaagtaaaaaaaaataaagagcttaccaccaaatccacaagctccaaacacaaaaaatcttccaaagatacaccaatccaagccttaatttttccaaaattaatcaaaaattgaagaaggtgagaaagggagagagagaggggttcaactagggctgagaataaaccaaaaaatgggtttctaattcccaaaattagttttttttttgttgaaaatgaaataattggtcaaatgaccaaaataccccaaggccaatatatccacatatatgcaaggaaggtcaaaatagtcatactaagcacacacatggaaaacaataatttcagatttctcatttatcataataataccataaataaatcctgaaaatgtattttgggccccaaatttggttcgacccaaaatacccggttgtgactataccgtgtcgacttgtcaaaaaatacgtacaaatagacataataaacaaactctataataatatagtctataagcacgatatatcattaaatttatgattttacccttctcggatcaaaattacgaaaatgcccctaatataccaacagggtcttaaaatgcaatttatcagtatagtttcacatattaaattatataataatataatttctcattaatacataattaatctagttagggtttctaatccggtttcataaaccttaaggtattacaattatcccttccttataaaaattctatcccgaaatttacctgaacaactttggatatttctgctacatatccaaatcgagtacctaggttacctcttctactttactgttcctccataacactttaatcagtgcaattgtcttgttttgcaattgtcttggttattttttcctcatcttttgttagccgccttactttggcaacttcaacattgaaacattggatatggttcttcatacattagaaaatacattttggggactgtttagtcacgtgaggcatggtgttgggccaacaaatacattagaaaattgtttccaagatgagatggatctggagctagtcacttgaaccatttgtatatggcatcttttagcgtcaccggaaacattgatacctcaccttactcaaaacctttttcattttcattagctcattaaaggcatccaggtggtattttgggtctatcatcctatcatgtgatgaagtgttaggctctttaaaaattggtgggagctattctgcttggatttccctggtgaaaggtgattctttatcgaacttatcatcgtcccagtttgactctttcgaggctgtggaggcgatgttcatacacaagtcttccatttccttatctaaccttttcctccttctgtttagtctatctcaaaggtcttgaagcgttcatttgagcacttctatgcttctgtgaggtgcaacaggtgattcacgcctttgagaggcatgcttcctattgagtttttcccttaaatcaaagggggtggctttggccaaggtcttctagggttcaaaagagtggtctcgtctaccatggccttctagctagttttttctgggcacgctctatggtggagaagattgtggggtgttacttttggaagattcaggagtccctcttgccttggtcatctaattccccatgtaactggctatgcatttgtataaggggacatttggctgtccttccaatagaccatttagtacctcttgtatgttggccacaatttcctctagccactgttttttcaacctaaggttgtttatttccctcgcgtggggcaggcttcgcatgttggagcttacagaataaactcgattctcttttcaaagccagtggcacgacgtgttgggatctcgtggcaccagtgggggatatctgattggtgatggatactgtagtggtctcttattgtcttccagaacgggtgtcagcaatgtcgtaggtctgtcccattccttagtgtctttttcttgagcatgagcaaggttgccttccttagcaggtgttagtttaggtaccttcgtcatcggtgggtctccccgcccttggatgttaccttctggattgcttccctaatttccctcttttgggccatcctttcttcaaccctctccaataggtggtgccggggttttttttcttgccacagttagttggttgctttccaaatgcaacttgagtcttgtttcttcccacagacaacaccaaactgttgacggtaaaaacttgtcagtaaagttaaggaccaaaaaccctaatttttttaacaagaaaagcaattaagtatggattatgtaatgattagattagagaagaaatcttaattattttaagattgttaatggcttttatatgcaataataattctcttgtttacaagatttcagtccccccttctcaaataaaataaaggggtatttataggtggctctaatggcccattgctacaagttgcattaccctaagtggtccctagggggaccatatgttgcgagaggaaggctaacggccaaaactcacagtaatgggggtcaggtagtggtggtcgggtgtcaggtcatactgatacttgggatcatgctcccactaccttgtcccccttataccaattctactttatcatcttttgtaggcgccgtggccgtacttattcgtatatccttggagtaccttattcttcccttatagatttcctccctgatgaggctcaagactttgttgagtcttcatgttattggtagggttgttgtcacttggagtttctttaaggtgagaaataagggaaaccccatttctccttggtttgagggagatagtagaggtcggctctagcgagacccttgtctggctaggctaaaatcgcttaagcatgggaaggcaaggtctcctttgctttggtggcatgacaagttgaggtgacgaggagcgggagccccttcttgctcgggggcggcacaacacgagggtcaacgaaaccttctctcgctaatagggcggcgcaacatggggagatgacgaggagcgagagctctttcttgctcgggagcgacgcgacacgagggtcagcaagacccttgctcgctaatgaggtggcacgacacaagggtcagcgagaccctctcttgctcgtctggggggccgacatgaagctccaatgaacttctttgtttcgtccttcttctcttctttcttttctctcattctgatgtgatctcgatattttttcttagagaattttcggagttaacactattgttacacaaacattgaacttaatactactgactcgaggattagagttaattaacaccttaactatgtaaaaaatacttgtctctaatctttacttctttctttttagctcttaaacatgtttattattgattttcgaaaaacttagtagataatatggaaaaaaaaaacttaaggtatggtataatgtaaagtatgtttggtaggaaggatggagaagtggaaggatggagagtttaagaaggagagagagaatagaggagtggagtaatcctttgtcttgtttggtaaggtaggaaggagagataataattttgaatccttttgtttggtattagaaggagaattgaaaggatggagagtg

SEQ ID NO: 14673 - DNA, 8198 bp, Cannabis sativa
  modified_base (8151)..(8172): a, c, t, g, unknown or other
ataaaactttgttttttactcagaaaagaaaaacctctaatatttaactttacccgttctcccatttgtcagaaccgccattctttcctctccttctggcttattccttccacggttccacctctcgtcagtctctccggtagtgactgttctttgcagctgcactctttcttcgattttttccgatgcctgtcgccggcagcaactgtcatattcagtttgaagattagattttgttaaaaaaataaaattaacaagctgaaatttgtggactttaatggaagcaaagttgttattattattatttttttaaaacattcctgtgcataaaaactagaaaataaacggaagaaaacgcaatattagttgaaatattttctgttcgtgtttaatttcttagagatatgcaggttttttagttgttaatttcctacgtctgttatttggcagtttagtctttatcacttattaattatatgaatgccaattcttgtgatggagttggccaattgatacaaacgtatttgccattccaagagtttacttgtttttgttttcttttgttttgcttcgttgattacactcagataatcatccaagtatgttaatgaatgatttagtacttgtttgtattgtcagattttgctaccattttttcccaatcattgaagtgctctgtagttgtcaaagttgtttttccaaagtttgtagttgaattccttgatcatattacttgagattctcattaaaattttccaaccacaaaaggttggtgttgttgcttacatttagtatgtaagtatgcatatgtatgttaaggctattgacctgctttctattgaactgatttttatgtataattttataaaatattgccaaatgggggaggttttactattgtggctgattcatatttatattgagagttcttcgctgaagcagatagaaactttttctctgttcctgcgatatttatgtaaatatatatttgtaaatattgttattaactatgtaactcttgatttttcttataatactctttgcatagcaatggaattgatccaacttgttattagtttcaatttagagattagaaatttgaatttatcatgtttatatcatgcttgagtagattaaaactatcaatctcatgtattgtgtttgtgaccatgctgtaattgtattgttgttgagctatgcactgtgtgagtttgtgagatgggtttcataatttttatataattatgcttttttagaactctaattatatcaaatcatgtcaacttcatgttgtcacatgacatgtttacagtttcaggtttgccatagccaaaatctgaaagtcttttctcattctgtgtcttcgtatcaagtatggattcagacttatccccatctatggtaaatcacccagagcacacaagtatggtcacggacttatcattgtctccaaagaatgaagacaagaaggaaaagaagaagaagaagaaaaagcagaagaaggaagagaaggagaagagtcaagagttgtccgttcaagcaactgtggaaatggtcaaagaacagactgacaaattggcacctcttgtggggtatttcccttctggatttgatccgaataaggacccttcttctactattactagggtttttagaaacaaggataagcctaaaagactcgagcttgtggtcactccaaatgctacgtcaaaggtggattttgttggaaccaactattctggcgaagctgcagctggtcagcattgtagctatgcgcttggagttcttgacaaggaaactcaaacattgaagattgttcctattgcttccaataaggtattttatagaattttgtgtgggaaactatggaggttctgttatttgctctctttccctttttgagacactgaggatttatagttgcttgagctttagtagttggcagatttgtgctgtgttcgtatattgtttgtttgtatgattatcatcagtaattcatctgtgtgtatttgtacgtaggtgatgtttttttctaaattttttagcattttagactggcactgatgatgaaaaagttaaatattataaatgctcatgtctttttcgtttttccttatattctatgtccacgcaagttattgttgaacctcactcagtcacttgtatgtaaatgcttgcccagatatttagactagaacccaaaattcgagggctggttggacagaagtcagagcaaacagaaccttctaaattgaaatcagaacagatggaagagctaactaatcactatggtacaataaggtcaagaagagaggtaagttaccgcttttctttgtgtttgtaaacttttttaatgcggccacacttggtaatgtcactattgtatcttgttttgaaagtatctgagtttttctttttagcattagaatatttagttgaattttttgtgataattgcaggctgagaagttacgagttctgcataaagaacacgatcctagctctcaaagagatctgcttgggaccattaatcaaattgctgtgaagaaagaggacattggaagttctgaggttcatggctcccgcaataccccaccatataattcagctgctgctactcctcaggaggcttacccattggagaagatcatttttgaaggagaatgggatttcctacttgaagatatatatgaccttttgcaaacagaaacagaagtgacttgggatgcttatccaacctttgttgccaatagaatacataagttgcacgaaatcaaggtatgtgttctgtgcctaatgtttgagttttgtgaatggtgtacattaaatgctctaagatggaacttgtggtgtggctttgccatgtacatattcatttcccttttgatgctttattatattttctatcgtattctggattggaagacactttccatttatggaatgagaccttccagccttttctctgggtaataaaaaatcaagttcctcaaaagttgtactgaaagacaatatagtttctttactattaaagaacttcatatatggatttctaatgaaagggtaactacaacaaactaataaggctatatagctcgtacatccctgagactcaagactaatttttatcttgtgtaatgtcgtgtgtttgtaggatgaagaggagaagaagaggctgtcttgcgttttctcatacattacccatcttgtgaagtttaaagataagcactcaatggatcatttttcctccgcaaagaagcacaggttgccaagaattatactccagaagttttcatccatgtttgaagacccagactctcacaaactgtcaccagataaacacagtcttctcattagttatgtattggtactcacactacatgctgatggattccgagcaaatttgacagatatagcaaaggatttgaaactagatacaggaactttgagagagcattatgagcacttgggttgcaagcttgttcgtgacaagaaaacgttggttgcaacccttcctactcctctcaagtttccctcaatgaggcagaagcgccgacaatagtctaactttatgttttcggcttaggtttggtacacaaagtgttgatgtttttctttgtattcaatacaatagtgccatactcattgggaatagtttcgcttttgaaagtttaagtttgttgattcaggcttgcaccatttttgacaaagtcgtgttgtattaatgagttttatgaacgtattaaaattgacctcattcaacccaaaaaaagaaaatttagaagttttcccacacgagctgtactcatcttatttcgaataaatttcaatttatatgagatgaaagtttttcatgttctaaacatgtgtgtggtggtgtactactactaattccacattaacaaaaacagaaaacaaacgaaaaaccgctcgttatagctccaataaatgcacaagaggattttcttgaactaaataaggacaagcaaaatttacatatctaaggaactttaacatgacgctgacgcatataccaaaaacacatatggcattccacattacagttctttttgtttatagtacacagatttctttactcagaaatcaaatttgagcccaagagagaaaaaaaaaaaacaaatggacattagcaatatatatgaattagattttcttatctaagagtagtatgctgggtgaacttttaatccattaggatttgctcttgaattttctttgagctttcaaatccaccacaatcacagagatgttgtccttgctgcccttttgaagggcaagcattgagaggtactcagctgctgcttgcgctgctagatcggcgcccaaacccctgtctgccaaagctgtgacaccgttcttcttatgccagaggagtaaccgccgtcgggctacttcacaaatttcttcattcgtcataacgtcccataaaccatcactggctaagataaggcactcgtcctctctggctcgagggacaaacataacttctggttctggaattatccacggttttaaatatctatctcctgtaacataaacaggaaagagtagtaattagaaatcatgcattagtggaggttaagatcaatgtcagactaagagggacagagataatacctatggaccttgacattgcaagaacaccaaaaactcggtgaccattccactgaatgacctttcctccggacgcctcaatcctagcatattcatcatctctattgggctgataaaatagacaaaatcaaagagaaaaagttggaagattagattaggttctccaaaaataagttcaggcttgtctacagttagatacgaaagaccataaaaccgccttactttatgatctactgacaacgggacaggttctttcccacggcatagcactgctcttgagtctccacagtttgcaactatgatgtgtgatgaacagactaaggcaaccacagctgtagacccaacagtttctggggcaataggctcaattgtagcatcggaagcatctccattaatttttccaccaatctcatcatctaccttttgaaagcaagaagtaaaggctttctcccacagtacttgttgattttctccaacatctccattgcttaaatcatcattacacatttctatctcctcagccaaagccaaatggatacactcactgcaataactagcaacctacacaaggagacccctcccaataaagttaacaatatcagagttttccagagtaaaattactatcataaggaataccaaaagtggtgcaaatctaaaatattggccatatgttgttgagaagtaggcaaattactaacaaataaacatcacagaaaagagaaattacctgagaaccaccatggccatcataaacaccataaaaatgactgttcaggtgggtcaaattctggttggtttcattgagcatatgattgccgaaaagcattttgataggaatttttatacaccgaggtatagcagcaactgcatcttccatttccggtcttcttccacaaatagaaacagaaccccaaagggggatgcagtcctgttccaaaacacttcggctgccccctttaccgaagttcctctccccctgtgactgaataaccagtgtggaggccactaagtcagacttgctggaaatatccgaagcaggactcactgctgcaacaataacttcaccagaaggtaccttaccattgcttgattccaccaagataatagccttagcaacaatctgaccatcttcaacattttcaatctctacaacatctggtatgcttatttcaggtcccacccccaaagctaccaactcttccttgataattccattattattgtcacaaactgctaccatttcatcatcactgctaacttggaccataacatcactggtaacacaaatatttccattctcgggcaatatagtaaacaaatcggctccacctccattctctccttgagttgacatggtcaccatactaactgtattctttgcagcattacaactaacattggcacatgaaatagactcagcagacaccaacttactaggatccaatggtaaatttccagcttcagttacgagcttgagctgagtgaacccaacgtgggttgtgattccagagttatcacacataggattatctacgctaaatgtcattgcaactgccgaaggcatctcttccatcaagtcccctctttctctaccattaagctcttacatttctttcttcattgcataaccttacaattcttaatgtgcttcattcttttcggcagtgagcccaggttagagttatctagcagaaacaatagaaatacataataaaatcaaatcaaacagaataaaataatcttagtatcatcaaaagaaacataaaacaaaagaggaaaataaactgtggttcaagattcctagaatgatgaaggtgaagaccaccaaccgaatttctatcagacaaatccaaacgaaggccttgcccagcaaaagaaaagcacgtaaaagtcaaagttgatacatgagaaacaagctgaccatcagtcaatgctaacacataagctcataagtgtcagaaaagactcttaaaaccactgcaaaagtcataccaacatagatttctgccaccaattccctaaatcctattattgtatatataggagggctatcctaagtccttttcatcagagtcctagaaaaaagttatcacttttctttaaagtaaatccaaactgaaacatggtaaccatatcaagtgaggaattttacacatgttcaaatatactccacagatccaccaatactttgacaactaaagccaaattaaagtacaaattacaaatccaagattagaaattcatgataagtttcagctaatcctcaactaaacgaagcagatctgacgggcagaaacaaatctattcacctaatcatcgaagtatagtactttcacgtgtaaattgattttccatggactaaaaagttagtaaagtcttcttcttcctggtacaacaatcctatcctcaacacccaatccttattatataaataaaaaagatatatacatgttcatatgaaaatgactgcaatttaatctttttctacaaatccaggaagagaaagcaaaagggtcatgggaaagaacctagaaaataggaaaaactacccctaactatatcacaaggaaagcccaaaaagatgaaaccttttttcacataaaataaataggtttcctggatctgaggaaaaccatctatcttaacctctcttatcaaaagggtcctcctcctttcttcccttcttccaaccaacataaaattaccattaacccactacaaataatcaccaggagattaaattttgctacttggtgatcctggttggtaggtccctaaaaaagaaacaaaaaacaaaaaaacaaatccttacctgagaaaactgaatagagttatagagttgggccaaaaataaatggcaccttgaaggctcttcccctagattttttcttctttctgtgttgggattgaaatggagtcttcagactttgagagagagagagagagagagagagagaatgatagagagagagaaagagagagtctttttttctcttttcactaaggactcctttttaagacacgtatacatattatcttacatcatttatgggtgtgtgcgacagaaaatgcttagcttaggactgttgttaccatgaagacaactactcccatggatttttcaagaggacaactttgaaaaagccacgtgtctatattgtctcgataatgtctcttcaacagttcccatctctattattactcattacattaccattactactacttcacacaatcacaaccattaaagcaaaaaagaagaaaaaaaaaaaaagaaattctttctgtcaatgtaattttacggctccaatccaagtttttcccaaaaatatctcactttgttttcatagcactttcttttttcataacttttttttttttccttttaattaattatagaataaatattagtttttccgctagaactaatgttttgtcttttgactttttttttgttgtaatttttttcgaaattatataaatcgttacaaatacctaggggtgttcatccgatnnnnnnnnnnnnnnnnnnnnnnaacaacatccaatccgcactaagtgc

SEQ ID NO: 14674 - DNA, 4468 bp, Cannabis sativa
gtgtagtttgtggactgagcttcttgtgcaatactgaatactgataatgttcttaaaattatatcttcaggtacagattggcaattctcccctgtacaagttagatagaaagctggggaaggggggttttggacaagtatttgtgggaagaagagcgactggttgtattgcaggaactgggccggatgcctttgaggttctgttccctcccgcattttgcattctggtacatttattaaggaagtttgttgtgttgctaatgataatcccattaacgttttgtaggttgctttgaagttagagcatagaaatagtaaaggctgcagtcacggtcctccatatgagtggcaagtgtacaggtattattattattattattattattattattattatacgcttttatcattattagtagttattaagaaccaagttttatcgcctaattggtgtttttgctaataaaacataacagttctctcaatggttgttatggaattccctctgtccattatagaggccaacaaggagactactatatcttagtcagtttccattctatcagttgtgattcttttatttgttttgaaattgcttttgccagtaaatattcatgactaacaatttcctgattctgaaaataggtcatggacatgcttggcccaagtttatgggatctttggaacactaataaccaaatgtaagtaattgtctgttctactttttccttccaagttaccctttgcatgtttcaaattttattatcaattctcaatatactcatacattcccaaatagtgctacattatttatttcttaatgtctactctatttaaaggttgtctgaagaaacagttgcttgtatagcagtggaggctatatcgattctagaacagcttcatttcaaagggtaagttgtcagtcattcttatctacgatcttttctttttatttttcctatggacctattctaattatttttgtgtttcctaattgaactccagttttgtgcatggagatgttaaacctgaaaactttttacttggcctacccggaacatctaatgagaagaaattgtatcttattgatcttggtttgggtaagtgtttgttaatgtgtattagatcaatagtacaacagacaaacaatgtcagtctgcttctgtacttatcataattattgcacaaaactaattttcctttttttttccttccagcgtcaaaatggagagattcaccatctggtcgacatgttgaatatgaccaaaagccggatgttttcaggtactacttcctatgttaacgctatgcatggtcaatggttaaactgtaagatggctcccagaaagaaagttaaaccacttatttttttcactttaatgtgattttctttctttgatagtctgatatactttcttacttttgataggggaactgtacgctatgcgagtgtacatgctcatttaggtagaacagggagccgtcgggatgatctcgagtcgctagcttataccttggtatttcttcttaaaggaaaacttccctggcagggctacgttgtgagtatttcagtttccattttacatttgcaattgtaatttattatttgcctactttttcttttcttggttctttgtttttaatgctttcggaaattattgtgatgcagggagataataaagggttccttgtctgtaagagaaagatggcaacttcgtctgagacactatgctgcttgtgtcctcctccttttcaaaaattcattgagatggtgactaacatgagattcgatgaagaacccgattattcgaagcttatttccctttttgatggcagtataggtcttaatgcatcactgcgaccaatcagaactgacggggcagctaaggtggttgccgtatgtcatagcttattgagtagctttcagtaagatgattttttttcctttcaattaaatgtggtatcttcatttgatgtagtttggtcaaaaaagaggaagatcacttatggagttgggagatggggagcagcctaggaagaaagttcgatcgggtagtccagtctctcagtggatctcagtatataattacagatcagccatgaagcagaggtagttgatgtaaacatgtgatggaactttctgtccgctcttttatctttttcttcgttgtgttcctttgtttgctttcatactttatgtttgaagatgttggcatgctagaaatgcactttggttggtctttagcccgatctatgattctgctaaatgcttgtacaagtagctcttttggtgactttttctaaaaaaggatgatgaagtgtcaccagactccaacatagtttatataagaatcatttcactgatttgtgcttgtagactgacattgtccagctagaaaatatctgtgagaggaaagaaagagggtaggctggatggactttaggaaggagtatattagtgaaaggatcttaaatcatcaattttagcaaatttcttacaccctcttttttggaaagaaaataatttgtttacatgtttgttatttccagcaactataattttcttcttcttcttttatttatttttctgctttttgatcttttatgtatcagcaactaaagaaagtctatgctacaggtatcactacaatgttttggatgcaagacttcaacagcacgttgataaagggaaagaggatggtttgtacattagctgtgtatcttcttccttgaatacgtgggctgtcgtcttggatgcaggaacaggtttttcatcacaagtttttgaactatcacaaattttcttgcataaggttggtttacctgaatttttctttccatagtttcttcttttacatctgaagtgtcatttaaaatgatgtatttgtggattcacaagttttaatctttcattttttacttcatcaggagtggatagtggaacagtgggagaagaattactatatcactgcagttgctggcgcttccaatggcagtgccttggttgtaatgtctcaaggtaaatgaggttttattttttaacattcttataattttgtccctttaatttttttttagtcctttaatactagggtttgtatgtaatacgtatctttattttcctgtgaggcagagctttgttctctgcagtttgctttcgtgtgaggccatcttggcaatggtttggaaaattttggcctaatgatctttaaaagaaattttggttatatgaatgaatgataataaagcattaatggtttacccaagtggggtagcttaatggttaggcgtgtggtttgctctcaaggagtcttgaggtttgagtccctcttgggtacaattacatgggttacttgtactaattaggaaagagtgaaatatgacattactggattcccaaggattgcaaatattttgataaataggcaaggaatgggtttctatacaattatttttttagagcaaatgatctaatgtaccccactaaagtttcaagcttgataagctgtctttcgatattaaattcgcttcattggttttgttggatgtgtagtaaatatggtacatttttctaaattttttattttgtgagttgtgccgaatgatcttacgagtacactataatgacttcgtcactctcccccaataaacccgaaagcaatgtaatataatgattttctttttcttcttcttttgctgttgttaggtgtgccttacactcagcagtcttacaaagtcagcgatgtttttcctttcaaatggattaataggaaatggaaagaaggcttctctgttacctgcatgaccactgcaggtagcaaatggggtattgtcatgtctcgcaatgcaggtttttcgaatcaggtattgcaatatgaacttcaatttagatactgctttattggaaatactgcagaagtcttatgttttttgattttaggttgtggaacttgattttctctatccaagtgaagggattcatagaagatgggaagatggataccggattacttcaattgctgcaacaccagatcaagctgcattcatacttagtgtaccgaagaggaaattgcccgatgtggcacaagaaacacttcggacatctgcttttccagctacccatgtcaaggtacaaataattgcataaatcttggtagggacaattagattctaattaggaccgttatacttgtgagattgctactaacagagattactcattccaggattttcaatcttcttacaaccccatcatggttttcaatcttcttaatatattaggcattatggtgaaaaagaaaagctcttaactttttgttgacaagttcatggatcttagatattaagcatcgtcactcatttttcgggtttaatcatattctgaagagaattaacaatgaattaagtttagttatctaatgaaacattcttcgagttgctgcagtatgtcattgctggatagctttcat

SEQ ID NO: 14675 - DNA, 8552 bp, Cannabis sativa
taaaattgtatttttataaaattgtatttttataatttttttgttgtttttgtgtatttgtgaaataattcctaattttttccactttattaagcaacatgggcctcatacaatcttttcggcccaagaaccatatttcattaaatgtccacgttcaagtttctaagaaggcctatgtagtcgatatacaatccaattcctccctggttttccagttaattttccctgccacttaatttctccattatttgcagctctttttggctaatgtcttctacatattttctttttattgatgtggatatagtcatacgacaagcttattctactattgcaaccattttctgagtttacacacgtaaatttttggtagaggtctcaaactgatatataatacatgaaatgaatatttcttttttaataagattgataaatgtgagatgttcattaattttgtacatgttttacggcttttatttttataccccctttttacttttttttttttaaattaaataaatatagttgtaattagtaattgtttacccagaaactcactctggtgatgtggacatcaatatttgacatgtgtcaagaaataaaacatctcagagttgagtagtccctaattatggcagtcgacctggaaggggtccctaaccctgtgcccaagttgactctgggaactctaaaatggttgtttggatccctctaagtagtttccaactcactagctttcagtattctgtaacatagacatgaagaatctaaattcaaggcctggaagttgaaaatacacaaagcaacaacccagaagtcaacccgggtgcctagcgcccagattgacaaccctcatagggtttaggttttcgaaccagtcttagtgccaatgggtcaaactttatactgtcagaagaattagacatgccaagaacatatttgagacaacagaatcaaaatcagagcacttttagttttaagcccctggagcaccaggtaccccagacacccaacaccaaggttgacatattgtcaacttggagcacttccaaccacaatactaaagaattatacccgagaattttcttcgtcttcattcaaaacgaggaagcaagtactttcgaaggagaaacggatcaacttggaggccaaaatggggacccagcacctaggttgggcctagcgcccagggtgacactttgtcaacctgggccacttctatcagcagttcaaatgaagtcttccaaacatatttttcgttttcatcaacatttaagatttgcgtgctttcgagaaataaatggaatcatttgggggtcaaaactaggatccagcacctaagttgacctggtgctaggccaagcgcccagattgacattgtgtaacactaggccatttctaatgagtttttctgagaagtatttcagacatattctctgtttccattaacagttaagatttgagtgtttccgggaatcaaacgaattcatctagcggccagaaactggacccagtactcaagttgacacctagcattgggcctagcgcctaggttgacattttatcaacctgagctatttccaatcattttcctaaaaaaagtgttctaggtattttttttttttttggcataaaaaataacaaaaatacaaatgatctcaaggagcaaacgagatttccagagggctagaaccaggtcccagcacccaagttgacattgttgggattttatgccctaaataaacccatcttgagataatcttattaactgttcaataaaagatagaaatcatattatgttacttggttcacatgatactttcgtgattatagttttaatatatacattctattaaatcctgaacttatggacaatcatgattgtagtattatctacacagtgaaaaataatcatggtcatatggttcaaatttttagtcccatgatttatcagtgcaccacgtttacactgacgtgataattaacgatgtagtttactagcacttggctaagtggaatgtcttttccaaggcatgagtaaaataaacaaagattagatgtattggctatagatcggattagaccgatattcacagtgaaaaagatatcgtaaacttaccgtaatatattttctaagtgaatatcacttaattgatcttagatcaataatcttaatcctgagatgactaagttcttgcttaactgtattgcacgagtcctttgacttgttcattataagcataccagtagaattagtgcatacttacatcttgggaacacggtagctagtacaattgagtgagagtgttaatcatagaaatggaatctataacttctataattgtttccttagagcttgaatgaaatgcataaatggaggagctcttagatcagtaattatattagtttactaaaatatcatttataagaagctaattgttttaaggacaaaatggggacccagcacccaggttgacctaggcgctaggcccagcgcccaggttgacactttatcaacctgagccacttctatcagcagttcaaatgaagtcttccgaacatattttctgttttcatcaacatttaagatttgagtgctttcaaaaaataaatggagttgtttgggggtcaaaactaggacccaatacccaagttgacttggtgctaggcccagcgcccaagttgacttgaaactaggcccagcgcccagattgacactgtgtaacattaggccatttccaaggagttttccaaagaagtctttcggacatattctctgttttcatcaacagttaagatttgagtgtttctgggaatcaaacgaattcatctaacggccagaaactggacccatactcaggttgacacctagcactaggcctagcacctaggttgacattttgtcaacctgagctatttccaatcattttcctgaaaaaagtgctcttggcatttttttcgttatcagaaacaacaaaaatacaaatgatctcagggagcaaacgagatttctagggagccagaactgggccccagcgcccaagttaacattgttgggatttatgccctaaataaacccatcttggtataatcttattacgaaagatagaaatcatattatgttacttggttcacatgatactttcgtgattataattttaatatatacattctattaaaacttgaacttatggacaatcatgattataatgttatacagtgaaaaataatcatgatcatatggttcaaacttttagtcccataatttatcagtgcaccgcatttacactgacatgataatcaatgatgtagtttactagcacttggctaagtgaaatgtcttttccaaggtatgagtaaagtaaactaagatcagatgtattggctatagatcggattagaccaatattcacagtgaaaaagatattgtaaacttactgtgatatattttctaagtgaatatcacttagttgatcttagatcaatgatcttaatcttgaaatggttaagttctagcttaactgtattgcacgagtcctttgacttgttcattataagcataccaatagaattagtgcgtacttgcatcttggcaacacggtaatacaattgagtgagagtgctaatcatagaaatagaatctataatttctataagtgtttagaagtcttggctaaaatgcatgaatgggagagctcttagatcaataattatattagtttactaaaatattatttataagaaactaagtgttttaaggacaaaatacattgatgggtaaaacgataattttgtccctattcgatgaagaccatctataaagaatcattaattgattaaattaaaacaatagataatttatagcgtatttatttttttccattctatacaaatttgtaacattaattatttagcaccctttctaacgattcgcttaaatggtctcttgctttaatctttattctcttctccaagttcttttgtaccggtatgatgtttatccaatttatttatattaaatattagtgttgtaaatatgagttagattttttgacatgacacgaaactagcacgaatttaggtggtatgagcacaaccaagtataaaaaaatataagctttggcacgatacgacataaaaattacaaatgacacggtatataaacacgaataaactaactcgaaaaatacgacatgaaataagctcaaaaaacacgacatgatacattacattaaaaacactataataataataaatagataagtatttatcaagtaagttaaaatgataataaaattgaatattataattttataattaaaattattagaaaatataaaattaaaactatatagtaattaatttacaaagaaaaatataaaaatttgagtatttataagtatatatttaagttataataactctaattatttttaatataattatctgtaaaatattattgaaaaattatatgaatataattaaagttatgataaatttatattttagtaattgactcattatttgtaaaaataaatgtaaaaaaataaagcacgaatttaagtctgactataaaaacgaatcagtacgagtaaagcacagtaccaattagatacgacacgaaaacaccaggtgtaccctttaaaaatattgacataatataacacgactcgtattttagaaaacataatataatataggtcgagctaacacgatacacacaaatttacaatactatcaaagatatctagacagacaaaaagcaatatttgaacaggttttaaattaaaggctgacattatactagctttaaatttttatgaatagaaacaagttaggacttgaaccatgtagcatgcattgcacagtaatgcatttcattaaagatatatatatatatatttatatatatgtgaaatataaaaagaacctaatttatggagcaataaagtttgtcttgtccaaagtggggacacacatctctttcttctaaaaacgaatcgaaattggatatttttatattgagaaggcactgctgatgtctagatattattattagtgtaattagagaaatattaaaaggtattattaatgtttagtacttttttatatattaatattgttattttgtctaattaagtattgggtcttttataatgtaatataataatttttaagaagtattattagccaatcgtaaaaccacatttttagaggtgttaagcactattagtgttcaataataatactcgtgtaattaattaagtagtaatttttatataatttaatgtaataaattttaagaattagtgctagtattactaaatagcaactgttttatattatatacattgtcttgaactgcgtagcagtcaatttatacatgtcaaacaatactgtgtacataattaaagcccctaaatttataaccctaaaccataatcacttgttacaaaagccatagaaaccttctctttgtactcatattactctaaacactcttaatcttccacagctctttcagcacatactctccggaggtacccatatgagaaagagaaactactcttagtaaaaccacttcaaggcaccatttcctttgttagaaatccagtcttttctttccatgtcttcaacaatggctaagcaaaaaaatcagaagaagcccagcaaacaaactcaccaccaaagccagaaacttgaatcccaaaaggtagaaaagcctccttcttgggcagttgtgagagatttacttacttgcaaatattctcaaacactacaaccagaagaacaaaagaagcagcagcagctgctgctgcaacaacaacagcatcagcagaagctgaaacaaaagcaaaagcaaaagctaaaacaaaagcaagagcaagagcaagcaatagaggaaaatgcaaagaaaaacaagaaaatgaagtgttctggctctctatgcagcaacacaaaggtcatgcacaggcctgaaacaggttcccctgaactccacaagaaaaaagcttcaatgggctcaacattacccaacaatgaatcttcaaacagatcatccatgaaagctccagtacatgaactcaatggagttgtttcaacttcctcttcttcattatctgtctcttccaattcttctgtaggtggatcttttagaggaatgccatttaggagattctctggttgctatgaatgcagaatggtggttgatcctgttcttggattcacaagagacccttctcttaggaccaccatctgtacttgtcctgaatgtggagagattttcatgaaagctgaaaatctggagcttcatcaagctgttaggcatgcaggtaaatacttgtctcatctctttgatcttttctacctcttatttccataccctttacttcaatttacattgtaaatccaaaaattcaattgcaaccctgtttaagcaagtaaatttcaactgatttaatcaagattttctgagctataaacgcagttcccttattcaaaaagtcaaatttcctcttaacattttaatttgtcataaatccacagtttctgaattgggtccggaagatacaagcaagaacatagtagagatcatatttcaatcaagctggctcaaaaaggaagccccaatatgcaaaatcgaccgaatactgaaagtccacaatacccagaaaaccatatccaagttcgaggagtatcgagaagccattaaagccaaggccaccaagctcccaaagaagcaccctcgatgcatcgccgacgggaacgagctcctccgcttccattgcgccaccttcatgtgctccctcggcttgaacggctcttccaatctctgcaactcgatgccacaatgcaacatttgtagcattataaagaacgggttcaaggtcgcaggagaacccaccggagaagggctcggaaagggtatactgacgacggcgacgagcggaaaagcgcacgaccacgtgggagaggcggggggaaaccaaggtgagaagagggcaatgctggtttgcagggtgatcgccgggagagtgaagaagaatatggagggaagtatggaggagtatgactcggtggccggagctgtcggagtttactccaatttggatgaattatttgtctttaatcccaaggctattttgccttgttttgttgtaatctacactggcttttagtgtaattgtgtaaacacttatattagtaagtgtaagaatttatggttttattaatctaatctactaagtgttttattacttcttcacaaattagagaaagaaaactagtgaagttgcataatcacagcacgattactattgtgtgaaatgaaaacaatcaatcaatcacttaggattcagtttatagtactaacaaatacttaatacaatcaagaaataatatataaagaggtctcaagattcaactaatgaaataagcagtaaaataggaaaaaaaaaaaataacatcagatttaacgagttcgatgttcgagctatgtgcaatgcaatacatctcggttggaacagcagcaatcatatttatagctataaatagatttacaatgttaccaaaaatatctcttaaatcattctggcacatttaccccgctttaaatgatccaattcattaccagcaacaaaaaattcacttcatcttcaaatacgcatttttagtacgaacaatttgaaagctctataagcacacaagccttccaaatacgtacaagatttcattctcagatgaaccttcaagattggcagtaaactgtctgggagtgtacctccggattaataacaagctatctaggagagacattctatacaaagtataaacttatttggaagtaccttccgaattctaccagatcttctgcacatggctttctggatccacactaagttttcagtatcttctctcgagttttatagcttccaatcctggacgataaaacttataaccataaccaatctgtgttaacattgactacttcgcgagaaagaaagaatgaaaacaatatatatatatagagagagagagagagagcaatgagggctagggttaatgtttatgttggtttttttatttattctctataagttatgtatatttttgtgttgtgattcttatgacgcaaagaaattattgtgccctctaatcttatggcaataaaatttcgactggctaggtgtttcactaaggaccagccgcacatatctttttgagcctttatagcattgacgcaaaatgggagttattactcaactattactccatcaaaatcagagtaataactcctagtaagattttgtctccacgataattgttaattatctttaatgaacgttcagtagcaattatttgttattaaaaaaaaaactaaagaaaaatgtattgaattgttagcaagtctttgattttgtttttatccttttaaggaattttcagtactttgattaatatcaattaataaaacaaaattatcaacagtttagctacatttttttaatcacagatagcatttagaatatttacaatagagagtataaatatag

SEQ ID NO: 14676 - DNA, 5047 bp, Cannabis sativa
aatacatataaaaagaggtatgtttcaattaaataaaaattagagacaaatttgattaattaattaataaaagagccatttttcaacttaccctaattttttatgctattttatgatataatgtaatgttcatctttcaaaaatatatatatatatatataaatatacataaattgtgatttttattataaaatttaagttgggaacctttaatcattatatacttcatggaatagaatttagaatgcatatataaatgtaaggaattattattgaggacctacttggctttaatatgagaaggaagtagttatacaaggattaatgatactaaacaagagattgatacctaactttctttgctcatcactttgatttttcttagtcccaaagcaaagaaatcaaatgaaattcattgctatctacaccacactctttggcctttatacaatgactcataattagcatggtctacaactttacatgcctatcttaagtcactatttttttttgtttgtgagtggggttccttccattatatacctcatacatgctttgttcacccaagataatgaatcttaaatagtagaccctaaaatttcatagattttttattttttttgtcattgagaaaatattcttaatctatttttttttttttgtaataatgtacgttgtaactatttaaaatttttgttaaataacttatagtgctgaaaataaaatttaaacggttacttattatacatataagaaaaataattgtgcatacaacacaaaatatataaattttatttttgacatgttttcaaaattttttaaaaacttaccggtgatcctaaataattataacatacatacacaattatgaaacaaaaaaataaagttttcttgagtaataaaatacctctctaagaggatgtagtttagacttaccctaaattttttacccttaaaaatatatgtatatatattattatatttgcattaattaggcatatttataggaatagggcaatttgatatatttacgaaaacaatcgttagtagttatgtatgaaaatgggcaatctcacattttcaaacattttttttcctcttgagaataaaaattagtggtctcttctcatccccaatttagggatattttaaaattttattgtgatctatttttttttttttttctattattgtatcacaattaagatcaaagaaatagacagagtatcaagtcaaggggtccagaataaaaatgtacattgtaatagaaaaatattaaacaaaatttttacttaaaaaatgaagaaaataaattcaatgcaatttaaagaaaatgccaaatttcccctttgttatagcttgaaagtctctaaggccttcaccatctccataatatacatataagaagcacattgagccaaataataaaaagaattaataaattagaccaaaattttaaaaagattacaaaaatacgttactgtggagaaattttttatttatacagtttaaacttttaaatttacaaaaatacaaacttcaataaattcttcgatatttttgtttggttgttttatattttatttataattgatttatactaatagtaatgtggtggattttcttgttattttttattattttatagttgatttataattattttaaaattgatttctcgttgttttttaattgttttcttaattctagttaaaaaaaatagttttataattttaaaactttaaaattatatttttgtaaataagaactttagtttaggccataaaattaaaaataaaacataaaaaaaaaattgaaaaattcctaaaaaaactctaaaaatataatatttcaatttgagaattaataaatttgattttgaatttaatagttaacataaaattatactatttattttgtgataattttcttttataaaatagttccaaaagaatgaatgtcttctatggaatatcactaacattattatatcataataataactatctaaatatggcacattaatgaataagaggattgcatgcattaatttgtgattaataaaagattttcttggtaacactcaaaatcaagtaatgatcaaatctctttggatactttcctaacttattttatggaaattgcagattatcaggagccaattttgataattactcccatatttagctgctttaaattggattattcataatgggatgattagattttctatttagctcatcaacactatttcaataatatacatacatatatatttatattaaccaataaaataacaaaaccaaagtaattagttaacacatgtataaattagatgttatatactctagattcgactattcatcagaaactaactgacactacaaaaggaatataaatcagttcaaagaatataataattaaattatattattaaatgcgatttaaaataactcgtttcaattaattataagttgatagaaatattcaaacccgctgtcataataattataaacaataaaaaaaaaataaactttatagaacacacttttgttttctatttttaaaatttaaaaataaaagtggttatagaaaagttattttttttttcaaaaataaatattttacttttattttataattaaaaaaaaataaaaagtaaaagtattatcaaacggtacctaaattactagttcaaaaacacattattaggctcccatcaatctctatttaataattatccattatatatttgaaaactattgattaacaatatcttttccctttacttttgcactttacaaaagtcaaaaattggagcttggatggtgaatggatattaatccatgatgagggcactttttttcatcttaaaaatctattgacaccaatagttcttttattatttaggatttacatcaaactagtgccagccatcaatttatgaaagagtaaaaaggtccaaaatttgaaattgaatctctcaccctgatgtcaaaaaaaaaaaactagaaaagggtaaaaatataaatatttcttcaaaaattgatattaataaagaaaatataattttgagggtaaaaaacaaagaaagataaacttttaccgggtaaaaataaaaagaatcaataagatttttttactgaattataattgtaaaatatcattacgctacactaaaaaaaaaataaaaaaatttcactgaattatgactcttctaaattttattccctaaacatagttttgttataacaattttcctcgaattatacaaatcgttaaaaatatattctttcagttattatgctatttttaaaaataatttacatatgtaaccatgagttacatttatagttacaatatgagatttatttaatagctttaaactaactaaaattctacttattaacattaaatatgcaaacataaattttataaaaccatatgcatattctcataatttattattaaactactatttgtgcattttttttaactcttgaatctatataatctcaataattgagagataaaaatttgcacagacaatttaaatttagaaattacaaatcttaattaaccttactaaaattgagccactaaaacatatgagccaaatttgtagatagtgttatagccatagttgaattaaccttggaagttggaaatatggctctctcgaaagttggagagccaaccaaaagaaaataaaaaagaagaaagcaacttaaagtgaaaggtttattttgctttagaattttgttagatgcttcatagttgatacccatcgttttctctccactcaaatcttaaatggaaattactttattgaaagctttatccatttcgtgggtcatctattctaatgacctatatataatacaaaacaatacgagcatacatcagttcaagtgagttttaacaagtttttgattttcaatttcaagtttttcgagttcagattttgaaatcttaggatcgaacccacccatataaaaaataagtttttcaaattttgggctcaagtgggtcggattcaggtgggtcagctaggctagactttttattttattttatttatttttttaatatcacttttttaacaaaaaaacttaaaaatagtacaattatacaatatgttattatacatacatattacataaactaacacattaataatttaacacacactcacaaattcacaattaaaaaaaaaagacatatatataatataattatataatataatatatatatatacataaaaagaatgctaaccgagttttgggttttcaaaaatattaaatccaaacttggctcagtacataaccaagtcatacctgaacctggtctactaaaattgaaacctatttttttggagtttttctggtttcaggctaggttggttacaggtgggtttcgagtttcgagtataaatgtgcagccctacaaaacagctcataaaaatgtcatttttattaggagtaataatatgtttagtagccaattatctaaattgtattcagaacttattagtagcatatgctactcactactaatgcattctcgcccctatttttatggaatatttttattcttgtattaatggttgagatatttttcttagaaaaaaaaatatgtatacacataaataatacacaaatttgacactagtaacaaattactttaagttttaacaagtgagacttattttaaatgaaaatgattaattacaatcatttatcaaatttatataataattaaacttattatatttcgtcgactaatcaaaatataacacgtgtatataattgtgtacacgtagataatccacaatgacacttgttgaaatctaacggtaaaaagcaaaacagaagtacatttcaaacagtgttatagctaaaaaaattagtttgtgaggttaaatgtaacaaatcgtgtaattcaaataattttactgtcaatatcattttaaaaaataaaagttaaaacaaccaaatgcttattataacataattcatgctgttatataaataataaaaagtca

SEQ ID NO: 14677 - DNA, 13595 bp, Cannabis sativa
  modified_base (8850)..(8851): a, c, t, g, unknown or other
caaaatagaagttgtaagaattatcttttttgagaaactttaacgagtgaatcaaagaacttaatgaataactcttttatgataaacgacacattgataaaagatattaattcatatctccaatcatacataattaaattatacagaatacttttactaaatatctatccacatatgtgatccgaattaaaattacacgcactaaagtatatcgcttagtaaatcatacttggtaattccatattaaagattccatactttaatacactatcaatttgtttaatttatattgtatcatctttattctcttgtacttcccactctatataaatatggaattttcatatatttattaattatatttctataattaacatatttatttatttatacttgtatttcatatattctctaatatattatccattaaatacttgcttttaggacataaactctaacatatggatggttctaggttggacatagacctcatttcaaatcttttttaggtgagagatcaaagtttgattactagcattcatttgcatgttgctcaagtggttgatcatttagtgtggtcaaaggaagcttcaggtacttatgttgttaatagcgcctacaatttacaacagcagctgcaaggcaggtggtttgaggagaatgaggcttcctccttgcataagatgtggagtttgaagctcccaccaaaaataaaaaatatgttatggtgtgcagcgtcaggatgtcttccaaccatggtacaattgcgatccaaacatatggaggttagtcctttatgatctgtctctcgtgattatgagaaaataattttacactacctagtcatgtgtgaggcagtaaaaacatgctggagcagggttggaataggtaccgctgcatcaccttctgaaactttttttagtggtgtattgttgcatttcaatgaatagataagaagagaaagtatcttttgacaactgtatgttgggctatgtggggtgtatgaaatgacttggtttggaattgtaaattagcgagggctaaaagtattttgtctttgcaaaatgttaccttcgatggaagaatgctcagaaatctgaaatagattcatcacagtctgattttcaggcgggtgatggaagtgagcattgaactctgccacaacaaaatagtatcagggtcgatgtagatgcaatattatttaatggtggtcaaagttatgggttgggtatagttgcccgtaattcaagtggcttttcatatagaaggttgcacatttttttcatttggtaccgttgacccagaacttgccgaggcaatggacgttgaggagacccttagttggattaaggaacaagaatggcaatgtgtaatagtggagactgattgtcttggcttggtgtatgcattacgaaactctattaatatgaatttttttgtttggttttgtcatttattgtaaaagtttgcttgctagtttgagaaatatttctatttattgttttaaacgattagctaatatattgaatcataaatttactaaagttgctattagtattatgagattgatggttaaataaagattgtttggtaaaagagattgataattaaataaagtttaatttttcattaaaaaattgttaaataataatatttttttatttttacatttcaaaatagtttttttttttatgtatttttacgaaattctacatagattcctctattgcaactagcgctgcaacctaaattggaacaaaaaatcgtatagaaacccttatttcaactagcgctgcaaccactttagaaactcaaactgtaaatttaaaaaataaagttaaaaaaatagtatatgtagtaattcccttaataaaaaatagagttttgatatggagtgcattaatttctatttttaaaatacattacaaaaattgtttttctctcaacaaaaaaatacattacaaaaattttacttttaatattttacaatgtatttttatattacaccatatatcaattttcttaaatacattattaaaatctcattattttttgtgattttaatatattttatttattttaaatatataatattaatatatagtacaaaaataattattaaaatttaaaataattaataaaataaattttagaaaaaacaattaatcatctaattagagagctctagggagaatgatataaattacgggatttaatcatgacggcggtggttctcgtcggaggtgttcgacgatgacggtgagagggtttagcttcaagtcagagatcggcgttgacggtggccggtaacagtgaagagagttgtactgtgagtgagggctgaaacaaagtgaaaaacgtgagggtgtacggggttaaaggtaaggtttttttaatttgttccttttgttaaattttttgaaataaggacatttgtttgaatcatgtcaaaatttaaggctattctcgttctggctgcctgcttgcccagatttaggcccaagtgtcatcctaccttcggcgcctttcctttctcacggtcgcatctgtggtcttagaacgcccacactctctctctctattcccctaatcctttccgctgaagtcccctaatttcatggagtatttttagaagaatattataaaaggtatatatatatatcacactgttacttctttcaaaattttgctcaatatggcgatgcccagatggcgcaacgtcttgcttttgaagaattcattgatttcatcatcatcaccgtcatctacgataacctatcgggcctcgttccattctactccagtttcatgtgaaaaatggaagaacaaatggaattccgtaagttgttttcccttccctcttcctacaatttgatcttaagttttagcaatcagatgtattttatgaccagttcgttgttttattgctgtacctgtacagattatgttccgtttttgacattctgttctcctgatggttacattatctgtaaatgcttatttgaattttaggacagcactgtttacttttggttaaagttttgcatttggtattttctgtatttagttaagaaataatctagtaggacatgttttgtgcatagtcattgcattggtgctttgtgttataaccgtctttcagctatattcactattaagggaattttcttttccatattcattagttatatggttccttctgtcaattcttaatctgtttttcttcgtttgcagcatgatgtagaaggaggtcaacaaccatcaaaggtattgaagagcttttctattccatttacagtttgttgtgtggtaaatacgtgacaatgtaaactaataaatcactgaaaggctgctgtcccctttaaaatgtggtatttggagtttctattataaagttctttttctcgtcttctacgtaattggggttgttgaaaaactggaaagagaaaccttactactgaattgatttttgtattgcgacttcaaagttcatacttatctgatataaaatgggtttgtaactagacttagaattggctcctcgtattttcgctcttcaaataagtgaggtcatgtatccaaaggggtatggtcaggcattgagttttccccccaaggtctgaggttcgactttaatctgggtacctacttagcagttgctattgtttcttggttctcaaatattgtagggttaggcggggatcctagtaagtgagatcaggtgataaatattgcctttatttggttcatggttgaattagaatgtttggctgattatttaccgtaattaccattctgtagtggaatggaaaaagacactatgccataagtatttggttgcatacatatgtgtagcttgacaccttaacagtttataccatgtatctgcatgattttagtttggcttcccttttatattgttgtatttctcactacggaaatattgaattcagaattatatcagatatgcaacacgtcaaaagcgagctgatgctaagaaagcattgaaagatcttctgaacaaaagcggggcctctaaattttcatttcaggtgaactatttgcagttttttccgttactaaactccattccattacatgtcatatgtaaacttttattatgaagtttgctgtttctgcaatttatttttgcattattaattttcacgtttttgagtgggggattcttatttacacagcaaaaaaattataaatacacccctttttttagaaaacttaatgacatatttatccttatgcaaaaagaataaaatacacaattttaaatattaattctatttataaactttaagtttagtaaatacacccacttgaattaagcatctttaagtcctaaaaattagtctataactcactgatacattatatgagatcgagaagaaaatagaagattagtccaatatatgttgaatatacttggagtgtactttcttttcaatgatgacccacttttgtgaatagataaaggtgggcgtatctataaaatctaatattttaggagataaatggggtgtacttgtacatttttgggatgcaaatataagtcccctcatgagtattgataagtgcttgtttccactcttacctaggatgatgacccaatgtggagacctggtgcacaagtagataaatcagataactctcgaaagaaacataagccaaagtattcagctaagcattcttataaagctcaacagaagaaaactaaaggtgattttttataattttattgaagcattatataaataataatataatcctttatttccttatttatttaaatgtaactcgaattaagggtgaagaaaaccattatatcactatcacaccaaaagtatctcagtggaaaacttgaaaaacttgcttgtgcatgttgtgattactgcaaaactgttctgtgtaatcagtttcttattctgtatattacaccacatattatggcagacttctaattttaaatattctttatgaacattgctatagatgaattaatgtaatcgagaattttagtgtggatcaactttatataattcatggttcatgttggctgggtgccattgtacaaaaatgaaaaaaaaatcattccccagcgggaagtaaatggctgttcgtatttttttcttgctctaatgtttgcttactatgtgtaaacaaaatgtaactgaagttgctcaattgtcccactctaatgcattgatttaaacagataacagcatacagtagccatttggggctagctcaagtggtgagcagctgggtatatgaatgtataggggaagggttcaaatgaaaaagaaagaagcatactgtaccatattaaaattacctaatagaacttatgataatgtcttttttcatttgttggaaagtatggaaaccaagtatatgtcaatatgatactcttggaagattaagatgtttagatgtgctttttatgaaatctaatggatgtctatcatgtaaatgtgtacattttgacttggggctagctcacaactaattggatgaggaagtgtgtgtgttgtggagtcaaagtctccaagtatgtattagtaccaccatggtttgtgcatcaaaaacatgattatgtattaccaaaactttattgatatataacatttcaatagattgagagtttcgttttctacgatcaaagtgatgttattctcattttggggtttggaaaatagcattttcacagaatcgtacaatcctagaaacatgataggccccacctctcacatttgtttactcaaggcgagccaagggagggcgttcaactaagggtagtgatgtggcatgttagttatttgagctctattagggtgtggggaagagtgcatgtagtataggactatagtgcaccttagttaatgtagttagtgtgtgttggaattaggggatcatttgtctaagtttttgctatttttcttgtaaggagaggccaagctcaagaatctcttcttcatctcgccttactaattgttgtaggaataccctatcaattggtattagagacatcgattccttcatgggcccaaagaaagaagttatcgaagctatcgatgatcatattgatggattccaatctgttttcctaggagttgggtaacatatgaactgagatgggagagatgcgattcgatttggctaagtgcatggaactgatgtcggggcagttggcgttgctcttgcaagcttccacacagtcaatattggaggtggaggcgtcgtggacacctcctccaattgcgtcagactcatgatctgctttgcactgccaaatgcagattggagacttgtagcaatacccagaatcgattttcaatcgcaaccacagtccttcgagaatggagctgccattcttcacgggtgataatccagaggattaggtattttttgttgagtcgcctcactgaaagctcatatgtttgaggctgttgtcattgggctggatggggatgcattgacatagtttcaatgggagaatcaacggagatcgatcacgtcatgggttgcttagaagcatttgttgctattgcgattatgagccattccagttggtccataatggaggagttgctctcagtgacttaagacaccatagtgaaggactatagaatcaagtgggaatctctggcttctcatgttgtatgggtaccagagcacatactagagggaagtttagttaaaggcctcaaagaagagattaggagtgctttgcatatcctccaaccagtgggcttgccccaaatgatgaaccccacccaaagggtggaggaaagtcatcaattattggccatgacccatttcctaaatcaccaaaccataaactgtcccaagcccaattctattcctaagaattctttcacctcgttctcaacaataagcttgacaccatacttgttcaccatagtttcttcatcttccacacgaccttctcctaatagtggcaaaccagttctagccactactacaccaatgacgaagtgaatgtcaaggaagaataccaaggtaaatgaacaaggggtgtttgttttaagggtgataagaaatatcacaggggccatgtttgtgagtaaaaaactttgtaggtaatacttgtgatggatgatgagggcttgattcatacaggtactccaccaacttctctagattcttcaattgaagtgggtattgaggaaacattggctactctgtttttgaattcaatggttgggctgaatttggctaacaccatgaaacttgttggtaagattggtgatcaggtggtaatggtgttgatggatagtggagctactcataatttcatttctattctatggaacttgttaatgctgccaagttgcaaaatactgccacttcttattgtgaaattttatttggtactgagttaaagtatgtacgaaaggtatatgcgctcaagtggaatttgacataagggtggttcaaggtcttattgattttcttcccctggagttgtgtggtgttggtttggttttcggtattagatgattggaaacttttttgcagggggattggagtctttgtaacttacaacatcgctgcaatctatgcttcgaacagtggagcaagaagggtatgggtattgggtggagctgaatgccttattgttgcaacgacaagcttttgacagtcatccatgcgaggagattttgaatttattgctccattgtgactctatgcttgaaatgccccttggttcaccgccatcacaaacccgtgagcacattcttatccttagagaagggtctgtaactcttttagttcgatcttactgctatgctcagatttagaaagataagatcgaaaggttggtcatagagatgttgcaggtggcattatttgccaaagtacaagtcctttctctagactggttcgtttggtgaaaaaaaatggtagttaggcaatttcgtgtggactattaagctttggataaggaatcaatggcgaactagtttccccttcaagttatgaactagttgttgggagaattgcatggtgctatggtatttataaagctggacttgaaattaggttaccatcagatttaagtcgctgcccaagatgtggagaaagtagcttttcgaacttatgagtcattacgacttcctactaatgctctttgccttggtcttactaatgcgctagctacatttcaagcacttatggatgaggtattttgagattttttttacgtaaaggcccatttggcacgcatgattcgattggattagactgtataatttgtccagtcttatatttggtcaggctggagatctggataacttatctagttaatcccccttgtctaggattatttatcccatcgagcagtgtgagaaataatcccatgcatgtgatttttttaatcatttctttaatttttaattttttaaatatattttaaatttaaaaggaatttaaatgaaataatttacaatttttttttagcttttgtttaataaaaaacttatttattaaacaatacactcaattgattataggagaaacaatataatactataaaattatatattctccttaaattattaaaaatataatactacaattttatattctctttaaattatcaaaaatatttatatctaagttttacaaaaataatatttgtgataaattaaatgattaattttaattgttatttaacacaattaattttttattatttaaacatttttattatatgaaaccatgataaattattttagggataatacaaaaatgttccttacatacatatttaactatattatgatttattctcttttttttttttaaaaaaanntattattattattattttgaggaaaagcgctatatattaaattaaaggtaaaaaccaagagatccatgcaagagttcactagacccactggtcattacatcaaacaatcaactggaatttattactttttttaaaggtttattattatattttatgattcaattgttttaattatttagatttaaatttttattcatttatcattaaaatatattttaatttgactcgtttatttattttttaaatagtccggtttattcttaaatcaaacaaagaattacttttagcataattctatccaatctagtctaatcctgagttccaaacaggcgccaagtgcatgttagtctgctttgacgatgtcttgatttatagttccaccatggaattgcatcgagaacatttgacagcagtatttgattgcctacagcagcatgagctttatgctaatagaaaaaagtgcttattagctcaagtgaatgtcgaacatttgggccatatcatttttgctgaaggggtatctgccgaccctgccatggccgagtggcctttaccaccatgatcattgagggagctccgaggatttttgggtcttacggggtattaccacaacaagttcatcaaaggctatgtgtagatggcacgaccattgacggatcagttacgcaaatatgcctttgggtggacattagaagcacaagaaacctttgagcaactagaacaagcgatgtgttcggtacctgtgttggccctcccagatttttcacagcctttcctgttggaggctgatacttaaggcactagtttgggggctgtgttgatgcagcaacaatgcccaattgcatatttcagcccagtcttgtccccttggtcacataccaagtctgtttatgggcgagaacttatggccattgtgcgtgcaattcaaaaatggcatcttacttacttggatgtagattatcattgtgtttcgatctgcggtgtttgaagttcttattagagcagcagctggttgatttggagcatcaaaaattgctaagctgttagggtatgattttagcatccaatattctccgggattggagaacaaggcagttgatgctttgtcacgtgtttaccatgaagcttcatttagtgctttttcggtgcctactatcatttggattccagatttacgaaatcatgtggctgctgatctgtacctctttgagatcgtaagggagcttcaaataggtcagttgagctcggggtacacctacaatcaagggtgcctaaagttttgaggccagtttgtccttccattttcttctccgattattcccttatttctccaagaatatcattgcattaatgtcgggggagactcgggagtgtttcaaacgttccaatggctggttggggatttgtattggaaaggtatgagaaaggatattcaaaaatttgtggctggttgtgcgatttgtgagcaaagtaagtacacggctcaatctcttgctggccttttgcagacacttctgattccaaactgagtttgggaagacatttctatggatttcattgaagaactccctaaatccaatggttttggctctatatttgtggtggtggtggtggatcgtttgactaagtattgctattttgttaatctttctcacccttattcagcaactacagtggcagcggctttcgttaggaaggtggataagttacatggtttcccttgctctattgtatcagaccgtgacaaaatctttcttagtttcttttgggaagaagggtttttcgtttgcaaagaacattgcttcagcgaagcacctcttatcatcctcaatccgctggccaaacggaagtggtgaatagtcttgagacatatctccgctgttttgtaagtgtcaaaccaactcagtgggcaaatggtaggccttaggacattaaataaaaagggcataagtgtaattgtaattaagattgaatggtgaaggaaaaggtgtgaagaatttgagtttattttgtaactgatttgggagagaaccaggctctcgaaatcctgggaatcaatgaaaggcattctagcatttttatccaaacactactgccctctctctattttctgctattgactaatcttgataggttgttcctatcagcaaagtggcttccttgggctgaatattggtataatacctcccatcactctttggtttggatgacaccattcaaggctctttatcatcacgatcctccattagttcgttttgaaccacaaagcaccattgttttagctgtggagctcagtgaatcttcaaagggcccaacaaaagatgaaggttcaggctgatgaaagagaagggatgtacattttgaggtaggtgatttggtttgtgtgctgctacaaacctatcgccaatgctcagtggctaagtgtaaaaatgagaagttaggttcgtgtttctttgggtcatttccattttccactgtcctacctgatacacctagtttttcatgtgttggtcttaagaccagctttgggacctcagcaggtggccactgccttacgaaaggatttatcagcagagcttgagtttgaaccaaagaagctgctcattatacaccctggcacgcagaaagtgcagcgacaagcgttaatttagtggtgtagcctgcctgaattttaagcgacttgggaggacttcaggacctttcatgagtacttcctcatttccaccttgaggacaaggtgcgtcttttgctgggggtaataataggccacctctcagtttgtttactcatggagagccaagggagggggttcaactaagggcagagatgtggcaggttagttatttgagttgtattagggataggggttgggggagagtgcagctggaagcctggtataatgcaccttagttaatataatagtttgttggaattagcggaacattttgataagttctttcttggataaaattaaaacctttgtaattacacaataggatagctgaaattcttgcagaaactttattgaattgatggacaaaattagaaatcagaagctttcgagaggcttgttctctcctatttcaatctgtttgagaggattgggctttccacaatgagtcaactcttgccaattttttccatacctttctaagagacccctccccttatatactttacattgcccaaaaataattgccacatcagcccctaaaactaatacaactcagccactaatacaaatcagcttttaattaaaacaaagagagttaacaactaagactaaagtctagtttaatctggtggcttatcacatttgtccaagttgtgtttgcttttttcttgtaaggagaggccaggtatctgaatctacggtttatcaatagtaatgagaatttttcccagaattccatctccttgctgtttgttgcagggataccctatcaaaacatttttaaccaataaaagattcattcgaagtattattacccatctttacggcaagcagtaacaaattttgtgactcgtaacaaagatctcagaaaaatcattttcgcaaatgaaaataaaaaaacacaatagattcgtgattagcttgtgttttacggaaagtgcctaaaagaatagggggggagtagaggactttgacgattaaagataatgtctgatctgggatttgtgaaaggatactaaagaatgcacttgttactttattattgtgaaatgtaaagatgtaacagattttaggtttagaaactacaatcaattttttttaattatttttttattttttatggatcacttgttttacacatcacttgtatcctaataagttttctggctggtttttgaatcttcaggtaaatttagaggagagggtttccatgagaatttcaatgagcacgagacagtttttcgggcaacttttggaaacagatggtatacttggtcttttaatttaagaaatgagtctttcttcagagattcagcatctgaatttgagtggcaagaacggtcaaacgggaactatagaagtaaaacatttgggggcagtagtgactctgagtctgatgaagaatcctttactgtaggatcgtcttctgatagaagagttctcggtctgcccctaactggccctttgaaattagaagatgttaaaaaggcgtaagtgatttagatctctttgtttacaataagaaatcacatacgagatcaatgttctacatctaatttccgcattcttacatggtttttgtcctctgcattgaccttgtcctgacagtttccgtttatctgctttaaaatggcatccggataagcatcaaggcccttcacaggtttgattcaactctatcttcattgattattcattatgatcatcttgatattgaagctaccagcacatggtaaacttacttggcattagaaccaagtaaattcgatcgaactcaacttctctcagataatgcagagttcaagaataaagtagagaattaccttgtatttgtgaaacccaaaatcacttatgatgatcactcacttgactccataattaagagttagtctcatgttatactttccttcgcaatgcatgttttgcaggcaatggctgaagagaaattcaagcattgcgctgacgcatacaaatctttgtgcaaggtgctatccccagcttgaagcagctgtagttttgagcttagtaatggatggacttctaacaaggtaatggatggacttctaacaa

SEQ ID NO: 14678 - DNA, 15621 bp, Cannabis sativa
  modified_base (11275)..(11276): a, c, t, g, unknown or other
attggctttttcttttttggttaaaagattaaaaaagcctaacgtgtaaatggggcgaggaatccaaagcttcttatattctttttctctttagcacgccgtcactttcagaagcaatacgagagaaaatacgaccattatgcattggtgttcaattatttgctgtagataaaaaaaaagtaaaattaaatgttgtagccgttatacaccatattacatctatctctactctatctctttgtcaacattttttaaattataaaatttcatatcccaagtttttatttttatttccttttcccatttcagaaaataaatacttttatattttaacaaaattttaagatgtttattgttactattgtaaaatggaagacaatataattacagagggccattattattttccacatttggctggagagtgaagaagaaaaaaggtcacactcacactgtcgtctcgtctgtccttgtcaattttatcaccaccacccaatacccatcatcatcaccattaaactaatcccaaacattaccctaggctataattatagggaatatcatattatatgtatatgtctatgtagtgcttaaagttgttaaactgatttgtgaagcatccaatcagttttgggcacacccatttgctaattatttgtattgttttatgtgtcttcagtcttctgtcaaagaaaataaaaataaaataataatgtgtatgtgtgtgcaggaggacaatgactaattcgctaaagtgtaaattttggcaggttcttatctcatgatccaactgctacaatcgattgcttagaactgaaaagcagagccggaagaagaaagcgagagagagagagagatgggtctgttcactaacagagtcgagagaagtgagatcaggcccggagaccatgtctatacgtacagggctgtcttcgcttactctcaccatggtctgtccttgttctttttcgtgttttctcaactgggttacaaacaaaattggaatatttgtacaattattaatgtgggtctgtttgatgcttttcttaactgagttctcttatttttttttttttttgttttgttggtaatctttcgaaagaactgcacaatgagggttctggttctgctgggtttcctttcttttttgttggttttcctgattttagtagtttacatttacattttttttttctttttatcatgatttccttgtatgaaagtctgagcttattctgcatgtacccaaaaatgatccttttttcgggacccacctttatttttggtttgtgtcaattcctacttctcaattgtctatttttgtgtttttggttttgcgttttgcctgttaaactttgcttgcaagtttaggcttttggatttttgggttcagaacaatttcgtagaatatggactcctagtcaactgaggtttgtataaacgaattcaaactaatcccaaatgattctttcataagatccctttatagtcaagctggatttacaaatgaaaaacacaattgcaacaaatgttaacatttttatgtatactaagacagatataattgcttggattgttctgtgcaacattatactatggatgcttgcaaaatgttttctgttgatgctcggaaaaccacgttgtggagtcaccataaaagatgtttcatgcaatagatgtttgtgtgattttggagatgtaggtcataaataagacccaggagccagatttgatgctttatagcttgtgccttgtgaaactgggacataactttttctacatgtactacttttactggttcaatgtaattatttgaatatggagattattgtcaatgtaggatttagtaacaaaataaactatatgccttctaaattgaagggaaaaactgagtggcttttcttttcttttttctcaattacttatattgatgatcaagcataataactagttatcatgattgtaatatgatccaggtatctttgttgggggaagcaaagtggtccattttagaccagaacgaaacatgaattcaagtgaagcatcaactgacccctatgactccatgtcctgtccaacctttcctgattgtggcttcagacaacccaacagtggtgtaatcctttcatgcctggactgcttcctcagaaatggatctgtatactgctttgaatatggggttaccccatcagttttccttgccaaagtccggggtggaacttgcaccacagcagcatctgatccaccagaaacaaccatccaccgagcaatgtaccttcttcaaaatggatttggcaattacgatgtgtttcagaacaactgcgaagatttcgccctctactgcaaaactggtcttctaataatggacaagttaggtgttggtagaagtggccaagcttcttcaatcattggtgctccactggctgccattctatcttccccgctgaagcttttgatgccgagcccagttggcgtggcgacagtaactgctggaatgtactgcatgagcagatatgcaactgatattggtgtaagaactgatgtgatcaaagtggctgtggaagacttacatgtgaacttgggttgggtaggggagcctgaagaagaaatagctgaagatagtgagccttccaacagagcacttgctattgctagatgatgatgatgatgtgagttttatccttatgcatgatgggatattcagtgttaataacaacaacaacaataataataattttatcattttgttgacattaacaactgaagttaagcttcacacacactctgatccataactctctttttctctctgccccacatttttattagtagcattcagttcacttgctttagagtattcaatgcattgagatgatgaaagcgtatttgtattgaaattgtgtggattattaaatgttgtaattagtagcagttgggtcatctaggatgttccggaactttttgagtcatagtcacacttgacaagttcttcacttcaagtttctagagaaataataggcaatgggtagataatgtgatttttcagttaaaaacatggattgtgtgatattgaacttgtctacactactttcctgttacttgggaacactactaaggaaaagcaggccatgcaaatcttgcatcaaataaataaacaaataataataaaaagaaatccacacaatctaattgtagacgaaatatatcggataattgagtgtgtgaaatgttttggtgcataattttatttttgtggtaaagatgtaccaatagcaactttgaatatacttttgttttttaagtttatggtcagtttgtgctcatattgtccttttcatgtatcaaatttcggccaattttattttattaggtgttgatttagaccttaaaccaattttcgtttgtggttggtcaagctttattgctttatttcttagatgaacgatacagaaaaatgttacatcaaagacctatcggcagctcttcaacctcttccctcttttaacattgatttttaactttggatttgtaatctaaatgatgatgatgtatatgtaaggttaagacttgagatattatgagaagaaaagattgcttcaaaaaaaaaaaaaaacaaaaaccaatttatgtgccaataagactggttaccgatctaaatcaatatttttctatccaatctaacattttactctttatccgaacttatctaattattagttgaattttaaaaaattatcattcaattactaattagattagatcgttttttaattaaatttctaattacacatttaaattttaatattaatttaaaagatataaaaaaaaatacgtaaaaattaaatattactttttatttaaatttaataatccataaatatactattattacaattacaagtataatgcaactaaattttttaaataattaaaataataacattgtaataaaatagaactaaacatgatgaaaacaactatgtgttataaattcaacacaaaaaaatcctaaaaatataattaatatatattttattatataaataaatataatttttttaaaattaatttttaattaaattttgacattactatttaataattcatcaatctaattaaaatctaacttttaacagattggattagatgttgcacaatgcccacccctatgtgccaagccaactgcctatcgttaaagagtttatggcatctgtcaactttctctgataattcatcagaacggaaaaggggtacataaacggtgtcgtttactaattttcaaacttatcttctttagatattttagtctcaaacggcgtcgtttcaccaatgattatttttatcaaaccgaccacgatcaagttagaaagttagaaacaaaaaaaaaaaaaaaatcaaataataataaaaaaaacaaaatccaaaacagagaataaaaagagagagtgctctgttttttggggttttctttaaattttgcaatcgaattcgaaccaatcatctataattaaaaaaaattacaatttcattttattgagtattaaattggagctttgtcttagaaagaatctaatcttgggtgagaagggtcttttgaatttagacaaaaaggaaaattcgaatcttcaatggcgaaactctacgtgaaggcggtgccacccccggatctgaaccggaatactgagtggttcacgtacccaggtgtatggaccacttatatcctcatcctcttcttcgcttggcttattgttctctccatcatcggttgctctcctggcatggcttggaccattgtcaatctcggtcactttcttgtatgtatctcccactctgcctctatatgaacgattttataggcaagcttgtggaaatatatgcgtttggttacgttgttgtttttgacgtttaactctactgtgtttatgtgttggctgggattttttggttagatattcgtgttactgtggacacataggatgttttgtttcttttttaatgaatggaatgaaactcatatgttattattattttttttttcggttctttagcttatgaacttgtaagtatggaaatttagaaagttaatttgtagtttgtagctattatacttggttttgccttgtttttcttttattggcattgttcagatggtttgatatagatgtttatattatttatgtgatggaaagattacctgaggtataatttttctcaatggaggtagaacttttgtcacagttgtttcttgggaaagaggttatatagctcattcagaatttgttttggagttaaagtcttaatatttcgaggggtttgtcaccgatacagcttatactattgtaaattctgtgtttgtgattgagcagctagttcaaagaagtaggtttttaccctcttttatttattgaaatatggaactatttgcacagcagtcaatgagaatgaagttaaaagtttaagggtcttgtaccacaattcctatagaaggttcggtcaagagagagcattccaaatttatttcataaccttcaggccttgctgcaccttctttgaaattgatatctgtttaaaaatgaggccaacagctccttttacaaatccctcatacagtatttttgtactatattcattatggcttcttgcagagcagagcctagaaggttaggagtcagttcagacattgtttgcggatagataaagcaaggatataaagtttgaaatccaatgtctgtaactgtttcttataaataattgactgattttgtgtgagatgagtctggtacagtttgtgcaatatgtgcattgtagccagattactcttgttgtcgttgtttgcagtaacatgcctttcaaccattaaatgcataatgtgaacattgtcaagaaagtgtttttgcttcaaattttcattttaaattttattaaagatggctataggctacgatcatgcacatatcaatatttgctagttcctctcttaaaggttggttaagtttcttcttttactaatttacgattttcatttgtcaggtcacatatcacttttttcactggaagaaaggaactccgtttcctgatgaccaggggatctacaatggattgacttggtgggagcagatagataatggaaagcagctaacacgcaacaggaaatttttaacagttgttcccgtggtgttgtaagttttcgacgacaagttctgatgtttttagtgcttcttgcttagaaatttgttttgtttgcattgtgcatttatgtttctgctattgttatgctgtttaattatttgaatgatgccaagttattggatatggtttcaatttctcagatattgattaatcaaaaaatttagttaatttttccagcataattaactagcatgttaaactttgatgagtagagcgttcgtttatgtatgtacacatcaaatcacatttattagaaatactaggcaacgcttttgctagaattcccactaataaaaagcagaacttaatatttctagttttgtttttaaggcttaaaccaagcttaacctgtttacaatttaagttgaacttttttgtaaaacttatttttctggtccaggcatgtaagttggtatgtttcttcttttttatgttatacggtgctccaatcctttttttcttctttttttgttccctttatccttagtacatccgaacatcattattctatagcacgcatgattacaattacaaacatatactttttgtgcaaccactcaattctttaggtttccatcaatttaatcatgtggtcaacatctaatagttgtggtccttgtggaagccagtaatggactagaatatgccatggtcatgtctttcagctttgttgaaactttctactgttagacagacatcttagatatcataaatcatccctacagaatatgcttttttgaaaacatttttttcaaatcatcaaagagaacatgattatgctttttaatagaattcatctcaggttgtcttgtacatatttacatgttggtatctatttctcatatgaaaatagacttgcagctcaaaccacttccctttttcctctgtttttctatttatgttaggtacctgattgcttcacacacaactgactatcaacatccaatgctcttcctcaacacgattgcggtggttatactagtcatagcaaagttccctaatatgcacaaggtccggatctttggaatcaatgcagataagtgagtttagctttgcataaaggcacactcctgtttgatttggttccatctttctttgattttggtagaaagttacaactttgtatagaagtttgaacatgaaggacatccacaaatatgtgctcttccttcttttcaagatatctccctagtgggtgaaagaataattgtatcgagttatcttttgtatagtagagaaattgtatgtgtttcttgagtatcaatgttattagaccctataatactctgtttatatataattatatatatatatatatatatatatattatctataccacaagaggtgctcactagtgtttgttatatttgctggtatttttacctttgtgccgttcttaacttatgtcagttttttctgggccagtctccctgacttggtctccggcttccaaattaacaaaactacatgacccaagacatatatatagacacaaaaatagggtccctttttcctttttgaaaagtaaaaagcagggggaatttgtagttaaaatatgcaaaattttattttacttacatttaaatatcattttttgttttgttttgtttagattttggaccaatcaagtatataaaattttgtaatcctgaaaataggaaaaataatttaatagattgataaactatataaaatataaaaaaaataaagtgaacaatttaaaaatataattgatgtcaaataaacaaaaaacaattaagtgtaaattacaataaatttaagctaataataaaggttccagttccactttgagagacattagtatttgtgaaagaaggaagtcaaatgtagttggcggaaaagcaagtgaccaatttgggtcacatgtgtacagatagacgatcaagtgagtgagtgagtcccttttggcttttgctttcgttttctttcatcatattcataggaacctctaagtaattataggaatttttactcttcgttttacttaatagctattcttttctccttcatattcttatacttatacctaaaatgggggatatatttcaattgctaaacattgatagtgaattattttaatattttagcacattgtcacttgtcacatttactttgttaatttatagagatacaaattgaaaaacagggttttatttatcgtgaagacagcatcaaatattctttctctacacagatctttagtttattttaagtgtatattatagtggatggactatacatgtggacaaattgacttggttagagatagtttatgatcatcctaatccacgctttcccactacccagttaaagaaatggaatgttttgaaggtcccaccagaagaccaaaaagagcatatatattattatataaactctatgagaaatttccaagtctttattaaagggtcatattttattttattttgtggaaaaaaaacaggtcaggtagatataaaatgcaagtatttatcattcatggaagctaggtgtcctttcaacctcatccaactgggtgtcaaatatatataaatattaggttaaatttttggttggagcaggtaattaatttgttatttattgacacattctctttcatatgcacactaaataattatagctatattcatgcatatatacacatcaatttccctttttcatattacctgcttattattctaaaagacagttctaacttgtaatagtagtttaggacatatatatggtttttaaaagtacagtgtctgagactgagagtgaactcaatccattaattcaactcagttaataatgtaaattaacagaaaaacttattccactatctctattaacacccccatcacccaacacacacataaaaagacaaaaagcaaaagcaaaagtaaattcataacccatataattatcatatatcattactatcaattacattagttgatttgaaatatcaacaacacaacactaatataaaccatgcaataatactcaatattgtgcttcatttcttaatagaaaaaataaaatatacataaaagatcctaattacatgaaaacccggtggccttataattaatttactctcttttgatatggagtaatatctctctctctacacaagttgatctatattaacaaaaaccatatgatctatactcataaagtaatattacatgagccagaaaatgagtttataggactcatgaaagagagattactacataccaaattagaaacttccttttttttctttttcttttttttttttttcagcctaattaattatctctcatgtcagtaaaagtactactgagaaactcaaagcaataagtagcaaactttaactctattcaaagaaaaaggagaagaagatcaaaccccaaaagcccaagaaaaatgaaaacctttctatctaattatatatataaatatagcaaatattatatatatagattgatcttttaccatgatcctcctcctccaccaccaccacctcctcctaataagccagtccaatacccagttgggtttccttgccctttaatctggtgatgatgatgatgatgatgatcatgaataatattaacttcatcagcagcagtagtaccattgcttgaaactgtttgtttcaagtccccaaagggaaataagatagtcccaccattattttcatgattttgatcatgatcttgaaccatcccattataactatgaccagtagtagtagtagtactatacctattcccaagcccaagtccatgatgatcaagaacattattactactactaccacagaaaccaaggttattactagacttatactcatgatcttgaaaaggaaagccagatgggtacatcagtagctgcctagtactactaccatttacacccaaagaagaaggaggaggatgaaccttattagattggaaaccgagattaagatcttggccagtacctgcttgatcatgatgattattattattactattattataggatgatgacaacattaagttttgtggggtgagattaatagtagcagtgttgatcatcatcatatgatcattattaatattgttggaggtagtagtgtttgtagtgtttgtagtactaggtttcttgttcttcctagaaccacctcctactggaacgtttcttagagtaccaccttcagtccagtaccttcgacatgtcttgcagaagtatcttggttgagtgaggctgtagttgttgtagtaacagaattttgtgttggttgaattgcaccttggacagtttagctgttcttgaggccttgatcttttctgatctcctgatgatccattatcaatattactattcttgttgttgttgttgttcatatttgatcccattaattctcccataccaacaaatccactttcctatataataaaacataattataattagtagccacaacaattataaagaggattaattaacactatatactagttttagctctagctaaaaaaaaaggcatgtatagctagcctttttgtttgttttttttttctttggagaattaataaagcataaatatatttattacaaagtcttattaataattaaatatataatattgcctttccttttccaattctttatcataagaaagggaggaaaaaaaaagtgcagtactgtttttcatgagtaaagaagaagatgtagacttttgttttttttttttatcttttgaaagaagccatgaaaatcttctctgaaattatacaataatctacaaacaaacaattataaagcaaaaagaaaaattctacaagagtacaattaatgcaagtactataattaataataataataatacaaaatattgatgaactgaattgattaatttagagctagctagctataataatgaaaaggaagggaaaaacaaacatgaatattaattataaatatatatatatgatgaaacccacctcatgttgccattgagctgtagtatccatgaattaagaagatgaagagaaaaagggtaaggcaaagaaagacaagtgatgacttcagagagagagagagagaganngagagagagagagagagattaggcagctttgtttgtccgaaggtgtggtagagttagtgcgagaaagaatgttttgagattgtctctgtgtgtgctatagctagtttttgctttattactttatcaatggtgaaaattatttatttatttatttataataataaataagtaaaaataaaaaaggtaaagggatatgtatgtgtttgtttttgactaggcttatatcattatagtgactaccacattcccattaaagctattattggtgttattctatgtttggattttttgtctgatttcctataaacaaaccatttttgttatacttagtcattgttggtggaattttgagtgtatatagtatatatttatatatgtatacagcatatatatgcattatatatatatttatatgtttgtcttttggcatgtggtttctcttttttgacctcatcatgattcatgaaggtgagaagatcttttgattctactattttgattttgaacttctatagcctcgatttattttgttaatatatacatattctatatatgagtcgttaatttataagacaagggtttatcacttttagtttttctggaaaagattatatatgtacttatacatactgtctcataaagtatctttattatatatagtttgcttgtggaggaattacagaataatagtttttctttccaatatatttatatatcaatcaaattaaatacgtactaaattctctatgtgttatgtgtataatatatatacacaaatatattatttggactttatataaacacaacaatggaatctatctatagtcttagagttatttgatttcgtgttacatatatattcaaaccctaggtatacgtacatgatgactcatataaatattataataataatataataattaaaatcacaaattttcttcctttgaattttctttatgggtattttttttttaagccctttatgcatggtattatattgtttgattagcataaagatagaataatgtaacgtttcgtaatatattggagggaaaataattaatccaccctaaactttttttttttaaaaaaaaaagagatagttataaacttataactattcactatatttgaaacataaaacttgcgcccaagaaaaaacataaaattcagacatgtaactgaatatttatcatgcatgcaataataatagatatgaaattagaaagtaaataaatacataaaaaattaaagagacagaagcaatttaacattgggtttatttcatataatttaatttaatatctattatatataaaatatctctaaccatatcggcatgttaccttgtagtgttatattttattattggtatctaatgttgctcatggaattgtgctatattaattaacagtccaacttcctttgatcactataagctcccatctaccattaacaccattttaacttttttctaacaaaaatttaaagcttaaactctagaaaatatttagttaatgatattaatttatatgtatatctcaataacttaccacgtataagtaaatactattttaaattatgtgctttataaaaatttaaatgatagtttaaacttcatatttttcaaaacagtacaaaataaatcgtgaattcaatattttaacaatttactttttttaatataaccaatttgtagtcagtatctagctaatatatttataataccttaaaatcatattagtattaaattttaattgaacaaaaattaaatttatagtctattttgtaatatttaataaaaacacaagttttaaattattatttaataaaataaagaaattaatcgataatttacataaataaattattattataaattaaatatttttgtccaaattaaaataatatttattcaaattactttggtaatgacttttttttaaaattctattatttcaatagtataagaaatattgtattaatttctacttattttagtttacttataatgttaattttgatatcatatttatatattgagttatattttgaactcttttatttagcttataatattacttcttaacaatttttttttaaaactatattttcaccctattttattttattttattttgtacatataggagagtgatattatatatgttctcacatttcctcaattgttagtgtattttgttgtgtattttttttttttttgtgtgatatttattttttaagtgtatagatttttggagacattaaaaattattagaggatcaacgactatcataaataagtttttcttcatattttaattcctatataagtatacattttgaaattttgattttaaatttggtttatttcctataagttaattccgtacctcatttatcttttttggtattttgtaggttgtttatctatacttttaaacacgaaaagttcatattgcaaaagagctgaactcattggttacttcttagtcattcaagcagaagctttagtcttaatgatagtactgacttggttttacatgttgttctttctttttgttatgtggagtctgattatttagctttggtttctgttttttaaatgcgctttttctgttataatgagcttggtttctttagattttttgctagtttggtttccagttttcctaatgcatctctagttcatgttcgtttctcatgaattagttgtgcgtacttagggtggatagtgaattagtttaaattgaggattattcatttttttttcttatttatatgtattaaactcttgattgttgtcaataagagtttaatctaaaaaaaaaaaaaaattaaatagtgattgtctaatgctacaaaaaaaaatagtgattgtgtaaaaaaaatgtataacaaaatatttgaatctttaccattaaaaaaaaataattggatcttatttttaaaattataaatgtgttaataactaagattactcctttaaggaggtgtactacaatttttttaatataaatataatgtggaaaagaaatttaaatttccattcacaatagaataattttcatgaaacattgaataggaatgaatgatgagtgatgaaaaatgagaagagaagagccgacagaaggtgggacccaaaatcgtaaatatagtattgggtaggggtagaatagtaaattaattaaatcttagtgcgggggatgcactgatgcagccgtgtaggccgtagcggatgtctttttctttatttgatagtgacgtgtttggctttaaatatgttcgaaacagacaagtttcccaaatctcagtgctcttcttccttgctatttatcctctgttccctctaccatcctatactatatagactcacaaaaaaaaaaaaaaagtttaaaccacattgccacttattaatctagtattaatatgaatttattcaacttttttttggttttttctttgagggtgaattcattcaacattttgaaatattcaaactaaaattgttaattaattttatatattaattatatatcatataggaaaatttggtaacgtctagaccaataagaaccaaggaaaagggaattagtttcaacgtgaaaaagattggaattggtaggccatgatagaagagagggaaaaaaagagaagaagacattggatgattaattacatctttcttattaattattatgttcccactaaagatttctttggcttttcccttaacattgaaagagaataaacagacaattcaaaaggcttctattttacttatttttatttttcaaggggaagagtagtaataataacttcattcaactcaagcttgaggttttttttattttattttatttttgtcaagcatgcatgagataatttgagtttgagccatatgtatatacagcttaacaaaaacaaatgctaagacaactaaataaggatctatagagagcattgagagaagtatatatcttaccatcaacaacaaataatcaagaatgttaattatggtagcaaagattgagggaaatacctttttaatttcacaaaaaaagactaggcacagactaacataaatgtggtattgaatgaagaaaataacagataaaattgaataaaaaattattaagaaaagtattctctattcaagttgtttaccaagtaataagttgagaagttgagaagtattctctattctctatatatatgggaaatttaattttttatacctgatttaagggttaattagttaggaaaacttaaactataggtaattgttagaatatgcccactttacctaaatcccaaaattacccctctcaaaatcccacacccat

SEQ ID NO: 14679 - DNA, 12025 bp, Cannabis sativa
tttatgatatctttttcactgttaatattgatccagtccaatgtatagtcgatacatccgatcctggtttactttactaatgccctggaaaagacattcgacttatccaaatgtaagcaaatcttatcgttgattatcacgtcagtataaatctggtgcactgataaattgtgagactaaataaatttaaagcatataatcacagttactttctactgtgatgacatcagtgtaattataaataactatatgtttataatttaatagaacttatattttaaacatataatcacgtaataaatatgtgaacaaatcatgtgataaggtcaagatatgatttatagtttttattgaaagtaaataagattacaatgatattagattttatttagggcataaaatcccaacaagcacctcttcggggtggcgagctactttagtggtgatgacacttttgtatttagctttgtattaacatatgtaagcagagctaatatcatatatattcttggaattctcttgaaaccccattaaactctttataggggtgacctggtgacttatgaagaaccttatcactatcatgataggggcccagttgtgtactctcttgtcctatcaagaccgtataataataaaatgatgtttaacaatacttccttgtgtatgtttctatgttctctatgtgttacctatttgtttcctttgttgggtcattgtgtgtcatttgcctatgtgtttacttgtgggttgtgtgagattaatccttggaatgacttatgttgtgcttgctcatacttcgtggttgcacttaacatgtgaaagacatgtatcgtgcctaatcattgaatttgttttcctgcaaaggcattcaggctgacttgctagttcggtgtgccagcaagtgttgcatgtcccgtctacttgggagtgtacaaatagttagcatgtgacactatgcgaccactgccacttgggaagtttcaatggtcgggtaccaccatttttctcgtttctttgtgcaatcttcactttagggttcaaaaatcttagtgcatgcatgagttattttactcgaagtgttgattccctttggaatttccttagtatgcgactatctgacactagggaagtgtcagtagtctgtgcatgactatttcccttagcatttagcgatgtcatctttttatttgtgctcttgtattcccactaagttaagcattttagccccttgttagacttcatcttgaattggattttcaaaatgtgtaaccctttctcgaattcggggtgactattgatatcttgggagtgtcaatactcgcatgcttctcttttgtgccgcatggtatttcgtttcatcttttgttgcttggtcaaagtttaatctgttgactttttatatcttcaaggtgtattcttatctttgggctcataatacatatttattattactttatttttatttatttatttattacaaatatggggtacaactctgtgataaatatcaataaatatcaataaatatcatatggttgagaaagtaccataagatgtgggtgcaacaaaattagaataaaattgttgtacataatagttatacataacgcttccagaacaatgagttatctttttcttcgtctaggcttcaacctttaattgtttttcatttttcaaagccttcaattgccttttattgctttattctattttgttaagagtctttcattcattcattgtctaatggattaagcaagaaaatcccaaatcacaatcttgcattatatagaaaaattactaaccaggttgttactctagttaatgcaaaacactaaaatgatatggcaagttattagtcatatttcgttgtattgcacaacaattaatcttgaatattaaatttgaaatgttatttcaatgaaccaagaacataaaagaaaacaaagtaaaatgcagagaaaacataatgaacacaatgaagttatactggtttggaactgagggtcctacttccatttttagagctcttccactagcttgaatcaacaaatacaatcagtgtattagtactatacaagagaaccacttgttgtcaccatcaacacaaattaaaaatgtaattaacctcttatccactacaagattaagataagaattcttaacagtgttctccaagatttgaggatatatatgctcatggcataagtaagcaatgttacatttatatctcgaatcaaaatgaaacaatagagctttgcaaaattaatccactaacttgtaatgttgggcttagataatcatttgaggttccttttcaaattgaaacaatagagctttgcaaactattactctaatactcagtccactaccttataataataataatgataaaaacttttaaaatctacaacactgaaagactacaaatcgagctctgtgttttcttaagcgcagtccttctgtgtttggcattctttctggactaccagtactctcccaacccaacctatttgaacccaaaaaaaaagttatattatatttattttcattatgaaatctaataaacattataacaatacaatatatacacttacgcaggaaaagcaaaagagcctgaactagcatttgatgaatgagcagaatgatcacttgaattgtgctcttcaaaattgccaccataaatacacgttgaatctaagtaaaggttctcttctaccatctataaatagttacgattacaaattaaaatagaagaacttataacacaattatatgtactttttagtattaatagaaagttgaaaccaaaattataaggcatacatgttgattattggtggggtagaattcatgtgataatttcctagttaagctctcatgatcattgtcaccgtaattaagctgtttcttccaaataacaatgaacaaattcttatgaaattaataataaagtttttcggttttgaaattaaagaaggaaagaaaaacagatatcactaacctttcgatttacgggtctggaatttctggaagaagaagtataacgatctagacaagaagatggtagttgatcatgattttgatcagtacttttgttgccattattcttcacaacttccaaagctccatcttctctaaagcagaagataatatagtcttcttctgtaaactgaggatcaatcatgttgttattgttgttattattattattattattagcaacttctttgctaataattcttctgtgatgagacgattttcttttattactagcttcatcaacattcttatgatgattgcctgatgatctttcttcctttgcatcagataggatcttgctctttctcatcggtattagatgaacatgttcatgatcataatgatgatcatcatcatcatcatcatctgtcatatgaagaaaaatagaaattaatttgtttataatatattgttgaacatatatatgtaaataggactatactaatgaacatatattataataaaaattattacctatgaagcacaatccttgaccctccattattggactagtaaccttgtcattgtccatggtgtgtacattgtatattaaatgtataaggttgaagaagatatatattatatatattggttgtaatgagagtgggaaataggagtatttgaatttgaaaaaggaaaaaatgaaaaggagaatgaatatttggaaaggagttacaacagttgattggtgccaacctataattatgagtaatgggtcatttatgtttctaactcatcttcttcttcctcacttctccctatttaatatttatatttatttataaataaaaattgaaaatttaaagaagcagaagaagaagaatgtacgaggcactgtaatttgtagtcttccttgtatgaatgtatggcaacatattcatagtgtttacttctgttttttctctgtaattttttttttttgcttgactatataacctgcctatcattacatattatttacaaactgtttaacatgcattaatgtatttgaaacacatacttcgattaatgggtgacaatgaatgtcaaggaacactttacttagtatataatagatttacctactatatttcaaatagacaaggaaactctttatttcttacctactatataatataggtgttgaatttttgaactacgacgatggcttgaaatttgaatagtatgatttggatgaaaaggagatgcataaaatgaagagcttatattgctgcagttgctgtagggagcacaatgagtgcttcttaatgtggttttacaatggccatttttggtatgaaccttatgttatttgtagaacaaaatgaaatgtcttcatgtgttgtaacattgtccatgattaaacaactctagccagtgtaacaaactgtttaaaaagatcaagaaaaagtactgcttgtaaatgtcttacattgcagatcatagctaagctagccaaactgtagaaccaacttaaaacttgccatacattgcatttagcaaaagtaggcttagcttagtctcttgttgagttgtctaagactgacatgggttttaacactgtactcaaaattgcatagttgtataattacagttggtaaaagaaaagaagataaattgtctctcaagttgcacctttgaaattgtgtcgagttagtagttacactgagtcatggattaattttttttttctttctcaagtggtctcaagttttctttgtactttttctttttaatctaaaaatttaacaaaattgcagtgtatgcctctacctcctactatttgagagtaaaacaggtcaaatatgaagcaaccaaccaagcatgatgattgtgtacaagaattacaaagctttgtccttggacgagtttctagggagtctgctaaagacattctcatcgactatcttatagtgcttagataactgtctttgaataattccacaatatctatcaacacgttcatcatttttgctgtataacgctggaaccgtaatcaataagatggttcctggatcaccattaaaacaaagcaaccttataaacacaacatcatcatatcaaaacaaagcaaccttataaacacaaacacatatatcatttacaatgaatgctatacataccaatatatgcaattgtgaagaaggagaagaagccgcctatgacagacaagagccacaaatacaccatcgcctgtcaaatgtataaataagcataaacgtattagacactcttctcttcctgaaccatagattacagcaaagaatgatccgcctcaaaatttaaattttggacttcaacccgaaatttttggtggatcagtcaacctcccaatattttcatcaaatctacaagtggtataaaccagtttgatcaaccctcggactaacacaactagcctccctctagttgacactcaactgatcagtttctcataggcctccggtaatatgtgcctatactctccagcatggacaacctcagcgctcggtcatgccagaaaataataatactatttctatcattcatagttgacttcttagatttctagctgaccaagctaaggaaagaaaccaaaggaaaggaaagagaagttgataaggaatttatataactgattatcaaagcttctgctcagtaggagaccaaactctataaaatatatgggtttgcttgtattttgttattcaagaagttgcttttcttccctatctagttgcttgggtcaacaccatcattcccactccctcgaccattttttgtgaaaactttatactactcaaccactaatatcactctctaatgcctgtatagtaacacgtctaaatgggaaaaacttacagcaaaacatacagatgaattcagggactttagaattaataccataatagatgactagaagatttctagaattagtagtgtcaagcaaacaaaaactaaccttgaagaaaagtctaaaatctttgccaagagtaatatcatgagccatcagcaacatattgttgattttaacacgaaatgaagctgcagcattgttgaccatttcctctgacaagactagctccggtaaactgtacagttgtctgttcgtttaaagaaaaagaaagacactaattaaaatgatcacaaacaacactttcacagaaaaattcttggaatgagaaccaattagtttcaccattaaggtgtttataagaaaagatagcgagtgaagcacttccttacttgtttctaagagcagcataattggcacgtagaaataacagtacgatcaaaatgagcaaaacatctgaacaaattgacaagaatgatagtccagatcgttcaaagaggacccaagcaacagtggcaacaacaatgacaccaaaagaaacatgtcgtttcttccacaatagaacatcagcagctaaaatgggcaagagacataaagaaagaccaataataagtcaacgaaaaaagtaaactttttgaaaggtaatacgattgtagtctgtaatgtacagatcaaactaggctgtaattttggcatttaatcatctgggtgagagagaattttactgtataaccatttaagactcatgaaaacgccataaacaagcattaaattacatcaatcaaacaaaagaaagtccacaaacatatctccccataattgtttctttttttctttctttttttattttccttagcttggaaaacccagaatgccaaaagtcaagaaagcctcaaaaaaagaaaacaactgagacaattacttttattatcttaccaacagaatggtaaactgaggtttgttggcctaaggttggagaaggagaaggacaaaatgaagataaagaagggtaaggggtggccttccttccatctccgtctccatctccttctgtgttgattttacatattgaattttccatgaaatcaacccaagtcccagaattgtagaagttgaatttagggattttccgtagagaaattgaaaggaacaatcagaattatacgagtttgatgattggaatggtaatgggatccacgaggttggaatgtagctgtgttttcttggagccgacagacaccgttgaaagttaaaacgacagaagtagcttcagcgctctcgtgtcgttcaaaatgaatgggccattgttttgggctgaaaacgggtgggagatgatctcgaactcaaggcccaattgggcttttgaaaggaattatttcacaaatacaagttcaaaaataccacttttattaatcaattaatcaaatttacctctacttttatatttaattgaaacatacctctttttatgtgtattgtacccaaaataccttgacataagagaatcacatggaaagtatcttgaagtgacaggggtaaaattagtataatgtttaaaaaaagatgtatgatagactttaaaaaggaggataaaattaaaagggaataatataaaaagagtatagagtgtaatttcctcaatacatgaacaccaaaaaaataaaaatagaaaatagataattacatcacatactgaaatttttaacttttttttacttttatactgtggggtaaaatttttttcaaaaaaattgtgtaaattttatattgtgttaaatttttactattgttttattccggcaaagaaagacaaaataggccaaataattcattaagatgctgaagaaaaacaaaatctgaaaatggaatctcaacggctcaatttattaacaaagaaaattaaaaccataattaacatgttacttgtattacacaatattttaatatatttctcatatcacattttaagtacaattttataacaatacaacttccatgagaccaattaaaatactaataaatttaaatattatttttttaaaaaaaaaaaatattattcacaagttcacaactcacatctgcaaagaaattaaaattagaatcttttattttaatacaacataattattagtacaataaaatagaagcgtgccacgtaataataaataaataaatatatatactcgactaggtaccaccaacctgggtcgttttattaaaataacggaccataatggtccacggatagaagcggagggtccggagtagtggaccataaatgggtcaagtaaaactacgtcgtttcgagggtactgtagatgaaactagcctgaaaaaattgatccaaagaagacgaaccaaggcaaggcaaggcacccacccaatgaaactcagctgttttttttttttttttttgaattatttggtgtagtgctattttcagaatcaaaatcaacaaccttacaaaaacaaatacacaattctaccacccgtcatagccaaaccacagtgactgctcaaccaattaatatctgaatatacatatacatataaatgcacaaactagaactacccattattcttaaccttcagatctagctctttcatttccataagtacaaatctaagctttaatacttgtttgatttctagtctttcattttggctttacctaaggtgagcgaggtgagttttcacttctttctcatttgtatgtatatgagttttgttttctatgatgacccttttcttgatttgattatgggttttggtttgattggcattttcagcagagaaaagttatgggtgagggtgagaggtttcagctggggaccgttggtgcgttgactctctcagtggtttcatcagtttccatcgtgatttgcaacaaggcattgattagctcactgggtttcaatttcggtaggttaataggagctttgctaatttgatttacattattgtcacatattgtatgcttttcattttcatctttgccttttagtttgtgttattatatcctactgttgattcttgtgacaatgatcctactgttgattcttgtgacaatgatctttatgaaaaaaaaatatgtaagttgttgtaaatttgtaatggctttaaagcatttaccacgaatagtataaggattaaaatatcaaaaatgatgataaggaagtaccaattatagattacacaagctaatcattgatattattatttattattattatgacccgtgtccccttccctgagggatgggtggtggtatctaaaagttttcccttcaaaaggagaaaactaatggaatcagagagtaactaaaataaaatgttaaaaataatatattttttgaggaaggttagatttatgtttgaatgctatacatgatagtagagtttgagtataataatgttcaagaattagtttgaattcttatgctaattgatggcatgaatgacttcttcttatgtatttacttttgaatgtactaatcaaaagtatatttttgaagaagttgaatttgacttgttggaaaaagagttttcactcaccataatgtatacaaatttgggatattcttgggacatagaatgcttatataggttagtaatgtcaaatatacattctccggtcctctgaaattctaaattcgtttttgatttgcataagtgaattcagagttgaaaaatcttataaatgtaaaagaaacaatcatgcagccctcaagcaagaatagagtcttgtaatttgaactttacttttacaaatgtttgactatcatcaatcttgtggttttttgtcctttcttcagtcagtattctgtgtgatcattatagaaccatggatgtagtgtaatagtgaaaattctaaagcttaaccaatctatctctgatattcatgtagacgttctttagttctgagataactgactcaggaaatacgaggttgaaactgagctattttggtctcttgtaggaggtgaacctaggtcataatagtagttttactttgactttaatttttctgaaacaccccctgtttctgaggatacaattactttacttttctttatcagtttctacctacaatggtgagctcgatagtaacgatggcttaataatgcctaagcaatcttgactattgcagtagtgatataatactgcaaagacgtgaatctttatcacttaagttgatcattaacatttatcaatgatcatggtgtttccttacaagtatatttgttatgatataaatactcataaattatgtttagattgttgaattgtgttggggatgattttcttcacttaatttgatggaataaatctgtcccctgcagctacaactttgacaagctggcaccttctagtcaccttctgttcccttcatgccgctcgtaaaatgaaattttttgaacataaagcttttgagcaaaaggctgttatgggctttggcattcttaatggcatatctattgggcttttaaatcttagtttgggtttcaactctgttggtttctatcaggtatatttgcatattcattattctttgttttgtaaatcgatattagaattaattttgaaatgctcctttgtttctgcatttcagatgactaagttggcaatcatcccttgtactgtattcttggagaccctattccttgcaaaaaaattcaggttctcttaacaaatgcttaccctcttgacttggatactgaagtctggaattaggactgtttctcttcttgctgatttaattcctttcatatgattaccaggattgtacaagggtaaagttaactccttatgcactgtacataagggtaaagttaactccttatgcactgtacatgcagccatttagatttcagatcccttttcgtgcttttaacatatttggggtctctttataccgtaaatagtcatgattcttgattctaacttcagacttgaagggtcatcacatttgatgtatagcaaaatactactttttcattgggtgccatttactgatactagcacattgcatgagcttgcatgtagttatagaaaaattaatttgtttataggctaatgtgtatgcatgcactaaacatcagtcaaaagtgtttcctctgtgaattttatatatgcaaatcattattggagccccttttaatcaaccaccttagacaaagttcattttcttcaattgaaccttgctgtgtctcttgcatcataaatctgtactgatgcactttattgtcattgcagtaggagtatccagctatctcttcttattctcctccttggggttgggattgcaacagtcaatgacgttcaactcaatgctctaggctccatcttgtctcttcttgcaattgtcacaacatgtgttgctcaaattgtatccttccaatattggctttaaaatcaaaatgatcactttgcatatttccatgtttgattataaaaatgttttagacatgcttcacttctagcacttgagaaaaatttttaccagttagttatagaatttttagctataatttcatttgcatgaatttagtatttggtaattacttctgtagtaatttaatgagagcacttaactttgcctaactttattggacggcttaagccttctttgaatcgggatacccctaaatttagatgtaaaatgggctagacaagtatgtgacatgtactcttgcattttagcatttgtcctgcaaagcacgtttacagtaacttgtatcaaatgcttattttggcctgaaagcttgttggtgtcttcttactttttctttcatacagagtggcagatgtatgacttgttagaatatcagaatccttctttcttttgcatgaatgatatgaaaatgtattatgtggtgtggtcataaataatgctatagaggcttattttggtttctcctgtgtaatcttgttttaagttcttaactatttctttctagatgactaataccatccaaaagaaattcaaggtttcttcaacccaacttctatatcaatcatgtccatatcaagcagggacattattgatatctggcccatttttggatcagtttctcactaatcaaaacgtatttgctttcaagtatacaactcaagtgctggtgagaattgaaagaatttgtttgcaacttaatctctctctctctctctc

SEQ ID NO: 14680 - DNA, 7461 bp, Cannabis sativa
aataaataaataaataaattaacacccctagtaattttattgcgaaaagaggaagtatttgtttaggttcggagtcggaccgataatgcagaagcgggccagggcccaggccattggcgttgagtggagagttgtttcgaagaagtgacacaacacaacacaacacaatacaggatcagatcctctaccttctatttctatgctttccttcgatcctgaatcaaatttttgacaaacatggatttccttcccccggagagctcccaattgctgaagaaacatggcttcaggtccttgaagcttgtcagccttgatatggaccaaattcttggagagcaaccttatggagttcactatggcaaacttgataatggcctctcctattatgttcgttctaattctaagcccagaatgagagctgcactcgctctcgctgtcaaagtcgggtatatcagctctctctcttctactctcttacttttcttttttcatatcgtagtgctgtatattatacataagtcagcttcaatttttttttgtctttgattcattttcgttgagctctttccttaatcttagtctatttgctgtttaggttggattatgatgaatttgaaatgaaatgaaatttgctttcggttaatctttggtgttagaattgcggtaggatttgattcactagaattcgctatcactatgagaatctcaagattacacggttaacaattggcgtggtgtgagggagccttcattttcattttcatattcaaacaacattattatttatttaggtcattcagaactctcaagaaatgtagttattaatgtttatgaaggtaagccaggcataggatagacgctattgagtaattttatttattgcttcaattattgtttttgatttcagaaaattcccattggtaatttactacggaatataaaaatccatacttgaattgactcgagcctttctgtggataagaacaatacaatataatagctaacaatcactcgtaatgttgttgtgctaattagtgatatgaaaaaagagaggagagcaaataagaaaaaaaatgttatgtaaactagggtatataccataaacatgtcacacttcccctcgtgatttttatgtgcattattgaacaagcttaaatgataataaacacacacacacacacgccacgcacacacatgcacacacttatgatagtcaagctaatttgttgagttaatggcagatcagttttggaagaggacgatgagcgtggagttgcgcacatagttgagcaccttgcttttagcgccactgagaaatacacaaatcatgatattgtgaagtttcttgaaagtattggtgcagaatttggtgcctgtcagaatgcagtaacatctgctgatgacactgtttatgagctgtttgttcctgttgacaagcctgaactattatcacaggccatttcaattttggcagaattcagcacagaggtacattaatttattgtcattgtccttctgtttgtattttttattcaagttgctaattatttgtttgtaggttcgtgtctcaaaagatgatttgcaaaaagaaaggggtgctgtaatggaagaatacagagggagcagaaatgccactggaaggatgcaggatgcaaattggattttgatgatggaaggttcaaaggtattgctactatactttccccgctaactaaaggagatgtttcaaattatgtttactcttgctttgtacaagcacttgggtgcaactcatcctcatgaaactagtctatgagtggaggttgcccatgtggtttattaccgaccaatttcatatttagtcaatgtggggtcctgcaatacattctttttcaagccaacatccacggtctttcaagttgcctcttatgcaatgaggccccccactagaaagtgctggttcggatatcatttgttacaaccaattggggagagctcattcccataagcctagcctatgaaaggagggtgcccaaatgtttatattataaactagcaacatatatatcttatttgtgacttgtaatgtcaatgtatgactacaattcgttggaaaggatgttcctcattctggttgtgtcatgtcatctgcaattagcatatatataaatgcatatttctcaatcatttgagcctcagacctgtatttgtatgatttttgacaggaattcctaacttgaaagtttaagacttctattaaatttcatcattccttaaaatccttggtttaatgcagtacgccgaacggttaccaattggattagagaaggtgattcggaatgtgtcagctgagactgtgaaacagttttataagaagtggtaccatttgagcaatatggcagtgatagcagttggagatttttctgatacagaggtttgatgttttgacacatggaaatgatgttttaagaattcgtttagatttgaaataatttaatgatttatgtctctttccctttctttctctttctcaagagtgtagttgagctgataaagactcattttggacataaagtttcagcacctgaacctccagtaatacctacattttctgttccatctcataacgaaccgcgcttttcatgctttgttgaatctgaagctgctggggttagtaacttagtacaacatgaatatctatatttatttgcttgctttattacttttgtatagaagcattcttgttatatctcgaactatgccatttggatcttgtgtgttttaattgttatgcatattgcagtctgcagtaatgattagctataagttgcaagtgggtgaactgaagacagtgagggactataaagatttacttgcagaatccatgtttctccatgctctgaaccagagattttttaaaatctctcgaagaaaggatccacctcatttctcatgctcagctgctgcagaaattctggttgatccattaaaggcttatataatgacatcatcttgcaaaaaaggagggaccattgaagccctgaaatcaatgctgattgaggtattcttgatttacttcaagatgtcgtcctttcaaaacaaatatattattatatatataatgtgtgctcttttattgttaatgacatcggtgtatcaggtcgccagggtacggatacacggattttcagaacgagaagtgtctatagttcgatctcagcttatgtcagagattgaatctgcgtatttggaacgtgatcaaatgcaatcatcaagcttgcgggatgaatatttacaggtatatccgattaatttcaaagtacatgaacagtttccaaatgcatatcatttacaagaagcattaatatttcttttggcagcattttctccgaaatgaacctgtaatcgggattgagtatgaagctcaacttcagaagactattttgccacgtgagtttgctgcatttctaaataaaatcttgtagcaaatgcttgttcttgggtataaacacatacttatgctttctccacctgtagatattttggcatcagatctatccaagtacgcagagaagcttcaaacatcatgtagctgtgtaattaagacaattgagccacgagcttctgcagtagtagatgatcttaaagatgttgtatcgaagattaatgctgcggaaaaagaaggaaaaattgcaccatgggatgaagaacaaattcctgaagaaattgtttgtacaaaaccaaatccagggtaaactcacttgttatttttctattctctttattttttttttcaatttttactattggctgcattttctgtgttctcctcactcgagtgagccacctctattctttttttacaagattagatgtttgcttctgcaatgtgactactaggatttgattttgaatatttttatatttagttacaaagttctgatactgtggaatttaatttctaatatgttattaataaagaaaaatagcctctgtatgggctgagaacaaggaatacagaacgaataaaagaagctacataaattacatctattctttatagtactaagataatccagttcgatttcaatccaatcataactaactatccagtccaatcatgtgtactaatgagccctcactaaccgcatagtgtctcatatcattagatctatggcaacttttatgctgtgagctaaattgatttttgcttttgcatctttgataaacaaaatgaattattatagccatagttggtcacatcctactctcatttcactctatctagaaaactcttcatttcgctcttccctttgttcgactagtattacttttctcagtattgagtaatttgttgtaatgttgtagtgtgaaagtcattgtcaaccaatgtgtttgtattaattatgagaattcaggctacagtgtgccatacataatttaattcttcgcctgttcatatacttttatttttcagagagatagtgcagcagtgtgaatatccaaacattggagccacagaattaattttatcaaatggcatgcgtgtttgctacaagtgtacagattttcttgatgaccaggtacttgtgtgcttccttgtcttgtatgatttcctaagtatttcttggttttgttcatttctttccatttggttcattcttgctggattgggatagatacccttgacgagcgttaggtgctagactgatgcagtgacatccatgctcaaaattttcttcccttttatcttaaactccatttaaattttccctttgccttattgcaatttattacatggtgctagaaggaagtctaactataattatcgcgctgtcatattatccttaatggtactttccctttactcaatttccatttgacaatgcataatactcattattgtaatctaaggtctactcccttttaagcaataatatttctttacatttatatatattttctcggattgtttgaatgatttaaacatgatttgatgtgcagtctagatttcttatccatattttgattcgacaggttatgtttacagggttctcatacggaggtctgtctgaactccctgaaaccaattacttttcttgctcaatggggccgaccattgctggagaaattggtgtatatggttatagaccatcaatgcttatggatatgcttgctggaaagagagctgaagttggaaacaagattggagcatatatgagaacattttctggtgactgttctccctcagacatggaaactgcattgcaggtttgcagcagcacaattcctttaaatagttcaaaaatgtattatggtaaataattcaaaagtttatatgtggacatgagtggcatgcaaatttcgttcaacgtggttggtaattatattgcaagttgcatttgggcttgtaaatgttcttctttttcttttttcaccactaatctttttgtctttgtcatgttatattgctctaaagtgcttactagctacacacttattcttatttttatgttttctctggcagcttgtctaccagctttttacaacaaatgtaacaccgggagacgaagatgtgaaaatagtgatgcagatggcagaagaagcagtccatgctcaagagagggatccctacacggcatttgcaaatcgtgtgaaggagctcaactatggaaactcctacttctttagggtattgcatgatactttaaaaaacttaaacttttcttatgggctgcggtctgtttgtaactttgttatacttgaaattctgcagcctgtaaaaataaaagatcttcgaaaagttgatcccttgaaagcttgtgaatatttcaacaactgtttcaaagatccctctacttttactgttgtaattgttgggaatattgatccttctacagctcttcctctgattttgcagtatttggtacgtagaaatttcactaggatttcatttaaatgtgattaattttaaaattttgttgattgggttcgttgtatgtcatgcagggtggaatacctaagcctcctgaacctgttctccattttaatcgtgatgatctcagaggcttgccattcacttttcctagaaccataattaggtaggctattgctccaaaacaatgagaaatatttgtatgctttatttacatcattaataaaggatttttaagaatgcaaccatacagtacaactattatttttcaaatggttgtattgactcgataagattaaacttcactttgcttagtttgttctcattttctctttacttagagaattgtcttgtattggtatgagaaggaaacattcatattgtttcccattcgaccatccattttccccgaccacttatataagctgcagctccataccatttgacttgaaaccttgataaaatctctcaaatgcgcgtataccttagtgttgacacagacttcttttagggtttccttgacacatcgattgtactttcagggaggcggtctacagccctatggtagaagcacaatgcttggttcagatatgcttccctgttgaactaaagaatggaactatggtatgctcttatcaaatgtcaacttaaagcttttataaatgatccaagattctttgttttgattaatagttgtttttttgatggtggaaaattatatggcaggtagaagaaattcattttgttgggttcctaagcagacttcttgaaacaaaaataacacaagttctacgtttcaagcacggacaggttcttatgcatttatgtttttcttttcttaataataaaagtaaattatttctgtcatccatgcatttactctttcttcatcacttgtgtgctgcagatctatgcagcaggtgtttcagtattccttggtggtaataagccttccagaactggtgacgtacgcggtgatataagcataaatttttcttgtgatccagaaatctcctcgaatctggtaggtgttatttatttatttatattattttttgagcaaaatctggtaggtgctaatggtactgcagttttctttttcttcccatatttagttctaacgttgctagttaaatcacctcattgatgcttacaggttgatcttgctttggatgaaatattacgtctccaagaggaaggaccttcagatcaagatgtttcaactgttcttgaaattgagcaaagagcccatgaaaatggacttcaggttaaactcttattagtgtgttgggttttggaacaaccattaatagtactttcttgaattctggaattgatactgctattcactctcagtctcactgtaatcttcttattctctttcaggaaaattactactggctggataggattttacgcagctaccagtcaagggtctattctggtgatcttggctctacttttgaggttggtgctgcagtgcaattgtttaccggcctgatttatctattttccttttttctattatatgtcctgtaaattgttgc

SEQ ID NO: 14681 - DNA, 2967 bp, Cannabis sativa
cgaataaaagcttacacataagataaggagtggataaggttttgtaagtcatcaggagagaaatcgatctcatcaacaaggacatggtagtgtgctggtctagaagttccctgagttttgtagcagccaataaagaaaatgaaaggtatagaaaaagaagcatacaatgtgatccaatttttaatttgatcagcatttaatagatcaaatcaggaaaaatgaacagtatgacagtcaggaatatatgatagttcaaaacacatgcaaatatctccgacaaccaacttatccagactaaacatcaaatctcattatgcaacctaaaaaacttcattgttatatgcaagttaattaaaccgacaaaacatttaaaggataggctaataaaattgtgactgatgcacaacacacttaaataagaatggtatatgagagttagggtagagaatcatttggttaagtgagcattagttcttggaagagagctgggtcgctcaaatacccagcaaacttgttctctttattttccaatatcaatatatcagctatatttccttctattggctactgttcttgcctaactgataggagattcctatcaacactctcctaagatacaagatacttacaatcatcccagcatgagagcacagatagaaatcatagttccttgggtgcacaattccattgtccacaatagttcctgagagacgaaaacagaaattacaaaacatagtacagctttactcaaaggaataatgtaccaattatttaaaagcacaaacacacctggtggaatattattgttggcaccaccagcttgaaataactttgtgtgatgattcttctgtgccacaatcacagtaaacttaggaaggttttcctcccctagatgttgatacgcctgtaacacaaaaagctactacatgtcataggaaagacatgagactacagagactactattagccgtataaagcaagcacttggcagaaaacactggatacagaaatcagtacagaaaatattgaagagcttaatataatatttgctagaaacaatagggttagaatttttcttttttctaaaaaaagggtaaatacatagaataataaaatttcatatgatatatcgaatcctgaattacagttgatcaaggtttgtccataacctttatgatttgatccaactcaatgttcaagacttgattgaattgtgattcacttactccatccctagaaagaaaatcaatatgctcaagtgttataaaaactgtcttcagcaattaaaagaaatacatataacaaattcagggggcaaaaaagtgaaagataagatttcaaaacaataatggaagcaagatttcattactaaatacttaaaaatctgaatgaagagtatcaatcaatatattgcacaatttcatttcaacctggttaaaaatttggcattttgatagagcaatgcgtctaataattttatcaaaataacacaggcactagtcatatgagaaataaataaccaatactgaaaatcaccgaccaatagatcttacacaatgtcatgatacctgaaaataattatttgattaggtttctgcgcattacttgtttggtagaagtcaataagcagctccctgcaatcaaaggttcattccagtcttaagacgattgaaaattgacatatccaaataaatgaagcttggtggttttttttttctaaaaaacaattctgtcaggagcagtgttgtacacttgaacaaacaataaaacatgaaagtaacaaagaataatacagtcaaaatattaaaaatgttgctgggacaatgctcacaattaatattcacacagatgataaggaggagcatggcataaaagcctggatatatcacaaccaatctaaaagctagatgtgacattacatatacttcaataccttatgattccaccatcctttccattttccaagggcttgtatagaccatcgatcatctccattttaggtgactgtgtttttactgatgctctataccttgaaatacatggccaacttcgagagctaaccacctgaaagcaacaagactatcaaataccaaataaagagacactgatgctttggacaagaaaaaataacattttaaataccgcagctattgaagggacatctgagcgcccaggagacccatgggacacatccattcccaaaatcattgtggggttatcttttatgacaggaattcgtgaaggtttttcaattgccaacaaagaattaatccccccaagctagaggaaaaaaaaaacaagcacaacatgttattttggttaaataaaaaagaaactatgtgaaaaaaacacttctaacttataaaatttaccttggtattgattttcagaagaacattggttagatattgatcgttgaccttaaatggggcgatacactgggtgacaattccgaagtcacataggcatcttttcttccatggccctaaaataaaaataacaatattaacattaacattaacattaatattaataataaatatcacatggtataaagatatgcatcacataatattagaaagtgcaccatagatctcagaattttttctctccggcaagaggcaaaggataaactcaggtgggcctggaaccttgtctctaatcagctcaaacatcttttcaacccttgtaacaggggatcctcggcgagatagatgatcttcatcaattaatgtttttggcccatcaatttgctgtacaggaaaaaatcagtctgttctagatagtttaaaacaaaatagttcaagaactttacaatcgatacatagaacatacaattcctttcttccttccacagctaataagatcccttgaaattttactcatatcacagcgcgcagagaagttgaccacaacccaacagctaatgctaattggcgtcaaaacagtctggaaatatatatatat

SEQ ID NO: 14682 - DNA, 5297 bp, Cannabis sativa
tagcaccatgattctatatgttctttttcttatgcagcttaagcgattgaagttgagaaaaaacaactggagttcggaatcttatagatttgatgaagtttttacagacactgcctcccaaaggcgagtttacgaagcagttgccaagcctgtagttgaggtaagtcatgaagagactagtcccttgtacaataatcaataaagtactgataaattttgcagttggtgctgaaattagcataacaaaacaagttctaaaatattgattctattctagtatgtgtatgtgttttgcatatggttaatttggagagtgtacattgagactaaacattgttgatatcaaaatgaaattctgtaatttacatacattttttgttccaaatgaacttttttgcagagtgttttgaatggatataatggaacagttatggcttacggtcaaacaggtactggtaaaacttacacactgagcagattgggtaaagatgatacttctgaacgtggtataatggccagagctcttgaggacatactttctagtacatctcctggttttgatagtgtggaaatttcctatttgcaggtagaattcttatgttgcatgaaggctttttctttgttcaagtttcatggtgaccaatctttatttacaagatcattgttcttttttccacagttgtatcttgagtctattcatgatctacttgcaccagaaaagattaatattcccatttatgaggatcctaagactggtgaggtatcgttgccaggtgcttcagttgtccaagttcaagaccttgatcactttttacatctattacaaattggtgagacaaatcgtcatgcagctaatactaagctcaatactgagtcttcacgtagtcatgcaatcctcatggtgagtatatgaataggagttcatctatagtttcaagcttcttgatattatagtaatctgagctcattcattcattccatatctttttcatgttcaacaggttaccgttcgaagacctgtcaatgaaaatgtaaaagatggccttaatttacaagagaaggtctctagtcctagtagcaatggcgtacctatagttcgaaaaagcaagttgctgattgttgatctagcagggtctgaaagagtagacaaatctggttagttaatgatgactttgtttgaattcctttccactccattatgttcttgagatttaaagtagagtttttctcaaaaagtttgcttctgttgtttctatactctttaacttgaatataatgtcaaaacaatttcattattaaatagatatatatttcttaaagtggaagcttagttcataatttgtaagcttgcatattcttcattttttcaggcagtgaaggccacatgttagaagaggctaaattcataaattcttctctaacttcccttgggaaatgtatcaatgccttggctgaaaacagtccacacatacctttcagagattcgaagctgacaagactacttcgcgattcatttggaggtcatcccgggaatctcttttggtttcctcttacatgtcttttacttaatattttgttatttttctgagtacaataaactaaatttgagtgaaaaatagcaagaatttgttgtgttgatttgcctgtagaagaatcttgcactttatttattcatttttgtttttatataggctctgcaaggacttcactgataataacgattggaccttcagcaagacataatgtggagacaagtagtacgattatgtttggacaaagagtgagctattcaaaacctcttctggtgttcttagaataatgttacttgttagtcttttcagtgtaatatataccataatgttctttagaactcattttgggctggtaatcatgcattgaaaatagaaaaaaatgttatattgttacttaaatcttgttaatacattatttgcattatctcaattttgtgttatccattttctcaggcaattaaaataataaatacagtaaaacttaaggaagaatttgattatgaaagcttatgtcggaagcttgaaagccaagtagatcttcttacagctgaagttgaaaggcagcagaaggtgagagaagatgacagaaatgagttagaaaaagagctcagagagtgtcaagactcttcctatgaagccagaaagaatctaattacaaggtccgaggtagttatcttttccatgcaattctaattcagttggtaaagaaatggtttacgcgaattctttatgcttcacagtaattgaatgatatggtcacagttcgcatctcactctaatatgtcttcagtttctagagaaagaaaatactcgtctagagttggaagtgaaagatactctaaatgaactgaatcgtcagcaagatcagaacgagtttatgcatgataaggttgctgagctagaaactagattgaaacacagcaaggtgactctctttctttaagatggatagaatatttatttttcatgatttttttcgttctatcaattaatctgtcactgtattaagcatttacatttgttttacttgttagtagcaaaaccaactggaaagttctgcataccagaaagtattggttgacactactcagatgtatgagaaaaaaatcgcagagttgacaaaacaactagaagatgaaaatgctcgtactgaaatcgctgatgaacaattagatgcaatgaagcagctcctgagtgatagtcaaaagaagattcaggtaaattatggttgggaagaatcacatacttgatccaatttcactctcaattaaaaaaagcctacttaggagccatcctttcaatacagaaacattttctcatatgcactgacaacagtactatcattaatgcttatagaaacttgagatggagaattcaagatgcaagaaagaacttgcagatactactcagatgtatgaggagagaatttcagacctaagtaggcaattgaagaatgaacacatccattgtgaagatctaaaggaacaattagattcagctaggaagctccttagcgatcatcaaagttccatgcagatgcaggttacaagaaatcgatatgttttgtggaagatctttaattcaagactcctactgctttttataaattgatatgttttgttgtaaatataggggcaaaacgagatcatgacgcttcaagagaagttacaagaaatgtatcagctacatgaacaagctctagatgaacttcaatttttgaaaaccgagtacaaggatctatcggagaatgaggtaatgtgtttgaaatttagaacatcaaatttgattttcttagtattgcaccatttcctgtcatgtcatgtgatatctttcaattttctgtgtgacagttcttttcaattttcttactatgtttggaaattactaatagattttttgctattttataaataacaaaaggcaaaaacaacggaggaacttgtgaccatgaggcaaagacttctagttgaagaagagcataggaaaacagttgaaaatgagttggtcaatctaaagaaggctgtccctgaaaacgacatttattttgaggtatgtttggttatgcattttagaatatatattttctgttattatttaaaatcttacatatctttttttcaggataaaatgtcacatgggaaagaaaactcaggcagagtaccttcttcatttgggagtccaacaaggacagaaaagccaaattccttaagggagacactttctggtcagagagctacaattgcaaagatatgtgaagaaggcaagtttgaacaaaaatttcacttgtatgcaaattgactccttaatcatatcttgattttaagtcttttggctttgcaaactcagttgggcttcaaaagatattacaacttttgtcatcagaagattcagacgtccaaattcatgctgttaaggtggtggccaatcttgctgctgaaggtgtagtttacatactcgtagtctgaataattctcctatttcgtgatttatgtccgtgacaaattgcttatgttcttctagctctaacagttaattattttactgcatcaaacaccttttatatttttcaaattccagatattaatcaagaaaaaattgttgaggaaggtggtttggatgctttgcttacgctgttgcgatcatcacaaaatccaactattcttagagtggcttcaggggcgatagccaatttggccatgaatggtaatcctggcttggctctctaatttttcttctgaattttcagtctctaatatgtactcaatctaaattttgtactgcatatgcaacatgctaatcagattcattacttaacttagtaaaggaaaatgcttgtgtcattattaatttctatcatccttgagattttttgtttacttctcattaatttccatttacttcagagatgaatcaaggcttaataattagcaaaggtggagctcagctgttaaccacgatagcatccaagtcaaatgatccacaaactcttagaatggttgctggtgcacttgctaatttatgtggaaatggtaacttatgatacttcttactctgctcctttttcatactacttttcactttattttagagtgcatgtatctgaacatgaccttatcaacagcatcttaaatttcattacatgtagttgttttatatggtaaactcaacagtttgggaaatagtgttactttactcatcaagagatttcggttatgctgctacagaaagtttgcacgctgtactacaggaaaatggaggtattaaggcactcatggaaatggttagatgtggaagcagtgatgtcattgcgcaaattgctcgaggactggcaaattttgcaaaatgcgaaactcgtggagtgattcaaggtttatttcaagacttgaagatgtatatttctattatatatgctaattgtattgttaaaatgtgctgagaattgaaaaaacatgcaggttataggaaaggtcgttctctcttggtagaagatggtgtcctttcttggttaatagccaattcaaatactacctcaacttcaaccaaacgacatatcgagcttgcgctctgtcatttagcacaaaacggtaagctgtgttagaactgagattagatagctccactcatgaatagcagaaggcttttttttttttttttctttcttttaacttggtcttaccatagtgaaaaaggtgggataagaagtgagattacaataagcatttcccatttgacagtttgtatgatacttgtttttccttgtgaaaa

SEQ ID NO: 14683 - DNA, 4715 bp, Cannabis sativa
  modified_base (3568)..(3575): a, c, t, g, unknown or other
caaatgtgtgaacacccttcattttacaataattatttgtagctattcctttgaattagacgtgactttaagctgacataatacctacataatatataggtatagagagacccaggccccaccccagcatgccaaaatcaatctgttaagcagtgattgagactccttaatcaccaatcattttctctaatgtacccattttacatgatcaggattggttctagaagcactactttttgccttttccacgtgtttaaacaagatagtagaaatattgaaaaaaaaaaagaccatttccttttctcttttccaattctaacaccaaagtaagtagtaagtgattataagtaaatatatataccaaagagaattagatttgtacgtgttgattgtaaattataattttgtatggacatggatggatcaacgtcacacttaattaaccagttttgtttatagctagcggagaaagcaagcaaaataaacccaaggcatcttatctgtactcattgaattgcccattaacgaccctattatatcatgccaatgccaaaccaaatataacctcttggctagtcttaatttaaagcaaacctcttaaatttcattcgctcaacaaacaaatacaaaaagcacaccaaagataaaactgatgcttttaaaaagattccaaagcaataataataataatgataatgattttgattatcattatatagaaaaagttgaaaaagaaaaagctaaataatatctatacaccacccacctttctggcggaaaagtgctatttcaaaagccacatgccttgagtttaatggatagtatgtacagatatatagaccttttaaaggcttcgaagtttccattgaaaataaaaaatatatgaataatcattttcatgtagctatatttttttttcaaaaataaaaaacacaaataaaataaacaaatcagaaattaatatcattatagataaataaagatataaaaaattcaaatataaatattggtatattttgtaccatagggtgctctacaataaagtttgtgggaagtatttaataatattttattagaaaattctataatgcatattcttaaaaggaatacaccgatatatttttaccttgtagttatttaagttatattgcaaaattttgagacctttgaaaaaacttaacataccggaatcaaatagtatgttgcatacactacaagaaatgtcacttttgctagtatatttttgtgttggcaaaagtttggtattgcgctagtaaaatggaatttacttctgatttgttggcaaaaggggttcgcaaatcaacgttggtattagaacttttgctagtgtaaaataaaaagcgttggcaaaaataattttattactaactatattttaatttttttttttcgaaatgaggccctgagcgatggagggcctggcggccgcctccttcgtctcacctcagggtcggccctgatcttaagactaatgatgactttgttctgttttgggtagtaagtattttatatatggctcaagctgctcgtggaagggtgtcataatttctctctgtcacttagatctgctcattgatcttgtgtttcgtgcttcattctttgatgatagagtgtcagaatatggttaatcgtgtaatttctattatttattacttaaagaattggattgatattttctaatttttattagaaaattattgactaatagttattgatatgtggactttgttaaatgtataatttgtttttaaaagtctaatacatttcacaattcttcgatgctggtgcttattggattcttagttaagattgttggtagagttttctttcatttaatggcttagtaacctgctagtgttgattttgctttgtaagttttatcatcgaattacctattaattaatgaattacctgttaattaataatattttccattttctttcaaaaatattgtatgacatcgaacactcttaatgacttttaaaagttcatttccaatcaattttaaaactgggcaagtatttatattgatatatgaattatgaaagaaagaaagatcatattaaatggacttttttaaagtaaaataaattatatgaatgagtacgtaggataggattggtgggtacgcagaataaataaataaaatatgtttataacaaaatatcacgcagtgctttttcgtacaataattatacagccaatctaaggcaatatatatatatatatattatatttatataattaatgagtgaagttcgactttcttgtactaaatggcaataaaaaaaggctgttatttctctactcaaataaatacttaaaatgatagaaacaatatattatctcattatatattctgttgttagtacagctatgtaaattaaatgataagaaataagcattaaattctttatccactgccgtgagacaaagacatatcgattttattgaatacgccatcaatggaggttgaaagacgaaagaaccattaataattcttttaattaattaaattcaagtttattacatataatataatataaactcatggaaatttgaaacgtagtcacctccataaccacacatatatatatatatatattatacattaaaaacgtgcattttagcttcgacatacacacgtgtttcctcaatttggtccttacgagactttatttattacaagttaaaataaaatgtacatatataaatatatatgatttatatatgtacacacgtgtgtcgcgtgtgaagaaaaatcccttcatggttagtaatcttacaagtcacgcataggtttatatatatgtccaaccaactgagagaaaatttagattggcacaactactacgtatattactgtagtagattcttaattagagttgttcgtctcttacttcaattcttctttcttttctttttttttttcagtgaaataatgatgatcatatatatatatatatatctatagttatatttataattaaaaaatactaaaatttctctgccggcagcttaatatttagtattaaatagtttacttttgaattagttacaacctcttttgccacttgtttggtttggtcttttgctttgattccacactttagcttctcctctaaattaaccacctccattcctaccattaattaattaataaaatcagtcactcaagtattttaattaccacgttttgtatattatgaaggtagatgattattaatcaagtgttctattgtcattggtacatagtattgttatgaataagtgtttttgttaaataaaaatgaaaatattgctaccatcgatattagaatcctagtgttgtccacactgccgagttggacaaatgttactaaatttagacactttaactttaaggcaaattttttcgatttgtataaccctttaaattttgtagcttaaagctttaaataaatttcggcacgttaaacatggggtggttttatacttgaacagtattaagtctagatttacatgtttcatttgacttaagggctattatattttaattgctaaaagnnnnnnnncagttttatgctaacctcttaaagtttagacagttggatagtttaaagcaaacttttgatgtgtacaaacttttaaaatatgttctaggttcgtgtttgagtagtacttggtggtgttttatgtaatgtggatagacgcttttagataaattagttagccattggtacttcagtttttgagcgtatttgtatcaggttttgatgtgtcaagcatatgatttgctccttttgaggaaaatatttgtattgtattttatggtttctttcactagccaaaggattatccctttggctagttttttcttttgtattttctttgttttcttagtttcatcgtttatttgggttttatttttcgttgtagtttctgtctatagtttctacttgtagcttgtcattgaggtattttctggtttttttatgttttcagatcgtatttctgtattacaaattgagaccctgacactcttggttggacttaattgggctcttttatgtggaatctaaattaaagaggttttttttcgattcgttgtctttggtcacaactgtaaacaaagaaagggtcttctttaatgagctgggtgtgctacttgaggatgtcatagttttattgtctaaacttccagggcaattttgtcccatgtggctcgggatgcgaattttagagcacatggtttggcaaaacatgcccttcgattagacgatgagctatcctggttagaggaggtgccaccaccaattgtggattgctgctttgttaatcatgtgtgattttgatcaccgcgtcaaaaaaaaaatgttaccaccatagcgaagtatgatgtggtacctgtttggaggagttcacgcgaaggccttaggatcgagattcaggaactttccttttaaagagaaacaaatcataaacaagcaagtgacagatggccttaggacgatgttactggccttatacactactacaaaaaagcctatatattcccaccaagttttaagtgatataaaaaatttgtgtcggttgccaaaactgacgtaatatccatagacgcgaaaagttcttttttcgtcacaattgtcaaaagatgcatatgaacagtaccttcaactgatgaccagcgcaaaacaagaagatatatattt

SEQ ID NO: 14684 - DNA, 4523 bp, Cannabis sativa
gagaaatacaaactgacatgcattatgcataacatgttattccaacttttatcaaacacaggtgaaataaaaacagaattaaacagctgttcatttcccccctccccccaaacatgtttccccgtaacacaggtttaaattttaaacagaaacacagaaattcataaaaattacaatatctcagttccgtttgtttgagaattttaccgcaccattagcaaatattggcctatggatgtctcgaacatttcctagaattggcaaaactcgtgatagtacacccttcaatcgtggtgtgaactgcaatgcttcaacacagtttgaaaagcacagtagacatttcagtctaagcagacaaaaagctttaccaaaccatcatcacaatcacaaagctctaataaggaaaaatgaatattaaccatcagcagaagcaaagtctgcaagggtctgaaccatagcaggtgatgctggacttggccctgacaaatgaaggaatatttcttccatcatctgaaaattcagaagaaaacagaaggttattgaaacaagacttgtgcgcaccactcaaaaactaccccattatgaaagtagacaggacaagagcccacttactaggtcaggaaaatgtgagcctattgaaacaagcaaccaagctgcagctctttgccagtcagtattcagttcctgcaagagcatttcaatgaagcataagcagagtttcacgaattcaccaacaggcgtgaaatttacaatgaagcatataccttgcatgaatttatttgcagctaataaaacaatttacacaaatggttacttcatgaggtcagcctaccaagtgcaactagtaactaatgaattatccaccaaccaaccactactttaaccctataataaacatgttactgattcaaaagaaccaaattctaatgataaactcaccactatttaactttacagccaaaagttacaaattaaaaagaaacaaacttcttatcatagcatcagagaatatatatctatgaagaataataacagaattgccaaagcactaaaaatctaacagagctacccaaagtaatagtgtattatctatttgtaacttcaaaactaccagttgatatatagctcagagctcagtactatatactactaaccaataatcaatcctaatttaatttgaacaaaaatgctgcaaatccgagcaagcattgttcacgtactacacatgttgcttcaatctttgtataataaaaaatgttgttcagcctaagacctaagtgagaaacatgcgcataatttattgatactaggacccacagaagtacttggcaactacacaagtctcatttctttaatgagaaaaaaaaaacaaaaataacagattttccatttcatttattttgtctaacacattaagatctgaattgagcaaaccagcaaatcgatcattggtaggaaaaaatatatattcatatatatagtggatgtgggtataaacacattgttggacatgtagtagaacacctttgaggaaatcatctctgctgtggcaatcttagcgagcttagtcatgaaagaaggatcagcatcttttttgtccaaagctcgtactccaaatgccataacttgaaaaaccccagccatgttcccaaacctctgaaacattcataacaccaaatacacgctcaagaattttaagagatgaagccaatttccattctaattccaaggaaaacaaaaaaaaaaaggaaaatacccgacgtcctcctcgagaaactgaacagcaacagtcaagaactaaaagcgggttcctatgatcgcacaatgattagctcaaatgttcaaactacaacttcctatatatgcttgactacaaaaagagagaaaggaaagtacagcgaagcaatttcattgagagacgccatggatgcgtctctgaccataggagattcatctgcgagagaggacactagaacttgaacggcctctgttaaaaattaaaaaagaaaaatcaccgaaacacacagttatgaaatcagatggcgtcacaaaataaaccagaaaagatttgatgagtcacattacggaagggcaacctggtgcaggaattgaacttcccgagcttgaggacgccattgatggaaaattcaaacagcgaaaaagcaatgaaaaaagcgaaacttcataaagaaaggaaaagagagaggggacgaacagaagaagacgactcttactgtaggagacacttggacgggacacgccatccctgctgtcatttccagcaaggatcaattaacattgggctggactcttgctgggataattagagaattttgagacttttaactcatttattcaaaaatagcacaataaataaacaacttaaattagttgttgaaaattactattaatatttaaaatatatatgtatatatattcacattatctttttttaatttttttttttttttagaaaaagcgtttatatcatagattcaaagcaagttagacctctcagtcattacaaaatagagtttccggttgagaagagaccgggagagacccaaatacctgatgagtaaaagcctatctagccacattatgagcggaaaaattacaagttctactaacataagaaaaacaacaactactaaaggagggagatgacttagtacaaaatgagatatagttctctattgcccaacgagaccccttcccattgatagtgtcgataaccactgagatgggcgagacacgtgtacttcccaatgtccaagaacaactgagatgggcccattcacaggcccaatgggtcagtcaacaacaaattcggaccgcaacctcgagtccaattacaatctaataggaatcatggtaaggtcggaccttttggtctcggaagggcgactagtccagagaaagacatgttcagccgagtatatccaaataccctcgtggggtgatttgggaagtgtagctggagagttaatcgggagcaatcctacgtggtgctttactgatactagagcctagcggtgtgcatgggttgggttggccgagttgaggctattttagtgggccaacccaatgagatcggcctattaaattctaacacattcatatcaagttttgattttaatccaacccattattgatcgggttgggttataacccttaattttttgcaattaaaatttcccaattaaaaaaaaaaatgagttgaatgattaaataaatataaagttcaggcaaagtcataaaaaattcaaacatcaaaaataaattattacagtcatccaaattcaaaataagtattaaaattagttaagttgtctaaaataattaccaacttaaaataaaatcgatgttcttctacgtagacatcaattaacagtgtcaatagtcttcactttgttgatgctttgacctttactttattgcctacaattcaaaaactaagttactcaaattatttaaattaaattagcataataaaataaaattattaatttataaaacaatcattataaaaaaaattataccttccgtccattacatctataaatataccaaaactaacaacaaagcaaccacaaatattaaagagacaccaagtaactagcattattacatagtgtatccataaacaaacttatgtatcacaacatatgatacagttttattttatcactcaaattaaagaagcagtattacatagtgttagtaactaaataaaattataatatggagagtaaaacatatgctatatatacactattatagtagcaaattacattagccaaagtttatattcaaaacaatagtagttaagaatcagtttatattcaaatttatttttatttaaattataattaaaatagtattcaaagatcatagcaaatacttacagtaaaaaaaccaaataatatataagaaaaaataaataaatatgtaaacagtagtaaaataaaaaccagaacttcatatacacaaacaaatattatatttatcaaaataaatattatatttaacaaaaaaaaaataaggatgagatatgacagaaatggaaaagtccaaagaaatgaagagctcactttggggatttctcgatgaaatccataggaacctaagatactcagaattaaaacatacatacatacatttctaaacttatgcaattgggcctacgaaggctggcctgagtagaatggagacaacgcaataaagatggagcccataggagaacatacatacatacatacatgaactagagcacattcatagaaaaaaaaatagatttcatgttctccaaaatcacacttatccccattcttcattgttttaaaaatcaaactaacctctaattcaaatcaaggtaaagctcatggcattcatcaatttaagtctaaataaatccatacttggacggtggagcgtggtggtggttgatgtggcacggtgggagaacacgactggtggcggcctgggcgcacggctgctgagagggtttttttttttttttt

SEQ ID NO: 14685 - DNA, 16536 bp, Cannabis sativa
tttttttttttttttttaaaagagctcaattttaaaatttcgcacaaggccctcaaaatgcttaggccggccctgacccacagaggctaactgctgtaagtagtgttatgtaataattttttttaaagtaattatcgataattttattaatagagactaatataatttaagtttctatagctgacacttcgtcctctaatttatcaaaatgactaaaaaagaaaagataaaaatagttttatgaatgagcattagtttttgtaaaattagttttgtaaaaaaaaatatgtatataaatagtaataattaaattgctatattctttttttcctttgaggacaataaatttgctatctttacccgcggaagaagagtaccaatgaaatttcaatctagagagttaatggtaaatgtacctccacgtggcaataaattattggatttcggtattaaaagggtctgctgcggagtcaaagtatgatacaaaaaacgcggcaacttgcccattatatcaaaaatttttattcaagttttcacattcaccatcaccaatccttttaatctatcttttccttttcttctcaataaaataatctaaattggtaattactatttttttttcccaaaaaaagaagagaaactattagttagaaaactaacttgtcaagagatgagatcattaactatttttcacgtatctatcagtttgttaaaaaagaaaaaaactcatctatcagttacatacagtcaacagcaatgactaagctggaaagatgtatgatatgagtcacctattcgcagagttaccttcattgtaatagagaaaaataaatctactaaccaagagtaattcttaaatttagttactagggccttattaaagaaattttgaattaaataaaaaaagaatattcgtgacaattattttttctaaaaaaaacattttatttgtgaattaataatgaataattaattaggacaaaacttttaaattcaactataattaatggatgacaatgtattgtaatataaatattaaaaaatagttggtatattaaatattagtgaagtgggtagatgggcattacgaggctcagcctgaatgaaattttctaacaatatatatgcaagtcaaactatgcctaatatgagttccttcctagttcctacagctaattacaaattaattagttccctatatatgtaagtgattaacatttctccatattgtatatgtaactaaagaaaaaagacaagaatcttacaaaaaaaacagaagaagaagaagaagagaattttagaactttgtgtttcttatcttttatgatgaaaacgggtaaaatggaaaagaaataaaatgtgggaatgaagtgaaacaagagtaaagttgtaaaatgttttttgtgggtatcttatatccaaaacaaaattctagaatctcatttttgttttttcgttatataaaaatattctatccatgaaatgaaaatgaggatccttatcttaaagagaaagtctttattccctcaaaaaaaaaaaaaaagtctttattttatttatggataagcaaatgtaagcccttgctcatttcatggatcacgtttctccaatcgagcaataccaataaatttccaaataaaaaaaaatatttttataaatgtgaatccatgtttggtaattcataatcaagtatttttctttttggtcccaaccaaaacttaatttataaacactaataatacactttcaagtaacaatttttccattcttcaaaacattgcatagcttgccaaaaatcacacaaattacatcctctcaagtaactaaatcttcaagttacacttcgttgctatgcataaagccaacacttatttggttgagtacaaaatagaacaaaataataataaacaaaaaaagaaatcccaaaactttcttatacaatccaaagttttaaaagatacagatattactaacctacttgggatttgtggtacaacatttgcagtagaaagatgactttttaaggtaccaaacaaagatgacataatttttttttttctgttgggggtattatgtagtaccaataccatatgctttactcaatagaaataatatagtacctaagattaccaaagaataaagtatacttgaatagtaaaaaaatagtccaagttacgtgtcagagatagagagtgggagccaccaaccccaactctcactctccctccattcttcaaatgtttataaagcagagttggctttggagaaacctcccaagtcccaaaatcaaagtaccataatttcctctcctcttcatgatatctatttgttataaaaagcatcaaacttgagggaaaataggaagagtgcctaaaaacagaggtccctatctaaatttttatttctattctttctcatatattatcatatataaatgagataaaagggtagagctttaaggcaaaaatgaaagaaaaaaagatgggttttcttagaggtcaaatgggcaacatcttgttgttcatttggttggtggcattttcatggctttgttcttcggcaaatgcttctgtgggttatgaccacaaagctatagtgattaatgggaagagaaggattctcatttctggctctattcattaccccagaagcactcctgaggtacttcttgtaccaaataatgccaatgatccaatgtggttcacgggtcttattgccaatattattttttcttcatcactttttgacttgtggggtggagtttttgccttttttttgcattaattaagaataaagttttattctttttgtgggttttttttggggttgcagatgtggcctgatcttatacagaaagccaaagatggaggtttggatgttattcaaacctatgttttctggaatgggcatgaacctactcaaggaaaagtaaatattaatgcctttttttcttcttgttttgtatttgttttttctatgctttgaatttacactaatgaaaattttcaaatggtttttgtttttgtttttttttgttttgttttgttttttttttttctaatttgcagtttaatttccaagataattatgatttggttaagttcattaagctggtgcatcaagctggcctatatgttcatctccgaattggtccctatgtttgtgccgaatggaactttgggtaaaaaaatttaaaattaaaattaaataatttattgggaaaaaatataaatatgaaataatttgtactctgttttttgaaattcagaggattccctgtttggctcaaattcgtccctggaatcgcttttagaacagacaatggacctttcaaggtaaacccaccttgaatatttcatttcatgattaaattcttttcttgtttgtttttttcttaattaataaataattagtgtgtattattttttttaattaaatatgatgaaggcggcaatgcaaaaattcacaagtatgattgtaaatatgatgaaagctgaaagactgtttgaaactcaagggggtcccattattcttgcacaggtatgttatggaaaaccaaactctgttttctagaagaaataaaaatcttaactatctttgaaaactacatttattatttacttaaaagtatttatttgttttggggtttttttttttttttttgagatatttatttgttttggggttagtcaaaggtataaactttgagttttaaagttaattttttttttacagattgaaaatgaatatggaccaacagaatgggaaattggtgctcctggcaaagcttacaccaaatgggcagctcaaatggctgttggccttaacacaggtgtcccatgggttatgtgcaaacaagaggatacccctgacccacttgtaagtattaattaattaagtaattactatattttttttaattttgtagagaaataacaaaaagaaaaataaaaaaagaaaatttgggggcctgtttagtatcacttcacttttaatttattgtatgaaaaatactaatgagtgagttgagatcgtgtcaaattaaataaactgaaaataagaaaagacacagaacatgcacaaaattttcttgtaggattttatcattctgttgcttattattggctatattaatattattttcttcacttcataatgttttttttgtacaagagacgattggccctctgtataaagtgcccttcatttaaagtcatacttctttgttggtggggtttataaagatcaagttgtttgcttagttgtttcttttacttatttatttattttacattcttattttcttcttcttattttatataatcatatagctatgggacatgctattgcctgtttgccctcatatctgttatatgattattaagggtcctacttgatttgaagcttgaattcggattttgttttaatagaacagactggtgatttgtgaaaccataaaaagccaagaaaatgacccctttttttaattgtttgatataattacttttaagcctctttttattctgaaaaatgaggtatcagcagcagccaagagggtaaaaaccagagagaaaatgtgaacttagttatgaagtttaataacaagtaacatggtttcaaaataaattctcaaaaaagctgtatcatttatggtgtgacagatcgatgcctgcaatggttactactgtgaaaattacaagccaaacaaggtctataaacccaaactatggacagaagcatggactggctggtgagtcacacccattgcctgatgtacaccttaaatttctcattttcacttctttgaaatgcttctcataatgtgtaacattaatgttttgtcctattgtgattaaagacatttttgcataagacagcctccttgaccatgtaactggtttacaggtacacagagtttggtggggcagttcctcatagaccagccgaagacatggccttcggtgttgcaaggtttattcaaaatggtggtgccttcattaattactatatggttagtaattatttattgacctaggatgtaattattttcacccttcgtatttatttattaaaatctatatttatataatcttgttccagtatcatggaggaacaaattttggccgcacggctggtggtcccttcattgcaactagctatgattatgatgctcctcttgatgagtatggtaagtgaataggcttataacacagataaagatctagaaaacctttatgtttgctccataaggttgcctaatatcctggagataagagaaagaaaagtcaactacttgtttttcctagtttagacattcttaaaaaaatgcttacaaggttgcctcttttttttggtaggattaataaggccaaaatgggcacatttgagggacttgcataaagccatcaaggcatgtgagccagctttagtagaaactgatcctgcagtgacatcacttggaaaaagtcaagaggtaaattttataagctaagctaaaacaatgaccttttgcatgtattaatagttttttttactatggttattctcacaatcaaactattttgtgtatgtctaggctcatgtattcagaggaaaatccggggcttgtgctgcattccttgcaaattatgatactaaatcaactgtaagagtgagtttcaacaatttgccgtacgacctcccagcttggtccattagcgttcttcctgactgcaaaactgtagtttacaacactgcaaaggtaagaaaactactaatgattatgttaaacatataaagttctattgcaatgggcaaagtgggttttaaaaccactattaggttttacaaaatctgatctgcggtgatgcatttaacatgaggctgtaattttctacaggtaggtgctccaaactcactggtacaaatgacacctgtggttaagggattctcttgggcatcgttcaatgaagaaactgcttcttccagtagtactggtacattttcattggaagggttgcgagagcaaataagcctcacatgggataaaacagactatctttggtacatgacagagtaagtattggcaggcaatgacattctttgtgttgacattgttaactttgttttagtttgtcgaattgtaatcctcttgctatttttctttttctacttgttcacagtatcacaataggttcaaatgaaggatttctcaagaatgggcaacttcctgttctgactattttttcagcaggtcatgccttgcatgttttcgtcaatggccaactagctggtaaatgaaactgcaccgatttcaacttaaatttccaggcaataattggaattattactaaatacatttctttaacaggaagtacttacggatcattggccaatccaaaactaacattcagtcaaaaaataaatctgagagttggaatcaacaagcttgctatactaagtgttgctgtgggtctgccggttagttctctcacctattggtgtggactggttatattagttccgtacactattctataatagcagatgaacttgacccttttctcttctttgatcatcagaatgttggtctgcatttcgagacatggaatgctggtgttcttggcccggtcacactgaggggtgtcaactcaggaacatgggatatgtcaaaatggaaatggtcatacaaggttagttgacagtcaacatttcttgtttcatattctgcctatacaatcaaattgaatatgattaagtatcacagagagctaaaaactaaacttgtccatgataacagattggtttgaaaggagaatcattaaatctacacacagttagtgggagttcatcggttgaatggaggcaaggtgcactcttggctaaaaaacaaccaatgacatggtacaaggtgagagaataactccaaacacgaaaacctaaccactctttgaatttcttcatagagttcatttcattgcttctccatttccagacaactttcaatgcaccaggaggtcatgctccatttgctttggacatgaataccatgggaaaaggacaagtatgggtcaatggtcggagcattggacgccactggccagcatacacagcacacggcaactgtgcgccttgtaattatgctggaatttttgatgagaataagtgccggagcaactgtggagaggcctctcaaagatggtgagtctaagttatggtttacatagttgtactctgtttgttcggttgtagaaagtatgtgatgatgatctgttattttcaggtaccacgttccacggtcatggctgaacccaaccgggaacttattagttgtgtttgaagaatggggtggcgaccccagtggaatttctttggtcctaagaacaagagggggccagtaaaaataaataaaaagggtttggaggacatcaatttccaaccagcgtatagcaacatttgtatttacgaaaactaaagaaaaagaataaaaagaaaaataaagttccagattgattcaatagcagctgcacattaataataattgaagctcagaagattccagagtgccttaccagtctgattcaacatggacagaacgcaacttcagaaccatacaatgtttaatcctggaaatagaaactgtagatagtgtgacgatgtttgagtttgtacagacattttgtatgtcagaaaaagaaaagaaaaaaaaattaagaagaaagcttcatacatatacatacgttaccagtaaagagtaagtcctcaacttgctgagtctcaatggctgtaacattctagggaaaggcaattaattgctttttctttgcagaaagaaatggaataaaaataaagtttgactataaagtttatattgatcttgccacttttgatctatgttcctcaaaaggggtacaatagttaatagctaacgattttctcagcataaaatatatatttgttatatacagtattaaatattcacaacagagaagggtattctcttacacattcacctcgcaatctctttcaacattggcgttacaccattacgacccactataaaaattacactggcagagctgaaatcatagggcaaaacttctttattcttttacagagaagagttattgctcaaaactttaatgagttcatcaacatatttgttaatatctaatactctgtgaccttgatgcaaccactgcttcaaccttgcacagagatccatcaccaattgttttccatcttcttcaattttaagttgaattagcctattgatgcactttgtcaagaattttcccactcttattttcactaggcaaataaaatcaaccccatcatcttcggtctcaaataatgaagcagacatactttcaacaatatcagttaaactgaagacaagactggcacctgatatggcctcatccttagtgtaattatcaacccgcacgagtatttcttcattgttagattttatatttttcaaacttgaaatctcaattttccttgactggggtattctatcagtggcagcataatgcagcagcaattcacacacctcttcgtctagataattcaggcaaccaagcaagatacctaatgggattctcctgaacaatgtatttttccgcatactaagatcacaagatgattttgtgtcacagtactttgcggttaagcttttgaattcctcaagccaaagtgcaacgagttgacagtcaaattgttctgaataagtattatacttgctacaagttttgggttttttcagtatctttctgacactagctgtcttcttcttacatgaacctgaatcaatctgcttaaaagccatagatattgatatcttcaccagaagattggctagtaaatcctgatcagatatactaacagggttcagaatccacgcgatgtaccttgctgcagcagaagaatgtgattcttcataaccaattttggatgtgtctgttatacatttcgaatataccttgtcttgaaagcttttgtcagagaagagcaaagcagaagcaaagtaaaaccaattcgggaagttgattgcaagagccctgatatttatgcacatattaaagtaagtgttgatagggaggattgttatggtgctcatgccaactagtttcacaaggacataagaagtgggaatttaccagtaagatttatgatctatattttcagccatcattccaggtgtcttcatattagaaacaaactgtttgctggagcaagacatcaattcacttgtaccaatgtccaaatgtagaagactaacttgagagatgggtccagccaagatcctaaaaaagtggtagtgatagggaaaaaaagaattagcaaatggaagctttgatcctaagtccattgagaagtcccaccatgttggtctggaaattacatctagcatcactaagcacaatgcatttagaagctctaacacagaagacagccccctgcagaacaagaacttcattaataagatatatttgttcattttgctaaaatcagttgaaatgaacaaaagtattgtcaatagtaactatcgttaaacaagtcgtgtccactataataacatcagcacacaaatacctcatatcatatcacttgttccaaaacaaaaattttgagatgcttaatgacaaaaggtaaatttaaaattagcaacttataaacgtatccgaacttaaattcaaattggataattataactaagagagcaaaaagaattcaacaatttcaactgttaactagcaacaagtgggagaatgaacaatggaaaatattcatattgctgaacaagcaatgaataatcttatccaaagctatttaccgaaattccttacagcaaacaaggtcaaataattgatgaagaaattaactcacgtcaacagaaaccatctgtgcaacagagctcttgtttcaataaacatagcaggagaaagtactaagcattttacgatatcacgccaatcgattctctcatgaaattctttgcacagaaagaggaaaggcctctccatagattcgtgcaaaatttttaaaatatcattctttaaagttagttggtcaacaaaccaggacatcaatctgcagagggacacagatgaactaagttaaactttaaaaataaagaatacaggggaagaaatgaagataatagtagcacatacctaaatggaatattactattgtcaaaggagagacctttaggacaagtactgagaagcttagaaactgcagtggccctttcatcaagggatttaactgaaagaataggtcttgatggatacggaaatcgatagcaagatgatgaaattgcaactctgagaacagagtataacaggtctttatactgagtacctgcaagataccaaaattaaactaaaaaaatcattacgatcgagtagtacaagtgaaagtaaaggaaataatgcttgagatcgagtctcataccatgtctctctagtttttgaagaacgtcggagcaggcttcgatcaaaccggggaaatctcggcgagaaatggaggttccgattaacaaaacctcgtctttgtgaaactgaaaaaccttgcagctaatcgatgacgagagaacgctgacaatggtttccatcaagtatttaactgttgaatcaaaaacctgagaaagaaaatgaaggcgaggatcaagaaactgaaacctagcagaatttttatcgaattaataatagaaaaacctgtggagctttgaagcacatgagagacagggcggtatccaaaaccctaaccctagaacgagggttgaggttgaaattggaaatggagagttgcagagcttgttcatggcaagaagagggggagccattgaggtgggaagcgagcctctcgaagaggtcggttatttcagccgccgtcatttttggtcaccgccaaaacaggctgaggtcttttggtggattttcgcgccaaaatattccaacgactacaagctcctttggccacccgcctattcaaaagctacattatttttttatttttttttttaaaaatactattttttatattttatttataattttacaacctaaaatttttatttacaaaaatatactttcaaagtctcatgtttcaattagcatccgcaaaataatttttatttaattacttattttgtattgaataagagtaggacaaataatacaataggtgggtgcgtgagactaacagtttcagttcattatttattttattgaaaagaaaaagcgtgtagctcatttctcacatattttagctagatctttatttttataaattaataaataaattaaaagagacttgacaatgattcaatatataaaagccattgaaagtttcagcagaatagtagttgagtcattactcagcacttcactttctctatttgttctgtgataaacaaaaccaagaatgtaggtgtatagaataaagtaaaagaataaatgaacaagaaaagcaaaagattttgattcatttcattctgttcctataaattaagtctggtgtttagaagcttcaatgtcaaatacaatgagaaagaatatgtttatattggtggtcttttatctgttaaacttatgggatttacaacaagtactagcaatagtagcaggagaagccaatgtgtcttatgacagtagagctattctcatcaatggcaaaaggaaaatacttatctctggttccattcattacccaagaagcactcctcaggtagtatctatctatgtatatattagttttttagttattcttacttttttctatatttattattgacattctttattattattataattattatagatgtggcctgagcttctacagaaggccaaaaatggagggttggatgttatacaaacctatgtcttttggaatggacacgagccttatccgggacaagtgaattgatcaacaagttcttatcttaattactgctaattaaacaaatgtgttcataatctctatagttattgttattattttttttgggataaatttcagtattattttgagggaaggtatgatctagttgggttcataaagttagtggcaaaagcaggtctttatgttcatcttcgcattggaccatatgtatgtgccgaatggaatttcgggtaatcaaactatataatactaattttgttgtgtatactaattataattatttgatttagccagacaatttttgatacaggggctttccaatttggctaaaatatgttccagatatggtgtttagaacagacaatgagccttttaaggtaatgcttgggccatcttcctctctttgttacacttttaatataatgtaatgtaatattaagtaccattttttttttccttttttaatatttttttaaggctgcgatgaagaggttcacagaaaaaatagtccatttgatgaaagaagaaaacctcttctatcctcaaggaggtcccataattttgactcaggtagcaatatatgtttatttgatctccctttattaaaaaatgggtttttgaattttgatcctcactaaataaatttattttaataattttgagacaaatagaaaatgagtacgaattgatagaatttgaagctggtaaagcttatgcaaagtggtcagctcagatggctgcaaatcttggaaccaatgttccatgggttatgtgcaagcaaggggatgccccagatccaatagtaacaaaattctcactataaaactccaaaaataaacatgggcattataacaaaaatactctatttttgtttttggttactagtatcgttttatgtatgatagataatgtgaaagaggttatgtgaaatacttatattagagcacaattattttttgcataaaatattttacataagaggtaattattagaggataataactatagaatttctttatacatgtattttctttttagtcatatataaaaatacaattttgttttaaaaataattttatatggtaattaccctttaacaaaaagaaaatttcccatgttttactaaatgcattgcattacttcaataataaaagtagttgacccatgcagataaatacttgcaatggattctattgtgaaaacttttcacctaaccaaaattataaacccaaaatgtggacagaagcttggactggctggtaaaaaacatgaattttcacaacacaaactctttttttgaaaaaatcattgtattaatttgcttctactgcttacattccaggctattgcattttggtggtccaaccccttataggccagtagaagacttggcatttgcagtgacaaggttcatacagaacaatggtgcagtgcatacataaattattacatggtaagttagattcttcatcttaaatgggaatgaaaaaatgaacagacattgattgtgtatttattataatgtactgtatatttattcttcagtttcatggaggaaccaattttggaaggacagctggtggaccattcatttccactagctatgactatgatgctttaattgatgaatatggtatttattaatttattttgtgtgtaacaaaatcttgcctaataagggtctcttgtccatatttgcaacaagtgttggaaaaagaaacagtagacatgtgactaagatttcaactacttcacttacttgcacatggatctaataacataattattgacaaggattcaaaacacatgaatttagttgtgaattcaatgatgggatgtagtatttttgtcatgatcatatataggactaacaagggaaccaaagtatagccatttgacagctttgcataaggccataaggctatgtgaaccagctttggtgtctgcaaatcccatcagaatgtcacttggcaaaaaccaagaggtactctaactattctctcacagcttcccagcttaagtattgatcataaaaaaagcatcaagtaattcaatttatattcttaaggctcatgtttttgatactcaatccgggacttgtgctgcattcctatcaaactacgaccccaactattttgtgaatgtgacctttaggaataggcaatatggccttcttccttggtccatcaccattcttcctgactgtcaagaaccaagtttcaacactgcaatggtgagaaaaccactaccagtacacttattataaagacatgtttttggccaaccaacattattttcttttatgtacaggttgttgcaccaaaattcactgtaaagatggaacctgcaaagaaattctcttggcattcatatactgaaaaagttccctctacaaatgacaaaagttcatttatatcaactcgattacttgagcaactaaatgtcactaaagatgcctcagattatttgtggtacacaaccgagtaagtattcatttgtcagcatcgaagagcaattttcttgaaacattgtgaccaatcaactgttgccggtaataattacatattctcttgctgtgacagggtcaatataagagcagatgatgccttgttaaagaatggaaatcttcctgtactactccatgttttgtcagctggccatgctttgcaagtttttatcaatggtcaattatctggtactatacaagtacatgactacattcttgtttttataactttcaaggaccatgttatgcaagcatttttcttcctctttttcttagtctctagtttcttattctattgcaggtactgcttatggaggttttgaaaatccaaagttgagtttcattggccaagtgaagctcatagctggtattaacaaaatctccttgttaagcattactgttggtctcccggtcagttttcccatctctttttctcttttttttggtattgtcttctcaagtcaattctcataaattttccaattttagaatgtgggcctgcattttgagacatgggatgctggtattcttgggccagtgaagttggatttactaaatgggagactatggaatgatctgtcacaatggaaatggtcttataaggtttgccaattgccacaccttgaccatataagaaatctagtttgtagtacacaatttcagcagtacactatttagtttgtagtacacaatttctgtcctatttatatataaactgttgaaatattgttaagccataattgtttatttagcattacaaaaatgaagaactaaagaaacaactaatacccaagtgacctctctaagcagattggtgtagaaggggaaactttaaggctctactcattcaaaggaagctcctcagtcaaatgggctcaaggatcatctgtacctagaaagaaatccttaacatggtacaaggttagaacaattgaaacaccaatcgaaattctccatctttactcaagatcatgcatttttccaagttgtataagaaatctttaaacaccttttctttaaaaaaaatatgtatatatctttttccagacaacatttgattcaccagaaggcagagatccactagcattggatatgagtagcatgggaaaaggtcagatatggataaatggacaaagtattggacgatattgggctacatataatgcaactggtagctgtaataacaagtgtagatacagtggaacctatcatgaaaaaaaatgtttggttggttgtggagaggcctctcaaaaatggtgagatacatgtctttcaatcattgattataatacttcactatgtcacattttatactaagttatactatattcttggtgtaacaattataggtatcatgttccgcgatcttggctgcacccaaagggtaacttattggtggtgtttgaagaacaaggtggtgatccaagtgggatttctttgatgagaaggataatacaaaaaaacatgtgaagagtagcacacatattttgaccacacacagaacattgatcatacctaaagtttctttctttctttcttttttgaaagttgatagagacataggataggagtgacatgtttttaagttgatatgtagaagtaataataagaacaaattgattaaaaggtagaattaaaaatgtccgccattataattaatttacagacacaatcattctcgaattaaattatatgaatgttgcttttacattctcttctctgtgttgaaatttttcttcattgataagtttggcataattaaatctgtttacgaaaccttacaaaaaaaaattgtttatgctagaaagaaattgtgggggtttcttttattttcagtacaattattaataatgattctgaagagacttcgccaacaaaagctgtcttaaagaggttatgtgtatatgtttagcaaattggaaaaacaattgaggtgatattgtttacttttctttaattataattctaggagaatgtagtatatactatcgggtgattctacaattcatccccttataagggatgtactgatctaccatctacttgtttcggtatctaaaaaaaatttttagtctatttttttttttttttatattcatgtacgttatagctattttagatattctacaaaattttga

SEQ ID NO: 14686 - DNA, 4304 bp, Cannabis sativa
ggtaaaataatttccaacggttcccaaccatccacattattagattctcaaaataaaagttgtaagaatcatcttctctaagaaactttaagagttcataattactcaagatttaggccgattaaccattgattatcagtataatatgaattaggtctttatagtaaatgatatttttgataaagacatctcaattttatatcaatcaatgtcatatataatctctattatatataacacattcacttagatgtcatactacatcagtaatctgaattgagattacttgtatcgaataacgagcatcagtgaattgtctaacaaccattaattaaagattccataactttaatttgttgctgactgttttattcatggctaagtgattttaattctcatgaatgaataagaattattttttatgtttatatataaattttttaatattaaatattaataatgtaacattcaagcacatacgaaaatgttcaactcttatttataatcagaattgcctttataggttttcatgaaataaatcctaacaaaaaaaacctctcggtacctcaacaatgtccactaatactgtgatgacatttctagccaaccaatcgagtttctactgttactggagtgaaaacatttcaactcacaaataacatatattttacacacatagtctaataaaatctttctaattaattaattacgtctaattttctcatttcataaaataaacctattttctcatattaatctagtaagattataatattactcatttatccttttaatatacaaattatttcatattttatataatatgttttaattaattaattataattaatttctgaaatattatagttacctttatcagctcccaccaaaagtcatgcacaagaccatcgatctttgaagccattctattagtcaacatgtaagttgtaaccttaattactcaattctactaaaattgataacatgactaattaacttattcaatacatataaacataaatatagcaatgtaatctttaaaatgtacagcttagtttcttctctatacgcaaaattgctagaatgaaaaaacttgtattgcattttgcttttcagctacgatatttgccataaattcttgagagtttttgttacaaaaataaataaataaataaatgctctcattacagatttcaagtactttgctaaatcagtgaagccgccattaaaaataaataagtaacccactaattcttataatcgtactctttgatctactccatttttgggtgaagccgtagcgtgttcaaatatatattacattatataaagatcaaaaccaaatccaccccctctttttcttaactccaattcaagccaatgggagtgaagaataaagatataatagcattcttttgaagtcagacgtagaccacgaggacccacacaacaagctaattagaagttattagagtcccactcaaactcatatgtttttgactaagcacagaaatataaaggtatatatatatatagaaagaaagagagagaagaaacagagacaagaagaaaaacagagagcaaaagaaatgaagcaaggtatagtccttcatcaatggcttgttctgttctctctcattgacatgttctgctcaagccagtctctcacccatgattacggccaagctctctctaagagtcttctctactttgaggcccaacgttcaggtcacttgccccataaccaacgggtcacttggcgtcttcactctgccctcaacgatggcctggaacaaggagtcagtacacataaatacatattcatgtaatacgcatttgagaaggaaagtaaatgattattttgttgtgatttttcaggtggacttagtaggaggatactatgacgcaggcgacaatgtgaaatttggtctacctatggcttttaccgtgacaatgctctcttggagtgtcctagaatatggtaaagacatggctgaggccggagagtacgttcacgcgctggaagccatcaagtgggggacggattacttcattaaagctcatactcaccctaatgtcttgtgggccgaggtaaaacactttcttcttctatgtcataccaattgttgactaatacaaaatacgaaatcctcgcgctcttattgttgagtgtgaattggagcaaggttaccaagtagtcaatgcatgactgagaggttctgtttttgatagcgtgattggcgcgtgtcgtactcgcggcggtggcaacgttgagtaaatattagtcatattattgaccttaatttgatgagaggctacgtattaattgagagaaatgctaagagaaatgcatgcacccttgttgtaatatacatattgtacaattcaatattgagtactatttatttactttaataaaaattataaaaaatcctaaactaattataggatacagcgctcattaattattaattgaaaattagtctgattagatttattttgtgcggggtcactggtcaggtgggcgacggccacacggaccactactgctggcagagaccagaggacatgactacatctcgtcaagccttcaaggtggacgagaacaagcctggatcagacatagccggagagacagcggccgccatggctgcagcttccctggtatttagagaaaccaatccacattattctcacctacttctataccatgcacaacaggtaagtaagtttattagttgttagttaatgtgcttattatatatgctcttatggttttggtttgtgccatttacttttttaattttgtagttgtttgagtttggtgacaagtacagaggaaaatatgatgacagtattggagtggctaaaggatactacacctcagtgagtggttatatggatgagttactatgggcagctttgtggctatacaaagccacaaataaagatcattatttggagtacgttttgaataatgcttatgcttttggaggggtgacttggaccatggaagaatttagttgggatgtcaagtatgttggcgttcaaatcattgcttccatggtacatcttttttattttaacgcccattaattatattatatgataattattatataaagtgattagaggatttaattttaatattattttcattccttaatttccatgtacgttaactttctctgaagttactaatggaagaaaggcacaagatcaaatacaggcacgtggtcgaagagtaccgttcaaaaggggagcattacatatgcgcctgcctaaataaaaacaatttgactaatgtgcgacgcaccccaggaggcttactgtacacccgccaatggaacaacatgcagtacgtctcaaacgctgcgtttttgcttactgtctactcagattacctaacaaccaccggtaagatgcttcattgccaaaatgggcttgtgggcccaaatgaaatcttcacctttgcaaaatcacagattgattacatcttggggtctaatccaatggctgtgagctactttgttggttatagtgcacagtaccctcaaagggtccaccatagaggagcatctattgattcttataagaaaactaagggatttatagggtgcacggaggggtatgatagttggtatggtcgccgtgagcctaaccccaatgtgttgattggggccctggttggtgggccagacagtaatgaccagttcagagatgagaggtcaaattatattcagactgaggcatgtacttacaacactgcacctttagttgggctttttgctaaattgagtaggctagaagttgaaaatttgtctcttaatgctcatttaattgcttctacctagagggattttttttttattattattattattaacaatattcaccatatgtgtcgatacttgacacttcatactaaaaaatattcaatagaattttttctttttgattgggaaagatatacaagagataagtgtatgtgtcaaatttttggcaagcataaattgtctttccttagtagagaaaatttgtggaatctattttcaaacaatccaaaagcaacaaagttgtaactatgtctccttttttattaggtcctcttcttcttaactttatgaatattagtagatcttgtaactatattgtctataatgtgactaagtgggcctttacccaccagatgtatggttgtattccagtcttctctatgttggagaacctcttttgtaatgaccgcgaggtctaattatcttatgttatttaatgcattaatacacttattttcaaaaaaaaaa

SEQ ID NO: 14687 - DNA, 5381 bp, Cannabis sativa
tagagttactatgcattttatatatataatgatattaagtctccccacattatcaatatcaacttggattgttcaagttttgcaaaacccttaaacccgattttaaagtaaaccccattttgtaaatagaagttgatatcattacaaataataatatttggccttgtggtgtggtcatagactcatagtggtattgcagagtgaaaatggttccattaaagtcatagagaataaaattgtctaaagtagaagttccactatattatactagtgttatatgaacaataatttggtagaacatctctaacattagtacccatattagaagtttaagactaaaattcagctgaatagaacaacaaatccaacaagcctgtctattagtaaaactccaaaatatttctgagaaacaaatactaaatttgcagatccttttctaaccatcatcttcttctgctgccaccaattttagctcccactattgactcaccaaccccctgtcactgaaatttcatctcatgaataataataaacaacacattacacactaatggtttcaaaaaaaacttcactaagaaaaactaatcaaattcgtagaattgataaatggttaaatactctactgacctccagtccttgacattcaccaagctctcttgcgcttcaattttttcatactcattagcgaaaaagcaacaacttccttaagtgtggcttttcttccttctttaaaattccaaagttcaggaacagtgtatcttccgctcggattatactcgttcatttctttcaaggctgtaacaacggtagcatgtatctcttctccccactcattcttgagatttctaaggttctcatcttcctcatctataatttcctgcatcatatatagtagtactacaatcaattacacagtagaaaccaaaagaagttcttgaagatggctttcaaagaaaaagatacaaatatgaaaccatcacaacctccttcaaccttacgaaagtagtaaagtaaataacaagaccatgcaaagaatcgcaaactacaccgaaacatgaatagttgaaagataaatttagttaaagaaagtacctcaggattcccattactagtcaccaccttgaatggatgccaacttggatttttcagtttttcttgccacaaggagcatagggtggaggcctgcagctgagcttcgtccagagaaaatcgtttcttgcaaatatcaaggaagggcttctggtcgagatctcccattctttttattccaatgttactacgaccacttaataaatcaggcaacccctaagaaaaaagtagtcttattcagcctttgagatatatctccatgtcagacagaggtcattaagaaaaacacatagaaaaacaatgttacacttagaagcatgaacaaagttagccaataaacaactgatcataaaattacctactaatctcctaagaagcatagttttcaattttcactcaagtaagttcatgtagcatcaaaacccattaacgaatctaatgtagtttggctgattataagaatctgccatacctacacttttttttcttcaccacaatgcacccacatactataaacaatggtaaataaataatgatctagtgaatcaactatctaatgcccaaataaatttatattaaaaaccttgtacctcaagaaatgatttgcgagcttcttgtaactcatcattggtctcacgctccttcatcaaaagagtttgattcaaagactccaagtcctccagattttcatgcttttcctgtaattcatctttcatttctttcatcttcttctgaactgactcatcatcttgatttcctagatgcttcaacacctctaacttcccctttaactcttcaatttccattgccaacttctgcttagcatccagctgcttttctaactgaagaattttattcaaggcttcttgtttctccctctgaaagagttaaaatttagctcttgtttgtgacagtacagatatcaaaactctaatgcaattttagggagtatacatacatgcatcataccttttgctcttcaaccagcctatagacattctcatcagcctttttctgctccattgaagctaactcaagtgaactgtttatcatatcattctacaagagagattgaaataaatcagttctgtgcatcgcatctatcatcacaaataacaaaaccattatgttccttttgatgttacattcaatcgggtaatgtatggtgcataaaaaaaaaagacagacttacagctagatggctactgaagtaaaagatttaagaatggtaagcaaaagtgaaatatgtaatatgcaatatgcaaaccttcttcttgtcctcatcaagtttttccctttcgcgttcagttagtgcttcacgtttgtttatctctttgctccaggagtcaagtttctttttcttcatctccaagtcataactcaatttttctttttcttctataatttttttgacattttcacgtgccctccgctgcatcttctttgtttctgatcaagaaccaaaagctcattatttctaactgaagctcaatgaaaccttcaattagaacaacaattaccacatattgcatatggtcatatagaatgacatgtcaatagctgctgaaaaaggatgctaatatagagcctatatggtgatttgtgaaatagctagatggtattatgcaaatatctcttaataggaatgatccaaccatgatgtataaaaaaatgcacatttttatctcttaatagaacttagatgattgtaataacattaataacaagatattgtcaatatcacatagtgatcaccattcaggtagacacatgcaagtatacaaaaggggaagaaataaaccttcaataaaagctacatgaagacggtctttctcttcaattatcctgcttaaagacatcgtttttttattgtacttatattgcaggtcatccaggtccttatttgtcatatcaattttactagccagggttgccacaacattgattctgttctgagctgcttcattgacaatatcagatacagttgtcagcttgccattctgacgaaggtactcccctattagtccatcggagttataatcaaatgcacgagcacaccagccatagatattcgagccacggcgcatttcaggtgcatttacccaatgctttctgctgaaaccatcgctttcaaacattttttcaaattcagaagcactcatgaaaccattccagttcccatcaaactctacaatggcttctgcagtcgggtcctttccattccaaaatgtttgaactttagaaggtttatatttggcaaactttgccagccaatgatcagaatctggaaaggttagttcacccttactttcgctgacaatgttaaccacaatacaagtccaaggccacacatacagttcaacttcttcattatattgtggaactggtcttgggataataagctgctgagtatgatctggctcctttgctagttcagtatgcaaatagtttgccaaggcaaggtggtttgccttttgttttgcacttctgttggcagaacctttggcaactcctgaagcatgctgcagaaggtctttaaacttgtagtcttgcttcttcttcccagcgcaaaagggacacctaagagcaccattcggacccttgattttatactttcctgccctcaattctgcatatggtttgtcagaataatcgttgatttcagagtcactaatatcagattcttcgtccgagctgtagtccatctgacttagatacaacagagtaaataatgcactcgtatttgtcaacgaacgaaatcaccaaacttctacacgaatacccaaagcaaaattaataacataatacagcaatttcacccaaaggaaatgaattaaaataccaagtagaaaattacataataatccacaatacattctaatcagtatacataattatcatctccaggaaatggcagcaaacagaaaatctcaaataaaggaatctctccactatggccacattgaattgttcaagtgtcataattcaaactaattcaaaatacatatcattcaaattgtaaaccccaaagttcaggaatcagttttatttttaaactctgcatttactttctgaatgtatatatatataatattggagatcaataaagaatacacacttttgcatgtatctattatggtatcagatattatacggtaaacaccagcaaacagcaacaacacctctcaccatcatcaacaccaatgaaccaaaccaaacactcattagcattaaagttgctgctcaaacccctctcaaactcacctctatgaactatctctcttggaaactacattttcagtcactcttcattggctgtgaccttcttggctacattgatggtaccaagccatgtccaccagccactggtactcaatcaaatactaccacacctaatcccaaatacactctctagattacacaggacccatatataactgtgtgtttttataaatataatctcctaataatcatcgcaggaaattcattgaatatcttggcatttcagagtataactatgatcgaatacctaaaccccaaaaatgtaacacaaattccagacccatttcactaaaccctatgaaattaaaatgagttttatccaagcatgaaattatcagttgatttagggctaaataaaagtctgaacacctaatctaagctatgatattctttaaaattccatcgtttaaatgatcacaactaaaaattcgccgaaaaagaaaatcaagctagcaatggaaatttatacacaaaatataagtacgcataagttcaaaaaactgaaaggatcacaaattacttccatgattaacgcagtatctcttaaattacagaaaaaataaaacttacagtgagtgagagagagagagagtgatgactatgggtgtctctttcagagttgaggaagaaagcggagacggacttttttcatctgtatagtggtttcataagtgggacacgtgtcaatattttattggcaataatttttacgtattttatttaatttcttcaaaagagattatatttttggacaatttctcataaagagaagagattaaacacactatttatgttttataaaccttttttttttttaaatatatataaattattataatcaagcatatacaaccatgatttactaaaaccaatttccatgaaacatgagcaacattggttgggtggaagaaaaaaaatctttgtgtttggttagaaagaaaagaggatggaagaaaaaaaaaagagaaatttacaaaagtcatgaaatttggattaactttaaaaatttt

SEQ ID NO: 14688 - DNA, 6908 bp, Cannabis sativa
tttatatagaatagatatatctgacgaataaaaaaaaagaaatttgtatgatttaatttgttttaatttattgtgataagattctaatcttttttctggtgaaataaataattctttctgaaaaattccaaatgagggagtgtaaattatgagatgttgttagcttttatatttacatttattttatgaattggatggttgtgtcttttgaattgttgtaatgtttgaaattattcatagtaatggagagatataacttttggcaatttattatatatttttaacttttggcaatttaaatttcacaaaaggaaaagagaaaagaaaagaaaattgcggctgtttgaaacaggctaccccttggcttgggccgcttagcaaccttaggttttaacttgaacaccgcttttaaaccctcacttccaactttgcttagggtttacttccatgaataatctcaagctttactccgaggtctcactgtgcctggagttgcactccaacgaaggagagatcataaccttctctgcattcgatgttgagcgcaatcgattgttcttcgcttcttctactaattccatttatgccactcatctttcttccttccaggttctacttttttcttaaatttgacactctatctatttctataaaaatattggtattaatcgctacttctgattagcataaacaatacttgtataatggttagtggaatttttgtgtgtgtagaatgagggagcatggaggaaaaccatgttgccggtggaagttgatcaaattgaattggaggatggtgactgcatcacttcctttgattatgttatggagaaagaggctttgctattgggaactcagagtgggctaatgctgttgcataatgtcgatggtaaattcacagaagttgttggtcaagttgagggtggtgtaaaatgcatttcacccagtccagatggagatttgctctgcatagttactgggtttgagcagatgctagtgatgactcatgactgggatttgttgtatgagacttcacttagagatcttccggatgctgttgacatccgtaaggacttatttcctttattcctcgtttttttttttgtttacacttacaattcacttttataatgattggttaggccaatgctctgatctgcatataaggaaaattaaacaccacttttgattttattacttaatttaagatacatgatacctgtacatgactggagtttgtgaacactgttagatttggatatgggcattcataggttatgcatcatttttttttcttcacaatatatcatatttagagaggcaaattaaattatacaaaagcctataataggttgtgtttttgtttcctttctatgtgctattctcattggacatacccaccatataataattggtggtgtcatttttttaatgccattacttctcaagaaatcaagagtgcttttattattattattgttgtgataacctttttttaccttttacagtatattactatataaccaatttatttgttgtgaaacttggattttgaagccactttaaagcatgttaaaagcatgttcgacttccaatatttggcttttgtaatttgacccctgttcccatttttcttcttttttttactaagaactttaacatgtattgaataaattctctgtaatttgctaattactgtggactactattgtctcagatgttgagccaaacgtttcttctagaaatgagtttagcagcctcatctcttggcggggtgatgggaagtactttggcacacttactaatgagtcggattcaacttctttgcttaagaggctgaaagtttgggagcgagattcaggggtagtgcatgctgcttcagaaccaaagctattcatgggacctgttttggattggatgcccagtggagcaaaaattgcatctgtctatgacagaaaagcagaaaatgaatgtccttcaattgtgttttatgagaagaatgggttagaaagaagcttgtttagcattaatgaggaagtaaattcaaaaatagaaatgcttaagtggaattgtaactcagatcttcttgctgctttagtcagatgtgaaaattatgactgtatcaaggtctggtttttcagtaacaatcattggtatttaaaacatgagattaggtactcaagggaggataaagtgtgcttcatgtgggatccagtgaagcaactacagttaatttgttggactcttggcggccaagtcacactgtataatttcaactggagtacagctgttatggaggactcaactgccctagttattgacggctccaaaatacttgtaaccccactttctttatctctcatgccgcctcctatgtatttattcagccttaagtttccctctgctgttcgagacatggctttttattccaggaattctaaaaattgcttggctgcttctctgtcaaatggttgcttgtgtgttgttgagtttccttcaaatggtacttgggaagagctagaaggcaaggaattcaacattgaatcttccatatctgatatgccacttgggtcatttatacacttaacatggttggattcgcatagagtccttgccgtttctcattatggatttagtcacagtaacgtttcccatagatcactgaatgaggaccggcttcttggccattgtttgctggaaattgagcttgtctgctctgaggataatgtaccaggttcagtgacgtgctcaggatggcatgcaaatgtgtccaatcaactatctctagaagaggtggttgttggtattgctcccaattattcaacaaagtcttcagcttttattcaattttacggtggaaagatatatgaacatgtaccaaagttgggtatcttgcctagggctatgaaatatgatgatcgaagtttctcatcatcttgtccttggatgagtgtggttccagttggaaacactggacctttgatatttggacttgatgaagttggtaggctgcatatcagtggaaagatattatgcaacaactgtagcagtttctcattttactcaaatttggctgaccaagtaatgacacatttgattctttcgaccaagcaggactttgtttttattgttgacttatatgacatcttgcatggagacctagaggagaagtacacgaattttatccatgtaaataaaaggagagaggaggataatgtaaactttataaatatatgggagagaggtgccaaaattgctggcgttctgcatggtgatgaagcagctgtcatattacaaacaactaggggaaacctggaatgtatttacccaagaaaattggtcctgttatcaatttgcaatgcattagtcaaccagcgctttaaagatgcactgctcatgctgaggcggcacagaattgattttaatgtcattgttgattattgtagttggcaattatttctgcaatcagcttcagagtttgtcaagcaggttaacaatttgagttacataactgagtttgtgtgtgccttaaaaaatgaaaatataatggaaacattatataaaaaatttaattgtcagcctttcttcaaagaagatagagatgtgcaagctagatatccaataggttctgattctacgagtaaggtttcctccatcttgagggccataagggtggctctggaggatagcttacctgagagtcctgctagagaactttgcattttaacaaccctagctcgtagtgatcctcctgcccttgaagaagctttggagagaataaaatttatccgtgaaatggaattattaggttctgaagacccacggagaacttcttatccctctgctgaagaggccttgaagcatctgttatggctgtctgattctgagcctgtttttgaagctgctttaggcctttatgatttgaatcttgctgctattgttgcattaaactcccagcgggaccctaaagaatttcttccttttcttcaagaactggagcgtttgccacttgacctaatgtgttataatattgaccttaagctgtgtaggtttgataaggctctcaagcacattatctctgcaggggatgcttattatgcagattgtatgaaccttatgaagctaaatcctcaactttttccattgggacttaagctgatatctgaccctgtcaagaagaaacagatccttgaggcttggggtgatcaccttagtgatgagaaacacaatgaggatgctgctgcaacgtatctatgttgttcaagtttggagaaggctttgaagtcctatcgtgcttgtggtaactggagtggggtgcttacaattgctggactccttaaacttggaagggaagagatacttcagttggctcacgagctttgtgaagaacttcaagctcttggtaaacctggggaagctgcccaaattgcacttgaatactgtggagatgttagcagtggaattaatttgttaattagtgctagagaatgggaagaggcattaagggttgctgtaatgcacaatagacaggaattgatctcagaagttaaaagtgcatcattggattgtgcaagtgtgcttattggtgaatatgaggaaggtctggagaaagtaggaaagtacttggctcgatatttagctgttcgacaaaggagattacttcttgctgcgaagatccagtcagaggaacaggcaatgactgatcttgatgacgatacagcttcagaagctagcagtaacttcagtggaatgagtgcttacactacagggtatgtctttagcattttgagtgacattacttccccatgatttttcgtttcattgcttttgttcagttttgttttctgattgttaagattgtttacccacccttcaagttcttgttaattcatcctacatttttgttagagtgtttttttcccctttccctttcaacatctttgaattgttggagatcatgccttatcaattccttctgtctatgctagatagatgtgatcaacgataatgattattcgtttgtgtgaattgaaaggagagttctctcacgaacttttttagttagggtgggttaaatttctatcaactcatgttttgccttacccatctgctgtgcaggtcaaggagtagccgtgtcacttctgtcagctcaagtgcaactagcaaggcaagagacaccaggcgtcagagaaagagaggaaaaattcgtcctggcaggtattttatttgtataattattatttgggtttttgtttttttgccttcatcatggttgtttgtgataatctgtttctactttgaaattgtagtgctggggaggagatggctttggtggagcatttgaagggcatgtgtccaacagttggtgcaaagcgtgagttgaaatcgttgttgctctgccttgcgatgcttggagaggtggaaatcgcaagaaagctgcaacgtgctggtgaaaactttcaactctctcaattggcagcagtgagtttagctgaagatactgtgacaaatgatatcatggacgagtatgcacatacattggagcattacacacaaaagatgagaggtgaagtgcaaagttctgaagctttcttttggcggtgtaaagtattcccttctccttaagaggtaaatataaataattaaatatagccgacgaatttcaacctgttcttccttgtattttttgtttcccaaaattcagcctaattcttctctttgcaactgcacaattactttgtcaattcattatagacatacataatcttaattgtttgaaatgttcttgtcattttatcaatttcttactgttgtgttattgtgtataggcaagacttcctatgatggattatgtttgtgctcctacagctgagtggaatatgatggatttcagtttagaaaaaggaggtttagtatttacagtagttgaaatttttgtctgttgtaataatattttggtaaaagataaaatgatgtagcctttttgttgtttttctccttttcgttataagaatttttgtctcatctttttgtcggcaattatttttggggacgagacttgagcagaagatttaaaataacaaataggaaaaggcaaatgttttacaacgatgaggataggcttaaatcatagtaggcaatcggaaaggtgatgagcattctatttcgtattttctttcagggaaggaaataattagtggggcaatctccataggtgtattattttggtgttttgctctaaaaaatggcgtggaatttttgctcttagagaacatcaatttaatgaagagctcgaaacttttattcttaaaaagaaaaagagataattgcggtaaaaatattcaaaaacttaaggttgatcagattagtctctaatttcgaaaattggggctaataatatttaaggttactattttcgttactcggttgatctctctttttgacttatccattaatttcattcctcaatttatttgttgaagggtctagtaactctttgtgggtagccatgctactttgaattagtttggtttcttcttcttttccttttgtcaagggatcttgctcaagatgatgtttacctcttagtcactatagactagaagtatgagagcagactattagtggatcgggctagccagagtaagaataggtgaccagccacattgaggcattgtctggccatttggaggaggctatagtcggccaatttgttgactctatggctagccaacttaccaattgtgatacaattgtgatatttcagttgacccctttaaacccctttgcatgtatgaactccgaggaaagtgcaacaatgatgaatgtccttggcagcatgtcagggacaagtgtagtgaaattatatctcatgatcagaataatgattctgatactgatggtatgca

SEQ ID NO: 14689 - DNA, 8179 bp, Cannabis sativa
gcaacgatggcgaaaaatgtagatataagtagaacaaacggcacaaattttagagtgaggaatcccaggtcttcgtctcccagtagcacctggtctatcttgatatgtagaagccatgctcacatcataatcacgagccatactactcatctccaccgcttgcctgaatcccgactcagcaataaacgacgagttttggccacgacgatgatcaccaccaccattattgtatccatgacgaccattcactacttctacatggccttgaccatgtttgttactagttttagtagcactgaaggggtgaataacgtcgttctcttttatctgaaggagagggtagtgatgacgatgattatctatggaggcttgaagggctttgctaaaatcaagacttgggatcttctttagatggggctgtttttgatcagaaactgatgatgagtttactttggaagtggttggttggagtagtttattagtagtagaagtggtggggtttttattttgtggtgagttattgaagctagctaggtcctcaaaagtgagatcaactgattcatctggtattcctgagtacaattcttcaagctccattctagcctttgttattcttgccttttcattgtcccccattcttattattttggcttcctaatactaattaataatctctaaatgttattaactttcgaaggagaggagtgtatagttgagtcaaatggatccttttataataagtaagaaaccaaaggttgaaagggaattatatatatttaatagttaaatttctttttgaaatgaagacgaacgtaaagccaaattaattatagctggaatatgccggtcacatacaatgttgtttttcccatctagtgtatgaaagaatttacaacaaagagattaaaatttatgctttgtccttgtgtacatacttgaaaaatatatttgaaaataactagagtcatttatctcatgccacgttaactttgagaagttagatgtttagtttgatggaatctaataataataataataataatgtaatagaataaaataggaatagaaattagttaagatgtttggtttattattagaatgaatattaaaataaatgataaattgacaaaattatcccatactttaatttttatatttatatatataaaaaaagtattacaatcattttagggtacgtaatcctcattatattacatagcttttctaattaacggaaattatcttttataatgtaatcataattaattacaatgcaaattacaatataatcccattacaccatttttaaaagcaaaactaacaatataataaataatttgattccattatgattcttattaaaacaaaccaaacatgaggttagacaagtctaaaactcacttattaatggaatatgcattatgatataataacgaccaggtcatgagtagtaaaacaaattagtaagattcagctggccggtcttattaacaattatttaattaattattattaacaacactttcttactagctgtagttgattcattacctttttaagtgttgttccttggtagaaccaaagctctcaactttcagattttaaattaatgacaacttaagatctgtcacgcgtaatgatctaagaaacagtgaaacaaacaccattgcagtttgttcttaccttaattttatggttttacagaagaaaaaaccaaacactaaacaatcttcttcactcctggtttgggaacattatatggttcaaaattggcataaataaaggttttctcatgagaagaagaaaaattagtgacttttctccataataagtactttctatgagctctctttttagcaagaaatttttccaagtaatcagtgctacaatacataatatggatttatacacaatgtggctcaataagcactcttttaaaatgccattttcgttctgctagcattgtttactgatatatagaaaaataaataaaaaaattaacacatgatcgaaaaagaaccaaagaacgattatatgtattctctctaaccactgacagattgtgtatacgcttcatgtttatagtagtataaaaataaataagaaaacaaacttactttcattttcggcgaagaacattactaactgtgtttcagtctaatttaggatcacggtaaattccatcgactctactctctcgctcccaagcagatgcacgacacccctcatcggacgggtctctaccaccttctccggtagctttactgagcaaagaagagccaagagtaggctgctgttcatacatcatactaggaatttgtttcatgtaattttctaactgacaactagctgcttggacaatacccatcatcatcagttctggaacctccggttgcatgtcttcacgactagggtgacagttcaagtcaatttggcctgcactgctctcggcaacatcagcttgaactcggcaatggataccctcgttctccatataatttgtaatcaacaatgcacctctatcttctttgcattggttatcatccttttgtgcagcctctgtatcacgttctgattggcgcttcttcttccgcaacatgagggttttgaatcgacgcttcacggtcatgcacacattgcatgtgcatgttggtttgtgtttaccctttccacttgggggttgaatacaaacaatacaagtgcagcctgggcggtgtcggggatgtctagtggtagctccaactgaaggttcaccagagtcaccaacattatctcctagcactgcagcacttgccagagcatctaagccagaaggctcgtgttcctgggccattttattgttttctgtggttcttcgctttttaaattctatattcagagaacgtttacgagagtcaaaagagaggaagagggacaaaaaaaaaaccattttcggtttcttttacacatacaagtacatatatatttcttcaaactgcatttcaattaacaaggggtataatgtaccagaccttaaagcataagcaataacattaattaaaaaaagacacagcaaaacccaatatggggaaggccactcaaaatattcatcacaaatctcaaaaaagtaagaggaatgagatggcaaccagggttctagacatcatagttttagttccaacattagaagaaaaaaaatgtagaaaaatcttaagaattacacaaatcatccatctaaacaacttattgtattcaagtaatactctagaactacaaaaagcctactggaaccagacaatttacatcacttcttagaagtatatataacatgagtttggtcttggttaattattagtattaattgtggtacaagtctaggttggttaactatttaatgaccaatatatttacacaacagactgtaaaactccataaacgaaaaatcaagtgaaggttgaagaggatatagatctacctttacttgatcttaagagattctccaattccttcaagcttatctcctcatgtgcagaacatgaagccctaggaagcacattggaaaaataagaagaccaaaaccaagcaacaagccctcatctcatggttataagatattaatattcacctgtttgaatcccaagcattgtctggacaagtccacttcgaagggaggagcacttccagaggcagcttccgccatttagagcaatcatcacactgtgcccattgttcttggtccctaaatcacaaatttcctatgttcagcactaagaatacccttagccatacatgcacaaattaaaatatagttagtatttgatgcactcaagctatgtatattgatcaaatggtgaataaccaagttggtggatacaagggtgtctaacactagatgaaaatttccaaaagagaacgtggaagaaggaaaaactgattgtgttaaaatggcataactggaaagccagtaaaacacaaatttgttgtagtttagaagtacaagaaaaaacgccatgtacactcccattgaaaagttacaaaagctttaaatttggattttccagaggtttaaaataaatgatgggaaaatatgtcgagatcttccaagaaacacttcaaacagttgaatctacctaattctgaagcttacagaagtttctatttactatttacgaggaacaaacagcggacagaaaacatgatcatcccaataaacatgtcatatttatacttacccagttggcctggaaacaaatatcgttctctttccaaaaactggtggctcctaaatgatataaacataattaatgagggaaggaaagaaaaagaagaaaataccagctttagtgcttatcataaaagcagtgtcatttctaattttgaatcaaaaaagacagtgacttatacgtacatcatattcttcaaagtcatggtcatcaatggtcacaatgcttggcttcacacttggtggtggacgaagcaagtcttgtgcttcttcccatgtcaatctcagctctagcgcgtcttcattatgcataagcaacctcttacttttagaccctatattgcgagtcttctttttctccaacttagttacttgctgctgtagtgaatcttcatttgtgttgcaaccattagtttcagtttttcgaagcccaagatcttcatcagtcaaatgcaactgttctggcatagcatttacacgagagtccttgcttcctttgttagtctggaggagaccagaacacccatttccggtcgacaaattctctgttccaccaccagaattggaagtctctccaagagtgccgttgggaagaataggtgtttgtgcttcctaattattcagtcatctcaaatttatactaaaaagataaaataatatattgcaatgcatgggaatgtagctaacctgcgcatcttctgtgttcaatgcctttcgatatcccataacaagcttgcctccaggatctatccgactaaatgttactgcatagaaagggaggagaataacaaatttaagtcctcagacttgttatcaaaattgaaggaataacacatttcatcttgaggaaagtgaaatttgcaaaataaccacattgaatttacatcacacagtgtaaatatggggtcacagaacgatctgaaggtcactgtgtaatttgtaagtttctaagatacatgtaaagaagtaaattatatagaaaatgacaatttatgtatgtttggtacttcatatattaagctctaagcaagaatattacaaagcagaaatataccagtatcaccagcctgaagttgcatagactgcatacaaggagtcactccttctaaaacatacattctgctgttgttattgggccaaaatctgaactgaaaagtccattcatttcccttcacatcttgaatttttaagggaaggccttctgattgagaaataggaggaaaatatgcctgcataaataccagttcaataaatgaatgtacgaaacacgtaataggcaaaacataaagtgaaaatctttcacccctccactgaaaattaataaacaagactaagaaatagttgtgagttcataaatatacctcggcacatgcttttggaagaaccaatcgaccaatacgaccagcatcacttgcacttagcaccttctcaaacagtggcacaatagtggagttcaaacttaaagataacatattaaggtaaactttataaacagaagcctactaatcccactgggaaagatactatctaaccaaataaatggaaaaaaggaaacaaaatacagcaagtaccaattaaggatactctccagatagttgctccagctcctgatcagtaatccttggccagtatcgtggaagtagctggtttttgccccgaccatcaccgggtggcctagctatgcgcatatgaggaacaacagttttatttgactctgaactcgcattgatgccagatttaaaaggtttaggcagtatcggacgacttctatgtggttcaaaagagggagagggagttttgctcagttctttcccatcaacagcgccaccagtataaggaagaacaaagcttgaggtccttgagggggttcctaaagttatattcaaagatggttgaagatgagactcgtgactatctttaacctctagcaatgttttattattgtttggtttggaaaatgttaatgatccaatggatgactgagtcaaactcgaaaattcccggccaacatctcccaattgatgcatcatgtcatctcgctttgtttgactaaaagcatttatctcagcctgctgaaatcgaggcaagatgttgggttcattagcttccattattttacacagttgcatcaatcttccctcatcaacagcatcgccgactatcctagtctgaactatagtcgattgtgactcaccggcatcatttgatccaccaaatcctttagctgcttcatcaatctgaatctgcatgacataaatggaatgcatttatgcatgcaaagcagaaaagtgtatgcatggcaatagaaaattctaaaaaatgtaccaatatagctaatcattgttatacttaagaataccaagaggcagtcagaagacataataatggaatcaactagtaaaaaataaaattttaaacacatagtttgttcaagttatgatgttttactaaacataggagagattttggctagataagaaatacgtgcacttatttgcttagattcacgaagtttgaacagatgtaattttataaattcaaacagagccatagataatacataatatgatctagtaaatcttactaggcggtgtctagaactagttgcacaattaatacatccaacgcccccaaagtcgaggcactcgaacaaggacttggaggctatgcatccacagtggatacgctgcaacagacaattgagttttcaaaaattaagatctaaagcaaaataagaggactaccgagatcaaatcaataaacaccaccaactcaccttgccacatgaactgcaatctctccaaccagtttcgtctaaatgatatctttcacaaaaaatagaattttcataggcagatctgagaagcatgcccgccacaccagcaccagccaaatagaagcaaaaaagatataaataccaaacaatttccaacaacattcaggcaattttgtgcattatacatacttcaacaccaccaagaggatatagatcaacacgggtaagtagacaagtgtctcttaccaaagtagcgttagcatattacaaatataacacaaattagtgtaacaattgaacatcataataatatcgatcagcaagaagttcagtgtaacaattgaaaccaaaaagttcaaatcaaagtgagaacaaatacatacaacaaacaaaagaagatgatccagataatcaaataagaaggaatgtaggttgttttgggttgtcccaagtttagaccggctacattatccgactcctgagaaattagctaattcatttgcataaatggagtcaatcagtagttaaagattataaattagaaaaaaaattgcttggagccaacaatttcacttgctcagaccgtacgtgaattggagttctactccaatcataaaaagttcacatttttagaatctcttttttaaacaaaaataaaacgtaaaatcctaatactaatactaatctgccccaaaaaaataaatggttacataatatttacaattatcaactaaaacgttgttaattccttgttgtaaaatcaaaataaagtttgtaacggttagacgcaaataggcaacgacccaacgacccaaattctcaacttgataaatatcagatgtcacaaaatcaatagtcaattataaacaaacccataatacgcatagaatctcggattcgagggaaaaaaaaaccataaacatgatgcacataaatccccgaaattatctgatatatcaaaatttgaaaatctaacaacttataatggaggataaaagtaaacatatttgtataaatacccgcaagaatggcagagatgagcatatccaccagatcgcagagtccaccccttcttccattccagcgtcctggtcgaaccgcacgaagcattcatgcaaatcctagtccccattaagccaaattggaatcttttccaataccctttgaaccaaacaaaacaaagaaatcaaaatcaaatccct

SEQ ID NO: 14690 - DNA, 6201 bp, Cannabis sativa
aaaaaaaaaaaaaagatttgtatagatcataaacataatctcttggctataaaaagtttcttaaattatatttgttgaatctgtttaaaattaattgtgttttttttctagtgtttgattaattgtatcgcttgatttaccacaatttttttttttttttgatattcttaattacatataatatatagggtactgttttaaatatatatatttttttcttcctcctaatttattaaaatccatttaaggatattttaagttttaactcttttgatatggtcccctgttcttttaactttttctacttttcctacatggactgccttatgcttatatgctatctgtaagatgcttcttcttcaaatttaatataactttatatttacagttgggaatgtaatgccataacttgagttttaaaatttcagataaataccttttatatactattatgttataatttttcttgttatattactttctatgtaagtaaaaagtgtttgcatgagtaaatggacaaattcagacaactaccattgtttgtttgttatgaaaaaaataattaagatggatatattaaagcacaaacaaaaacaaaaacatgatgatgaatgtctaacaagaattggtcattatatatttccataaaccggttcatcatgtgaaaagaatggtctttagaatatgttattctaaggcaaattgtaattttaagttaattcacatgaattaagttggtttgattctcagttctcacccaccaatgtttttctttttaggaagtgttattggtattcatttttaaaatatatgtacatgaatttcaacttttaagggcttgacaattttattttctttgaatgatcaagggcttgacaatatttcatcattcaataaaaatgaaattatttatgggagttgtggatttgaaagtatatccaattatttgcccaaaacacacaatattataaacattttctatttttttttaataagttttcatcttttagattggttcaatttttttattggtaaataataaaaatgattagaaaatttcccccctaaaattattttactattaagttgtacccctaaaatataatggacgttaaaaaatcttcccaacatataattaatatagtaatgtccccttttattaggtttttaaatatttaatcgtttattaattgatgtagcataagagtgaaggttaaaaatgtaattgacaatagtttcgaaaattaaatagagggttctctttctttgtaattttttatttatttatttaaaaagaaattacaaaatatataaaaaaaaataataaaatataatgaaatgcatttcctttcactttattgaataaaaactaaaaagaaaaaagatgtaaaaggttttaccgtctgtaagaacaaatagaccaagatttagggtaagccaaaaaattgagaaacttttggtgcaagaactagggcattttgagaagaaagaattagaatctgtaaatggagaagaaagggatttgttcatcgaggaagaagaaagggtacccgaaggagaatcgtctaggggtcgacgtcccattttatggtatgtttcttttttcatcttttttcttcttttcgaaatagggtttgtagtgtgcattctaagggattagggttatcacgatgttaaaaatgcaaagaaaaatagttgttgcaattgcatcctgttggtacttgtttttatacatataacatattgagtttttagtcattttcttgtgtttgtttggttgtgtttagagagcacatgggaggtatattttgttaaagttttttgtaggggtgagtaacggtcggtttggtcgttttttacacacaaaaaatcgaaatttggttttcggttttcatggttaaaatccaaaaaccgatcaaccattatataaatgtaaaaaaaccaaccgttttaatccacggtttggtcggtttaaactgaccaaaccgaacttcttttttcttaaaaaaataagtttttaaatttgctataattatttggaaactaaaaaaattaaagtattgcaccctgatggagtgattataagtaacatattgacatgagcttatctggtgaagcttggcccaaggggtgcacaatgtatgttgatgtggatgccacctcacattgacagtttccaaaactcgtgtcctatcttcgtggagaataaagacacattaaatgcttgatttctcattactatctttccatatttaggaagatatgatcttcgaacgagatcctcgagagttaattcctgatattgtgggatttggtaattaataaatgggaatagtactggacgtctgaatgcttgttgattacttctcttggacgctccatctaatgtcttctggacgcataccatgctggatggatatttcgcctagaagagtcttctactcatcatccgaaaggactaactttgcttctagacctggtttaatatcttatttgggcatgtatttgctgttggaataccacatgtccccaatctagaaacacagataacatttacccctaagcttttggaactctaggagttgcgaaagcttgcactcttcctcacagatggacatgcagaggctaaaggtggaaccttctatactgatcatgtttgtggttgacaactctccattttttgaaatagagcagcatatggcagtgtatcgtcggttcatggtggtaactttcaccaatgaggtgcgtttggcgaagcttggtgaaatagaagttgataaaaatatcatcattcgaattttctcaattcaaaacattgcattaaatgtctgactgttttcctaaaccattggatatttcttgctttttcttgagcataatcctggtcgttgatctgggaatacatagatcgccatttatgtgtataaatatggtgtaaacatgttcgttcaccacttttaccccaatttcaaactgagttcaaacttgcagagagaagacaacgacagacgagagaaccttagagtactacattaatcattgtattcatcttctccttcaaatttgttggtgagaaaatccaggagcaccaaccccaactctaattatcgattcttcaccaccatagagaacactagatattcaagtggaggttgaaaacctccctagtaagatttgtctaattcagtctaggattctacgtcttgaccaaattccttcgatgaaagtttccttgtgactatcacatcacgctagaattttttccctaaattctcggccttcctcaagttctttgtctttttctaattcttcttcaagtatgtttcttttacctttctagaattttgattattgttagggtttggcattcactttcaatccttacatgtttaccttgaattgttgatgaataggatttcaggccttggagtgattctgaatgttttgtagaaataagacatttaacacatgtcgcttgtagtcttgactaggttctacgaaatttcaccctttttgtttgaacatttgattgaaatagggatgactgaaatcgcttcctttatccaggacccttatagttttaggtaatacgtcgtttgtactttcaattggccttctatgttcccgatatgatcgttcaaaattgatactctttgagagttttatttttggatataaggtctagtggggacctctctaagtagttatagtggaggactctctcgtgtccctactatcttctttagtatgagtatctaactgcttcttggttattttctttcttattcttttccagcttctaccatgacaaaaattgaccagcgcgaggaagttgaagttttagaagaagaagttgcagctcccaaagtggtatacaattcttctccttgggagatggatcagtacaccaataagttccaaaattatggcaatctttggaagtatgagacaaaatgtggcctccagagtgttctaggtttattctggatcagactctccgtccttggggagtcaccatgtaaatgtatagacgacttcaacgtctggagctgggcccatattaatatgggagcacatcttccacttaggagatactttgccaacttttgtgcgatagtaggcatcgccccttacgggttggttcgttttgtgcaaagacaagaagatggaggtccctaattcggaagagattttctattttttatcaagtaaagcctcaatttatgtggaagaataagagaaaaataggcttccaccagcttgagaagcacttcaagtccttaatctgtcaaactagtgccgtgaagtatatgaacgacttcaagagctattggtttttcaccacgggtttccggttgaagagggttccgtccctttttttagatttctatattgaaagtaattggattactctttcttatttgatttctttgcccatctttccctttagtctctaattaggatccttttgcctctttatttctagataaaattacacgtgcggtagccacccctttcttggaggctagacaagctttataccagggctttcctcctaaagacttgcaggtggaaaagcttgttactacagccaacctcttagacaagttggtttgcttgctcctcatcagagcatatatgtctttcacgtcaaagactttattcatggagactctctggattttaaagaggttattccggagatagttgttgatgtagtgtgaaaagccatcaagaaagaccagagatggttggaagactgcgcccacttcattcggagcccatgagcgaaaaagcagagcttgaggtccattttatggggttatttcggatgaaggcaccctgggagcgagtacatctggaagaggtagttctcctttttgtttaatctatgctccaagtctggaagacttgaatcaggttgatcagggggctttgacccatacttcttagagttagttcgtcatagatatttcgtgatttgatagctcgataggatatatgagatagctaggatcccaagatcatggagatcgaaagaatggaaaagctctccaaaaaaaaaactgcatagtctggatctaaaacaattctttcagctacaaaaccaccattggaactttctcttccaacttctaatgtagatctggctactgatgcctccacacttcaagatacatccatctagtctgatttatccgctcatctagacatatctgcctaatcctaactttatatttatttttaactttgcttttgggggataagggttcctctttttatatacatggagataattttctggtgcccttaccacggggtccttttgacatgtaaatattcagccttcaaccttctagaagtgtaaactgcttttatttatcatatctattttaaattcattaagtatgttataacttgaatgaatttttgcttggtaagttagtctacttctgggatccttgaggttctggctccaacggcctgaaccttaggattttgacttttgtgcttaaaatttgaattttttgtaaattgtttacttctaggttccttgaaatcgtggttccaatggcctggaccttgaaatttcaacaagttatttttcaaaaaacttaacgaacattacttacttccagatctctgaggttccggttctaaaagcttggaccttaggatttcagttttgtttttccttttaaagcctaaacttctttgtaagaacagagcaaacacagcaaattgcgggaagaaaggacggagaagaagaagtgaagagaaataggattttttttaatttctatttgattacctttttattagggtacatagttaatgtaggccaaaatattcaattttacgattaatttttaagtaccaacaaattataatggcacatcaaattctcttatgctacgttagctaataaacgactaaatattaaagtacgtaacaaaaggaggaatattgctgtattggttatatattgaggaaatttattaataatctctatattttagaggcacaaattagtaatgacataagttcgaagataaatttaataattattcaaataataatgaaatgggaaggatgcaaaaatttgaaggaaaaaacataaatgacaaaagttgatggagatcaaaataattcaagtgaaaattcaaataattggccatttgaaaatttaaataaaaattt

SEQ ID NO: 14691 - DNA, 9569 bp, Cannabis sativa
  modified_base (5349)..(5351): a, c, t, g, unknown or other
  modified_base (5845)..(5845): a, c, t, g, unknown or other
ctgctatagcaggtcactaaattgtcatctcattaatttttttattacccatgaatgggtattacccattaagaaatcatccaaatattcaaacagtaaataaatataattttatgagctcttcaagctagttgtggttttgagacagacaagagtaaatgccacttcctttgtgtcaaaatttgtaactactgcatggagcttattgtcattttttatgtgtggtgaaaaatgtatatgcattaattacctttgttcccccaagtacttaattgcttgtactccatgccatgatgacttaattacttttgaacaaggtaaatgtgttatgcgtatacttgtgtggacaatttatgatagtaaataacataaatgaacaaacaacaaacgccttaaatttataatgaaatcgaaaattagtaggttttacctcaaaaaaaaaatgaagcgttaaatgtttcaaaatataaaaaatggaagattttgtcgctaattactcatattataagcaaaaccatgtaaaaacacattgcgctccctaatattatgaaagtcgtcctctcatatcgaagctaagttaggcgtctttttttctctagatttaaagttgagtgaggatgataatgattgttataaaacacatcaaataattcttttccaaacaatcagatatcaaagtatcaataaactgaaatcataactttcgcgtcaatactaattacactaacacgaaaggatctattatgtttttttttttttttttgaaaataaaggatctattatgttagttgtgtagtaacataaaatccaatagttatcgcgtcattagattctacgtcaacgttgttattaacgcaaaatatttttgcaatttcaaaaaccgacgcaaaatgatattttgtagttgtgtaatccagcagctattttgctttctattgttgaaaaaacataggctagtgttatagtgcaggtacttcatctttttcctcagatgcacaataaccaaccattgcctaaacaaggagaagggctaacaacagacgacaaataactgaattaaaacaagctacaagaaccagaaaaagatcaaaactaataaaacagtaaattactctgcaagagagagctacaacagaatgaagttgaaattactaggaactttgagactcaattcattctcacctccagccaataaccactttgtcacagaatagatgctaagctagagtccccatagtcccagattcccctttatcttttctggtttggtgagatgtagacataagagataagacagaaactagtgatgagatcaatcttctagtagtcccacaattgatttacgggaatccaaattatcgtcatagactgccaccgaccccttttggggaataaatcttttcccccacagaatactttgcaaaaattccctcaaaaaggaaaaaagaatacttggaaagatcttgaccacaaagccgtataaatagaactcagataattgaaacactaaataataataatcaaaagaactaaaacattgtcaaacatttagatgttcgataggagaatgaaagaggtaagataaacgagtatataatagaaataatttggattggaacaattaaaatttcaacgagtataaaatagcaattaaaccaacttagttttatccattgcagtgcttgtaatgagcgaattgttttttagttcaaaacaatcctcctccaaatcttacattattctttcaaaccatcatttcttcagtttaacttttctaatctcgattagaaaacctataaaacccaccttatgaaaacaaaccgaactaatgacaaattcaattcaagacccaaagttgaaacaagcaagatcattggaaacacatatacacatagctaagtgaatattgaaagataaaaaacacagcatatagtaagtataatgcttcaacgaaacgtctggaataacagagtatgagagctcatgtccctgagtttcaattttcaacaatacaactcacgacactaataatagttcacttaagaaggtctttgggaacactgattaaatttcacttaagaaggtcttaggaaacactaatcaaagtacacttaagaaggtctaggaggtaatactacgtttaacaggcaacaatgaacggaggatctgatgaaacatgagattttgggtcatcaatgactccttccttccttaagattttgggccaatatccttcagagcattaatctgctcctctcccatagctgacataacagacacaacaaggtcttttccttcctcgaacccttccttaatctggatacacagaagcacagttacaatttttacaaagttgaatatcagcagcaaacataagagtctcactacagatcagaaaaatgtgtaatcatcttgaaaccattagtctcacctgtttcagcagggagtcatcagtagggagcttcaaatcatccttggtgttaccattttcagtcaaaagactcacctgcatagtcatagtagcaagacctaattattcaaaagaaataagaatgaccgaactagttacccctcttgacacaacagaaggtaatacacaagttcaactctataaccataaactagctcaagtactacactggaatgaaagatagggcagaataaattagtacatatttataaacacttggtaaatctggtcaaataaaagagtgctagagagaaaaatgctaggaagtaaatttttcaagttctctaacgacttgcttgaaataagatttaggaggtttagcaccatattcagttttgaaaacgaaacagaaacagaaaaggctaatcacagataatgttttgaatgaaaagaaattactcacaaatccatcttcagaaatgtcaatcagctgataatcagtacggttaacatgaggaacctacagaaatcaaacaaaaacaaacagagaacagaacgatcatcaatacttctgatgtatgtagagactgtgtataaagatagatcagatgatactcacatcacagttgtgggaagatggaacaatatcttcgagtttcttgccgttgaaaatatcgatccccacaaagtgacacttcgcatgtccatgcttgccagttttggaggttgaaacctcaacaacctgttcgaaagaaaagaaaacaacaaatattagttaaatttaaagaaacgagaatagagccctaatatttcggttcagctacaattatgcaagcgttcgatcgagctaaactatctttctcccctcaattaaatcaagcaaccgatcacaaaaaccctagatcttaactaaagaatcatcaaaaagaaaatcaaattatagtttcaaactaacaattcaagatcaaatacagcatgatcgagtactaaaaccctaactaaaatcacaaacggaagcagatactacacaagatctgaatcgaaagaaaacgaagaaaaagaaagaagaccttgcagggacggttcttgatgacgatgtagccattcttgcgaatggtaccagcttgctgtggataggtcttggaagctccggcgtcggccttggattcgaagtggtgctcttcgtcggacattttctttcgctttctctctctttctctctatatatgctactgtggttttggacagagatgaaagagatcaggtgaatgaaatgtgggctaatattatattatatatatacatggtgagctcatacacactgccacactcctttccgtttggttggaaccaatcacaatataaaagctaaatttgaatttatatgcttcatgtcacactatagttaaaattaactcgcgtttggttcggagaaataaaaatataaagaataaaaatgaaagtaagaatatgaataaaataaaatttaaaatacatataaaaaattgaaagaaaattattaaatttttttctatattccaatactttaatgatacatttattaaataatattcaaaatcagaataaattaatagagaaatataacaaatcagaatcaatatttataatatgttgtttattaaaattgtataaaaattaaataataataatttatcttgtttattttattagaaaatgtaatcgtaatgcttaaattaattaaattgctcttttaaattaagctatagtgtatatggtagttatttgtaaatacatatcttaaatggaaaaaattatcattatatatttaatattaaaaaatacataaaggtcattatctttaatgacatttttttaaaaaaattataggggaagtattctatttctttcatctcttttttaatcaaattcttcttttttttaattataataaaataggtaaacaaatgtaagagaatgactatcttaccattaattctcattatttattagtaaacatgctataaaatgcaaccaaacaaataaacagaataaaaattatttcttttccattccatttccatttcattacatccaaccaaatgtcacttaaggttacgtttggttggaattaatgaaaacataggtataggaatgtaatttttcgaaagtttctaaatcttttaattttgttgctcgcaatttggtaagtgggtttttaatcaaaatgtaactggtagaattgagactttctcaataccaaataacattatttgtaatggccataagccctaatttatttacatctctataattactttgctttttttttttttaaaaaaaaaagagtcattttgtatttgataaatttattataatttaatgcactgaaaataagattcaaataatatgttgtatgcatgtcttttttattttgtaagtgtgtgaaataaatagtttaaactctattttatatcttaattaactataatatacactatcatataaaaaattaaaattataactattcatatatcaaaaatacaaagtggtgcattagagcatctgcaaggtaacaccaaatatgcagatacagtccaacctctcctccaatgtaacactatctttacactaaatttcatgtatatattgcagtatatgatatatatgtcgtgtactgtagagaatgacaaaaaaaccttttattttatatcattatattatattacatagtattaatttggtagattttgattaatttgataattttttaataaaagttttattttggttttttgctattttttcaggtgtatttcaatgagttaggagagttgtttgaagatgttgtagttttattgtttaaattttcgggagaagttttgtcccatgtggctcgctctgagaatttagcgacctatgatttggcaaagcatgctctgcggttagacgatgagctnnnctggttcgaggaggttccagcgccagtggtggacgtatgtgtcgtaaattcatgagtgattttaatcactttgtcaaaaaaaatatatatatactttttgtatgcatatattatttatatttattaaaaaaaattaatataataataatgaatatttttttagtgttgtggttaaagtgaaaagagtttttaatattaaatttaatgttagtgtaatactaaatttagcgtataaattagaaatgctcttagtaaattcaattttgacgctacacaccatatctctaataatgttaacattacaaaatagaaaataatattttattttagtttccatagttaccctgacatttctcatttcatctgaatattttcaaatcttacaaaaaaaaaaaaaaaatactaaatcatgatgagagaactcattccatactactgtcttctaccagcaagaaatatttaaaagaccacttctattattattattattattnttattattattattattatcttgatcaatatgttcaaagttcaaactcatacaaaaatcattcaaaggaaaaagagatggaagcctcaattcatggttaatggctcggtaagtctcataagcccaaaatggtaatttgccaaattgtagagtccaaaatagtatactctatgaaactataatgattataatatttcaattttattaacttgggtggtcgtacgacatattgtttatagaaaatgatatgtcctttggccgaacaaaaactatactttggccaaaacaacgtcgtattcctcaagtgacatcccttgtttatgcatattgcataaatgacacgtcatttttacttaaataccgtaagtcatgtcattttttaagaatggtgcaattcatgactaccaacttgttgatttttgcctgatagaggcaaaaattaacccatcatttgtatcgtccttgacctccagaatgagtcgtgcaacctgttcccaacttggatttacaactcgttcaggttgactgcaaaacgtggctccgtaggccattttcgacattgtttaagggtttttctacaatttttcatgctctatcatatctcatacatattttgactaaaaatactgtaaacttgaaaacttgtatactcattttaggctatgaacaatcttataaaagcttcaaaaatctcagcaaagtgatatttgttgtcccaaaccaaatataaaactcattaacaattgtaaaacaaaaaaaaaaaatcgattttatacacaaccttaatattattcgaatattatttctgcgacaactagattaagaaaatggatttatatcaaaatttaaaccttaaaatcaaataatatgtgctctgataccaattgtaagttttaatacatatgagcatgctattattaacaataatcaacataaaattatgcttataaattttcaatatcacgttctatttaaggcgttaaattagacaatgaacatacttcaatattgaatattaatttttcatgagccaccttgaatcaccattaattcttccaagtatcaaaatcaagtgtatttttttaaaatgaaaacccaagtgtttatagacaagagagattataaagagcaactttctcatacaaaatcttagcatctcataaccttatatatcaacatatcaggaatctcacatgtgcctaagtaccttaagaggtaaaatgagtatattttggactcataatactagtgatggactatgatttaataagccattccataatcattagggtgttaccatatagctcaaatatcgttaattaaattgaccatcccattatagtcatgctctaccatataaacatacaattatcttcatatgctaataatgatattgcatggatgatatttaattgtgtcagtctatataaaatattcaaacatcattaactattacaatatttcacatttttatatatcatattaaaataatttttataataaaaaaataaaaaaaatatattttatatattcatgtaaaacattaaattatctatcaataataatattttttttacttgatacatatcttatgcattgactcttaattgtaaataatatgcaaaatataacacaatttttttgctccattgctatctacaatctaacaacactaaattcgttgtaaaaaaaaaaaattacaaaacttaattcaagttcattattaaataaatatggtaaaaaagttatatttacggtaataaaaaggcttagatatttgtttaagtatttcactgtaaatcccttctaaaaatataatagtttagataaagctttagtagtttagtagttaataccaaatatatagctaccatacatttgagttttattgtagaaaataaacttgaaagtcttaattattccgaaagctaagtaattgattttaagtatgaatcttgacgaattacagctaaaaagataaaccacaacacacaaaatttacaagctttctctgtaattgaaacacattctaactgaatagtgcttgggtcccaaaaactgaataaagtaactttcactataaaatcattaagaatatatttaccagttttaatttacaaatcaactatataaattaaaaatgattttacacaagagtttcgatacacttgaacacaatcaagtaccaagatctaaggagaagacaagatctacttgcttccatcaagctgaactcccttcagacattgcaaatcaatcttccttcaacccttgaagatctaacgaattacaacctgcaattacaacaaagaaaagatacaaaaatgtactttgccctagcagagcaagaatcactagaagatccatcaaagatagagagttagtttaaaaaaagctggatcagcttaatataattaacacttcgataaaactgacttaactaccaaagcaactattcaaaccaactggcaaagagcttaaacaattaatcaaacaaactaaaagttgacctgacaaaagataaaatgaaaccaaactaaataaatgcaactaagaccaacttagatgaacaactcaaaaagctaggaaagaaaccataacagaatacaactaaaccaatattaggcaatataagttgctatacaaaatcatggcacttacaaaactgaagcataacataaatgttttatctttcccacgagaaaacaggcaaatctaaagaaagaatctcaattcttctccaaatcagaattcattgtttaatatcagttcaattcaattcaagtaatataaaaggaaaaaacccctcacctactatatatatatataatatgtcttatatttcacactgataaaaagaaccactctaattacacatcatcacacacactctaattacagatacaataataaaaccactctctctacaaagataataatcctttaacgttgtggaatatgctgcgatatgagatgggcagtgtctttccaccaagaaacctctaattccttctctttaagtttgtgattagcacattctaaagcttcttcaagttcctttatcctttcttcttgtctcaattccagaagttgatataacttcctctctaattcaataggacgtaccccattttctagttcttcagtacatagctcttgaggatcatcaattacctccacataactcaggctctggttttcagaataagcagtgttcataacaacctgccacacagatattctctcttatatatgcacaaaaattaatgcaacacagatcacaagtaactaacaatgaaaatgcatatgtatcaacaaatcacaacatcattaacaacagagtagatagtcattttccagcatacaaatcagcagccaagtctcattaaacctgtaatattcaaacatcagcattgaggaagaagcgcaggcctctcttatacgaatcactttgggtatgtttggtaaactatatataaatatgatgttaaattttgattggtataaaagttaatactaaacatagtaatatataaaaatataacatagaatacaattcaatacaatacagtataatacaatgacaaggaaggtttaatattcatatgacaacacttcactactcttagactaatttattttcttcattgcaaaaagcatactatttagagatggaaatttataccgcggggacccgcccctaatggggtggggattccccttct

SEQ ID NO: 14692 - DNA, 6025 bp, Cannabis sativa
  modified_base (4127)..(4138): a, c, t, g, unknown or other
ttagaagattggaggaaatttcatctcaatcattttcttttaggtggatcgcggctaagtctgtgctttttaagcaatttgatgtaattcctcatgaggttaaacttgttggttcccaaatgatgaaagtaatcccatgaataaattccagttttatgcaagtcatcaaagattatcctgaaatagtgtcaacaaccctttaaaactatcagtactatatattcactattttagtgacacaaacaaatttcataagcttactatactagttgtaccttaccccatagtttcccacaggttctgcagacatgattcccacttgacttcgacccgaaatcacctgattaagggttcatggtgtaagcttctcacatttttttactaaaaacagttataaagttttgctgcaatatcatattaatgatcccaactcccaccaactatgttgctataaagtcaaaaatcctatgatgaaattagcaaactttgaaagtattaacaaaaaaagatcattaagatttggtgcaagatatgagttacagggatcacaccattgactctgatttcccccactgatcaaattattataaaaacaaagaaaaattatccaagcaaaatcattgaattgaccaattaagcttttatggtattagctagagaaactttcatgagcttcaaggggactaaacattatcaatgttttatgatctcaaactatcccactaatcaaaatgtttcaaaatcaaaggaattatctctaataacaaaaattaggtaagagtaaagaaaattcagcaattaccttctcacccccaattgacctaacccttccatcagcagctggactatatattcttaaaaactcagctgacaagttaaatgcactgccattggaaaattccacttctacctgaaacaaaaatcacatacattgtaataataaattctccaaaacaaaattgggtttttgaatttttcacttgagaccccaaagaaggggacaaaaatcaattttcaaacaaagcttgaatttttcatctgataaactgaaacccatatagcatactcatctacttatctaaaaagtatcatgaaaagaaaacctaaattctatgtcaaggcattgaactgagattggaatcacatgctaatttattaaaattaagtagattaagaacagacaagaagtgaaatttaacagaactagaacaaaaaaattacacattttggagcgtgaagatagaatttggtcaggcgaggagcatcgacggtggtgtaaagcctccgaaacattttttcttctggttttttcagcctcttcttcgttttgagttttttttttttttttttgaaagtgtacaatgagatatttttgggccgacattccctgtcaatagttagtgggctttggcccataaagtttcatgtctgtcaggcctgactgagcaagtggcccaagtcggcccaatactagttgaaaaacaatgattcacgattaccactacttaattttctccaattctcttaacaaagttaaatttattcattatctcaaataaaatattaaaattatctcatatataatattttaatttttttttttaaatttactgtttgagctactccaacaatttttatgtaaattactatataaattttgatcgcgatttaaattgttccgttaattattatgtgagttgctatttaaatttttgtaaatatatatataaaaatatttttaagtataaaaataaaaaaaaaaaaccgcgtaattaattccaacatggcaacatgcatgtggtttcttctattttgaaatccattttttttttttttgaaattgaaaatactccaactttaaaattgcaattcttacaaaaaaaaaaaaattaataataatggtacgaataaaataagaaatatatatgtaaaaccagaaaacacgaaatacacaaaacatatcaaagcatatttcattttataattatgggcatatccgattttatatttagtatatccaaattgttttattataaattttgaaaaatagtgcatgtactaaaaaaatatatcatattttctttgaaataggcataccaaaaaaagtcatagtcctattcatatatatatatatatatattaataattatatacgtagttccttcaaaattacgtatattatagagaaagtatcatggattttattgataattattgaataatttagttcatttctttcaaactcttttttctccttatgaaaagaaatcagtactgataattacaatattaattaaacaaagaaattaaagaagcaaacttataatccacaaactgataatgacccttatcccaattttttcttaattattaattatatatacattttttttttctaccttagttcaaaacaaacaaaaatggttttcgcttattaattgtttacgtcagataaaagtaaaccattctgaatgaaatttaatttataataataatatatatataattactcatcataactatttatatatttatattgtatgtattgttattttaaaccactttacatttttaaagttattaaaaaagttagcaaagactgccaagtaattataaacaataatatcattaagctccataataaaaatcaatacacgcttgcaatattttaattaagaaaactttttcaaaatgacaaaaaaaaaaaaaattaataagtatatattttatttttatcaattaaagttgaaagaagaaagctactcaagaactagcaaactttatcttttctttttctaattttcatatatctattaaaaaaaaagcttatggataattcataatttgtttatgcattaaaaacataatctctttaggttttttttttcattattattgatataatatatatatatatatatatatatatataattgagtatagtcattttatacatagacccatcaaactaacttcataggcaaaacaattaaccaattattatatgtagctgttgtttgccacacttttcagcttgctggcttctcattaattgattttaatagttatattaaataataataataataataataacatgactttggttgattatttttattaagaaaatagttcaagtttatgttaaataaataatattgaacaaattttgtatattaacaaatacaaatctcttttatgtgtatgaacaagatcgatcttcgaatagagagtatttacctttcaccatatgaatttgagattattattgatatataattctcttaataataaatactttttaatgaaattataaagtactcaactatttaagtatatattatttggaattaatatataaattaatgatataatttaaggtatactaatcgtgttaaatttattattttgctgtatctatatacccaactatattatatctaaaatataattatttgatacccaactcaaccaatgagactgttttagatttttctcatattgaaaatgacttcaaatcaagttaaccaaaatatctattgatgtcttttttttttcttaatatattttttatttttgtttttatgtttttaacctttttttgatatcaaaacagtgatgaatgcatatgatgatataagccagacaagaatgatgacaaagattgcatacttgcaccctttgttaaataaatcaactttattattccttaattaattattttcctaatttatatataaataataagttgaatatatttatttataacaagttgatgtatattttagtaagtgacattgtcaatgtcaatccctgatcactatatataatgtgaccaagtataacctagttagaaggcctataataacaaattcatgtcataatatgattataattaatgagatttttagttacaaatcacttttgcttttatattgaattttttttttatccattttgagaaagtataatttatatattttgtatgatgttatataatatagacacatattctacaatacttttagaaaaataattttgaaaaatttataatactaaaataaaaggataaatattattttggactttgtgttttgcaaatcaattagactatttgttttgttaannnnnnnnnnnnaccatgtattttctaaaattgtacaaataagatcctgatttttcattaaaataaaacttaataattatctgatctagagatgttatgacaaaactttattacattttctgtatctgttcgtattaaaaatgtcttaaagtatttagttatattaaaaaaataaaatggttgaaaattgagctgagggtgttatttttttactattttggaaaatataaaatctatttttttatttaacaaaatagatggtacaattaataatttttacaaaacataaggtttaaaataatatttacccaatataaaattcatacacacaattatttttccttatatagtattgaatatatttattactttactgttggcatagcaaattatttgattttttttaaaagtggtgtttgtaactacaatatatacaccaccaatatatatataatttctcttacaataaaaacaaaaatgatgctcctaaccaaaaattttctatatagaaaattagattattacaatttttttgttttgccactcaaataattaaagtaaaaaaaatcttatttgttattgataattagtaatagtacagtgacatggtaacaacttaatcattgaatatatatatatgaaaaaaaatgttaatcatatgaccattgaaaggttaattacatgtgatctacagatctagaactaaaaatataatattgtaactaataattaagtttacgtaaattagtcaaatattttatattatattatatattaatttactcctaaaaaaagatatgtgtgttacgtacattgaatataaaaagaattaaccaaaaagaattaggttaattatctctgacaatatatatagtattaatttagttaattaatagttatataacctcttctgatcatgaggctgctaactatagctggcaatttgaaaaaaaaaataaaaaaaaaatgctttaatgggtttcaaaatatataatcatagataccaaatttaaaataaaataattaaaaaaattaaattttgaattaattataaaattaagccaccggtggctgataatatataatctttctttttcttaatcaattaataattacgtacctgatcactaattactttatagtatggttattattaattttatcttatttgaacctaattgtatgtaccatatattcatattatttattttaggttaattaaaatttttgttcctaaaattttaacatgtattaaaatcatgtccttaaacttttaaattcgctaaaaaatttctctgagctattgagattgttgaatttaaagactttcgtacaatttcaattaattttactaaatcggtgattgtccatatactcaatcatgctccccaaactttaaaatttactaaatcattaaagttagtcattataaaacagtcagcaatatattaaagttatggaatctttattcaacggttgatattactgttcactgatgcccgttattcggtgcaagtaatctcaatttaaattgttgatgtaatgctatatataatagagtttacatatgacatggaccgattgtaattaaattgtctttatcaaacatgtcgcttaccataaagaccttgttcatatcataacgatgattaattaatagtagatcggcttgaatcctgagtaatcatgaacttctattcatgttattagtttttttgattcagttgtaaaaatgtcttaaagaagattcttcttacaaattttgttttggaaagttaataatgggaatgattggaaacttgatttacaattatggaatattaactttcctaacggatattgattcattttaagtgttaattttagaattgaaaaattgtccataaatttagactggac

SEQ ID NO: 14693 - DNA, 6394 bp, Cannabis sativa
aattttctataagtataattattgttttaaaaataaatttaattaaaatatatataattagaattaaattttaaatagacataaaataaaatgtaaaaaaaaataaattaggttttgagtttgttagttgaacctataattgataatattcaagattaattataaataaaaaaaatatattaattatagtgtagttttgaaaatttaatttgatctattaaattaaatcaaagactataaattactgtttctattaataagtaaaatacttaattcctattataatagttcccattaaaaatattggtttgtcattgttacagtagcactacatatatgcaatacattgtagcatatatatttactaataagtaatggaaatcaatggtaagataattattttcttacatttgtttacttacattattaaatttaagaaatggagaacttgattaaataaaggagaaaagaaaaggagaattttccccaccaattttgtaaggaatgccattaagggtaatggatttcaattatttttattttatttttcaatattaaatatataatgacaattttgtcctttaaattatatcttacaaaataactaccatataatatagtttaactcaaaaggggaatttagtcaatttaagcattccgattacgtttcctaataaagtaaacaagataaatcacaactattccattttcaaaaaaatttagtaaataacatattacaaatattgtttctgattatttttcatttattctgttacatttctccattaatttattccgattctgaatactatataataaacatgacataaataatgagatggtattacattggagcaaagattgacagttgaagtcaaagacatatatgcatttactttatggcgtgtttactaaattgtaactggaattagaataattaataaaaaaaataaatcggtttaaaatagaaaataatcggaaacaatattttattatactgtttactaaactattcaaaaagaaaatcagctgaatcatattattttatttacataactagaaaatgtaatcgaaatgctttaatttgacaaaattgtcattattaatacatgtaattattttttgtttataaattttcaaagatcatgtttgtcttttttatttttaattaataaaattaaaataaaaataaaataagttaggaaaaaggaaagatattccctataaaaatgagggaaaatctttctttttattttttttcctaatttacctaggcctcactatgtttttcctttccaaaattttataaacaatcgtataagaattaataacatgccattaatttcaagtaaacaatagagttgctctaaatgcaaaaaagtctctctcgatagtgataaaaatggtgtctctaatcttgtcctatatctttaaaattagggtattttgtactatactttttaaagggataatttaaaaaaataaaaataataaaaaaattacaaaaatacagtttgtatggaatttttaatatttttaatgttttttagattttatttacacaaaataaggtattttagtgtatttttatattatattcttattattttgttgttaattttttattatttgtacattttttttttgtgttattttattattgttttgatgttattttattataactttcatgtgattttttgtgtttttataaaatatggtaaaaaaagaaaaactttaacggtaaaaatgtaatttttttacaaaagttaatattttatataattatcccttttttatataataaaagtgcgggaagaggattttttttttttggggggggggaattatttagaaagggaataagatataaacaaatgcttaaaatctctaactacaatgtctggaatttgaaaaaaaaaaaaaaaagcttactttttaaaagaaaatagtgactagacaccaaaatatatttttaatgcaagaaattatttagaagaggcatttcgtgagttgactattaataaattgggatgtgtattttataatattcttaaggtgatattcccacttaaactttctcaacgtataatatgcaaacactcccaattgatttacaaattacaataatgttcctttttcattgtccttcccttaacaataaagacccttttatcattcgtcatgtcacatatatttatatcaaataaaaagacaaaagcttccatagacaaatgtcattaatctcttacaacaatctacaaatacaatataactattgattagtatttaaaccccataaaattatatgatatacttttatactatgatagtatacaaaatgagcaaacaaataaaaaggagccaactttattacctttgatcaatttcttaaaatacaagacagcagcaaattccatgagtaagaattttacacatatagattctttttcaagttgaaccccaccaccatcaatatggctcctccatataacccacttgtttttttccaacatattccttcaattatgtaaaattgtttgtaaaaacaaaaccttattaaactagaagaaaaaaaaaactacttacaaattacaaacaaaatggcttctagcaaggccaatgaagcttgcactagcactagcactagcacaagccaagtgatgagtatgcaggagaaaaagcctaacaccaaaggctcaacatcatcaaattccaacatggagaaagcgctcgtaaaaagagcgctttttggctcgcgccatcatcgccacggtggaggtagaaggaattcgaacaccggtgttagatcattaccaagcaggctaagcaaggtttctctggctgatgagcaagctgactagttaggtaaggtactaaggcattaaggcaagcaagtactactaataagtagtaatggcaattgcaaaaattgagtttgttagtgaaaaagtagatagaaaataattgtgtgttgtttgattttgagcattgaataataatgcaacatgtaaattaaagcattatatccctattatttttctctgcattgatattgttttccatttctaaaatgtgactaatttaaattgttgccaaagtcttcaatgaagatgttttcctcggccaaataattacaaatctaaattaatttgaaatcagtatgatattctggttggaatatcagcataacccatatagttttctctgtatgctaccgacattatttcatcaataaacttttgcatcaattattggaatatcatgctgaataatttaagctaacatgactttttcttattgactattttacatattgattttttttaactagcaataacaaaaatgtcattttatgcataaattaaaccaatgatattgaaaagaataattttgaattttttcccacaactacaatccttgtagagttatctcctaaaatttttcttgttgtgaagattctcttgaactatacaaattgttgtaaatgtctccctccaatcacaatctgctctctttttaaaataatttatttatgtgactgattacatatatggttgcaatagtattgtttatttaacaattttaaattacttgaaatttagtttattgatgttaaacatacaaaaaaatactgactcataatcaattgttggattggtatttgtatattattttttcttgtacctttaaactggactgaattaacataacaaaaaattaaaaggacaaaaattctacaaggatcataattggcaacaaaacctacttattcaaggatcattttgaactcaaggaaaggaacaatccatcatttagaagtaaataaaagttagtttgtaattaaaagaattcacttccaaattcgaattccaattttacacttggtgtggcttctttgaaataacaaaaagaaaagaaaagaatatcactatatttcttcaaattaaattaagccctagatctgagtagaattctagttcagatcttcactcctggggggagtgacacaaaaaatgaaagcaatatagattttggagtagaaaaaacttgaaccacattaggctgagactagaactcctgctgctattaatttgtacattctatactaccatcttgggtgttgtatcctactacaagtatcccagtgcatctccattcagatgatcacctcccattagttggcactccgatgcatcgtgtccaaactctccacaacaagaccctgaccttctctttctaccgatatccactccatctcttggccttctttctttaagctttcccgtggaaatggattcgtgagggtttccaaccgtgaaacgaacaattccatctgcatcttctacttcctgtagaatcaatgcatcggaagggcaagtataatcatcattagtgtcgtgcattggccgaggaaggtctttgattcgtgaaagaacaattgcaatttgctcgcatgcactatcaaggcgctcatctgtttcaactgattctgcaataagagcagaagccatagactctaacaattgaacctttccagaatgctctctcatacttgtgttctgaaaggtgtaagtggttgatgaactggcatcacgccaacgggttggcagatactcgtccgggatgtgaaaacaattattagtagaaagcacgcgaagaacatgcttacaaaggatccctgaaaactcaaattgatggcagctacagctgatgagctcttgacatggaagccaaatcactttgcaccctccatccatttgtgtatggtgtctgacctggaaacaaccatcatctaccggaacagatgcatactgtggagccagtacaagttcttcttgaagcttattaaaggcataaggagttaaaacagaggcagcatgtgcttctatgggtgagcctgttttgaggcagactttctgcatcttctgttgcattttttgctttgctccagctcgatctttaaactcaatgacatcagccaactgcaaaaaagacgttaaaatatataggcttagaatacacacataatgactcatcttgaaatgtgttcatcattactgcgaagagaaattgccacaaggcatgagttgatgaaagttacattatgtacaaatcggtccatttgagattgtgcactcaagaatcgttgaataaaagcatttatcgactcagcctgagatgtgttcatcatccctgcaaagaaaaagtgcctcaagaaggctaaagcccaaaacgtacgcagcgcatataagctcatgatatgcctgtttgtttggagtccatatttattaaccatgtctctccatccttcttcaaaatcatctgccccgtctagattataaagatgatgaaattcaattttccactcatcataacgtgatccaagaagcacagaaaaccaatttgagaattttgatataatatgccatatgcaaaaggcatgtttcgtttgaggcatttcattaacaattgactctttgagccatgtgttgtggtccgttagaagtgtctgtggagcctttcctttcatgaagtccaaaaatgtctgttgaaaacagcatagatattaggaacaaacaaccatgaactcaatggtaaacaaaaacgtagtgccccatctaagccatggtgaactaacaaaaaatttatgtcccctgcaggactgatcttcattttgtgccccatctaagccatggtgaactaagataattaaataaattcacaagcaatatagtgctagattttcataagaaggtagatgtagattgccttagtaataatctttggcatcttaccttcagtgcccatgaaaaagattgcatattctcatctcgaagaagcacacaaccaaagaaacaagtcgttccatagttgtcaattccaagccaaattcctaacagcatatcataggcatccaaacgatgggttgtgtcgaaaactactgcatctccaaaagcttcatatgattgaacagatgaagcatacgaccatgctatgtgatccagcctgttatggccatctatcttaaagtcatatttgaagttgggattctcatctttcagttttttgcacatagaaatgagatcaatagcatcattatctctatcaacatttctaaaagactgtaataagtttctcacatctatttcagtaaaaggtaagcagcccagtttaacacctttctccaattccatcaatctcaacatttgcctcacagacatcccagcttttgcaaacaagcaaatcctactcttgtcatcaggagaaatgatacagtaggtcgggatcacacaaacttcatttgatttcagaagctcatggttatggttgttgctaaagcctgtaacacgccattcgggtacatgatcgaactctgctcgcttaacaattc

SEQ ID NO: 14694 - DNA, 6623 bp, Cannabis sativa
  modified_base (5888)..(5893): a, c, t, g, unknown or other
  modified_base (6201)..(6219): a, c, t, g, unknown or other
ttttctttatattaaaatgttaattgtataaatatgtgtagattgcattgaataagttatttttacatgtcaatcaatatttaatccgcacatgtgaaaattttaaattttccaatttatttcgtacaagaatatccaaatatagatatatgcactttgcaaattagattgacttttacgaacactttattttttttttatatcttctctatattatttaaataatatattttttaatataaataatataatacatattaattacaaaaatgaaatttaaatattattaaaatatgtttaaataattaataatatttttttacatgtagaaacatttaaaaaaaaaaaatagagatgctttaaaataataataaaaaaagtttacatcattagttggaatgagtattttactcctttgttcttaaatctctattttaaaggtacaatgtactctcagattatgtgtagcttgatggaaaacgcattcgatccatcttataaaaatgaaaatggtacatgcaattaattataaataatcattatcaaaaataacaaattataaataagtttatgacgtgtacaacataattttgttaacgtgttatgacttaagtggagtttggaaattggaacaatgtttttaagggagaaatgattttctcatgtcattatttattaattaatttatgtaaagagtcttatttaatggtgtttctttttggtaatattctatcgagcatggttattaggcactagtggtgtctagcacttaccttctcgacatgtcacgttgcgattagctagcgatactctttaaaatttattatattaaattatttaggacccgatacttagttggaccaatagcgatactgacacataagagaatgttatacaccactaatgccctttagcatttctctattctatcaagggatttcttcgtattagagcaaaagtatgtttttttttttcattctttttaatattagagaaaaaattgaggagatagaatgtgtgaatttgagtgtgttgctggaatctctccttactatatttgagattttagggtgagaaaaagggtcagaagtgaccccactttgaatggtctagcacatttcattggttttcagtggctttgacattatcaacactaatccgaatcaaatcaccaaactctaaaaaaaagatatctttccttttcacccaaaaaattgttttaaaaaatcgtatatatactaaatacttctctgaactaggaaagttccctttacatttcccatcctttaatttgattttgtgtttaataacagaggtggggtttgaatgaaaattatatacaaaagttcaaaataaaaaatagaagaaaaggtttaatttagttaatgggaatggttgcttgcttcagaagtgtaccacctctttctgaagaagtaaaccaaaaaggacacaataaataaatggttaaataaatgaatgaagacttataggctgtagccaatcaaaattgtaataacaacaaatgattgacaaatgggttaggccatggccttgggccacaagaaatgcacacattagaaatgacatgtctctctttttgtacccatttgattggccaattctagtttattttaaaaatgaaacttttttttttcttaatacgaaggaaaggcctccgttacaacttaggaatatactaaactttaaagtaggaaaagaaataattctttggcaattgcaatgagtggacgacataagatatccttggaatcctccaagaacttggactttcttttgtaataacttattgcaaaagtaattactaaggcaaaccttggcagcaacgtaagtttcatgattgtgcccaaaagcaaaatcaataccaataccagaattacaagttaatatatatataaaaaaaagggtgataattaacacaaccataaaacctataaaattgtctaggtgagctaacttgggtgtgaacaagccatctcacacccaacatgatgcgataaagtagttgttaaatccaaattaatgttaaaaagacatgaattggaataatttgatgtaaaagcatttcaattctccactcaataacagaaaatagaaaaacagttcataccatgctccttgtagctataagttaatcaactggtttataatgccttaaaaacaaacagcaaggccgaaaatgcactataaaatctcatctagctgtagtcatttatgaaaaatgattagaaaattttaagcaaaatctgcaaaatgtcaaatgggcatcaagagtggggaggggaacttaaggggttcttctctcagttagttcctggacttctttttcttagacttggatttcggttggtctgatgttgaggcggctgcttttgaggtagttgcttgatttgattttgaattggaagcgctggacgcggcaccggaagaaccaccttcatttttatctctagttacagcaccctgagaacctcttatctgagctgctctcttatcctttctcttcggtctgtagcttgacctctctctcttaggaagccacctttcaggatctggaggaggtcctggatttgcagggtcaaaccctttaggatactttggctttctctttctctttttctttgccttagctttcttcgcctcctcaaatgcatcagtggccttgtcatgggaagcaatctcaacatgtttagccccagatgtcttttccaaattatccacattgactcccttcaatcctggtaatggtttaagctttttctcataagcttctgctttgctaacatccacacgagcaacagtacttaccagcccaaccaatgcttcaacacttccatggcttttcacaagctcctcatacagacttgcagcatccttttctcgcccgtgtctgagcatgaaggtagcagtctcttgcatgataacattaagcttgtcgtcctcagtcatggagtttgaccaccatttgattgcagcatcaagcacagcagctgcaccatcaacatctcctgcacgctctttgagagaaacgatggtggcaacagtggcaggcatatgctggatatcgggtatactggcaagggactcagcagcaacctgatgatgattggcagcagcagcaacttgcgcccttgctaagataacaatcttggacttttctgggaacttcccagcaaactgccccaagatttcttcagctttcacagctttattttctctaacaagaacagcagcctggagtagcaccggcgttacagaatgaggaaacatctctgaaattgtagcaacgagctctcgagcctaaaattttttattgccaaagtgtcagtaagataaacaagagcagacaatatatactagaaatggtaagctatctatgatgaacaagcagtccaacctgatcaagccgatttgcatgaagaagtaaaagaatccgatttgcatataatgcttccctttgcttcggtgacagctttaaatcaagaccacgggcaagctgaaagttttgtatatccttctcttttagcctatcaaatttccttagaccatcagaaacatcttttggacctcttactgcaattaggttgttcacagcaactgcaagtgatgactcatctgctagacctcgtttaaatatgtctgtgtatgcttcagcagcctcttgtctattcccaaggagctaataaagtgtacaaaacaagaattaaatctaaaggtatttgtattctcacactcaacaaggtgagagataaagaaactgattaatgccaaaacatcatctcaagagcacatgtattccagatctgtccgtttttttttttttgaaagctatgacaaatatcattgataatcaaataatgtcatccagcagatctgtccgtgtttttgtttctgaagaaaagtaataaaataaaacaaaactcttgctgactccagttttacaaaattacctgtttaacataggccaactgaacagctattggtgccaactcaatttctatctcatcatcaggcaagttgtcctccattaatgtttcttggccaattctaacaaaaggcaaggaaattacttttcatgagtttatttcaacattttcatactgcaaaagttgtttgggtaattatgaatgtgataagaaaataacagttataatacaacttcaaaagatgaggaaaaaagaaaacttggtagaaatcatcttactacataagtagaatatagcttgtttgcatcaatttaagaaattaccttctggctgacaacaggaggtgttcagcatctgcatacttgtttctgtcaattagtgagcaagcagtgttaaatgccaattcaaaggtgctagttgctttaaccctcagtgcctccaacattccttgtacttctgaagcccttccagcagcaaccaaactagccacagaattgatctccaaggaatcaatcttggacttctgaagcttctgatagatctcaatacagtcatccaatttttctaaacggtatagtatctgagattctaaaagcatggttgcagaatctctctcttgatttttcagagagctcaaagcttcatctaacttgttttgtctgtacaagcagtatgcctattggggataaaaggagtataacatcaagagagtagtcatttgagtttacataatggtgatcatttgatcaaaatgcactaatggttcaaatgagaagaggaaaagtacttaatcaagtttaaaagaaaagcaaaatttataaaatatatgacaacaaacttcaatccaagctaacaaaattatcagcaaagtgacagtgccaattcaaacaaaacttactttctatcattttattttgttatacattcaagttatcagaagcatgcatatcaatcagtcaattctgagctatctaacagagaacaaacacaggttttggttgtttaataaatcagtataaaagaattgtcattgtcactaaaatgctctaaatacataattgatgaataccataacacaatctacttcaaatgcatgattagaactttacatatttacacacaggtcgctaaaaacaaacaaaagggctcaaattacaaaccaaccttgaagaagttgaaatcaacaggtgatttcttgtaagtctcaatggcggaaagagccccgtctatattatcagccttgatcaaacccacaaccttacatcgaatcgcgtcttcgtctccaggggaaattgacagaactgtcaaggagaaaaagaaacaaaataattcaaactaaaaattcagaaaattaaaatggataagaagatgcaagtagaaaataaagtttcgaccttgatctgcgactttgatagcttgttcaaattcggatctctgaatgtgcttgttaagagaagtaaagagatcttcaataggaggtggcggctgcgatgccgcctgtgggggtttcgttctgtctttaggcttcggagccatggctttgtttcacactttctcggtttccaaacagaagcgagaaaatccaactccaggaatataaggtagatttcagtcgtcccgtctgcactgtatttggtatccgctatggtagtcgggtcatcgggtcaaccgtgtacccatactatttgggccaaatatatattgggccttactagtagaggatcccggcccaccaactgtagactactgcatatttttgtttggggatttttttaaaggaaatttacaaaaaatactaaaatttgggttaatttttacaaatatactgttacacggattttttttttcaaaattactgtgtttttataaaataccagtaaaatacaaatcagaacaacagtagaacaactaaaaaacaccaatagaacaccagtgaaaacttannnnnntatactgcagtatgaaatttataaaaaaacacagtaaaaaaagtaaaaaataccgcctggtagtatttttgtaaaaaaataacaaaagctagtataccatgtaaatttcccttttataaaagggattatttcacaaatacacaaaaatattaaaaaaattataaaaatacgattttacgaaattttaaatatttttacgatttttttaatttgatttacagaaaatacggtctttttatgttatactcttgttaattttttgttatctatatattattttttgttgttgttttgatattatttagatnnnnnnnnnnnnnnnnnnntatgtaattttcttgttgtttttggtgttatttctataaaaaaatcgtaaaaatataaaaaaaattctttaaacgtaatttttttttatataaaatatagtacattataattatcctaattttaaatatatacgcagttaaagaaatatttataaaaataacaaagaataatttattcattaaaatagcgtcattgaataccgatccgcagtattttaatttgtataatttcttctttatttatcaattttcaatgcttaatattctacatagagcccgttgtgcgatattgggtttcaacatttatatatatactagtaaaaagctacgtgcgaggcacgtatactaaattttatgctattttttttctattttattttaaagtgatacaattaaaaattaaa

SEQ ID NO: 14695 - DNA, 9727 bp, Cannabis sativa
gtaatcaccaaatagatagatttaataagtcaataaaataccaaaataatacctagcatccatcattcctcatttctaactaatacatagctaatttaagggccacacgagatcatttaagggccaaaatagtgcgccaacgcccatgttgacatgggggttgggaactatgcccaagttgacatacaacttggttcacatatttccactcatcaaacacaaattctgctatggagattctttttttggtcaaaatagggtaagataccttgtttgcaatatcaaattccatagaagtattaagacaagccccaagaagccatttgaagagcacctaacgcccaagttgatgtatagcttggtgcactgggttcttcttatgaattcatgttccatctcgagcatctgactatttttccatagtaagcgaagctacaacttatgacaagtcaaattcacactttaatatttcacctttttgacaaagtggaatatcaaaaaattagtcgcaaattgggaagtttcgattctacccgattttatgaaaaagtgacatctctgagaactgttgaacaactccaccataatgaaaaaaaaattgaataagtaatctcaatatattgctaaggcataaaaaaaaaatacaagtttggaatgttttcccacttatacaacgtccaggttgacatcagaatgccagcctatgcatcggttgctgatctgcctttagtaaaccaaccataactcactcaatattgatccgattgaagcagttctagttgaatttaaaagttcttgtaagtcatgtctcactatcgtaattgtgaagatttcaagtcaaaattttatctccaggacgagtgcaatttttttagattacacaaaattgatctaacggacacaatttgagcttcgaaaattggcgattatcatctagagtcaatttttgccattagagaatcatgaacgataaagattagcccaaaatgatattctcatatctcttgcattatttaattattattttaatagatttccttgcttataaaaggagagctccattagatcatttttcacattcataaaagtccctacaaggtaagagcatctatctctagtttatctctctagaaacctgagctctttatttagacaattctcttgtaattctcatgagaaataaatactcaaagtagacgtagctctattattgtcgcgacatagggagtgaactactatatatcttgtgtgtctcttattaaatacttatctcatatttcatctcaccaatctattgagtgggtgttggccagctttgtgcatcaacatttttgtgcttttattaagagccacaactcaagatccaaaataagattgttgccacgagatcaacgagtgttgaaagaagtatcaacactggtcttcctactggggacacgccaactgctgggtatatgtcgagatgacatctacatcttagatgctaagtgaaggccttggaattggttccacagctcgacccccaagaccataaacaactactggtactgatgcaataaccaagttccacctgataagcctcacgcggagctagaagaccctgaggatgtcaaccctcaggttgaacaacttagccaatcagttgctaacttgcaacactagttacgagaatctctcgacaagtagcatgaatagtttgaaacctagttcacagaacactggagaaatgttgaagcagaacatcttaaacaagaggaaagaagagctaaacttgctcaacaaattctagaagcttattactccagctatagaacggctccccctaaagtcactttgttagagttagagacaacccacgtctgccaactagccatgtgggaacaagcattcaaagggaaatccttaatgcgtgaggtacttctacctttctcgatagtcatgccactactcagcgtgcaagaggcattaaggatcccctaagggaagcaaactatgagcgagcatctaagaggactcaaactcaggaacacagaccaatgggccatccactttatgtggagaagtcacatgtcagagaaacaatctacaagcgagtatctaaaaggacttagactcgagaatgtggacctacaggcttataacctgccgttaatatgaccaactgcaatccttcttagaggaatcggaacaatgcaagtaaccaatctcctccatgggattccctcacaagtccaattactctaggccatgaaccttgcaaaggggaaggaacctgcagtcaaccttaggggtgggacccaaaagctctaccatgtgttatcctaatttatgtacaagatgacgtgacatccttttgggtgacacatggacagaatcctacaacttgggtgaattattctacttgtaatggcccatatagagtgatttgatactcaaactcagcagaagctgaaatatccgaccagcttccatcacacatgcagctcgaatacactgaccagagcatgcgagatgataatttcagaagatatgtctcacatattttttagcttgcatgtcacgaaaatatccctaaattcatgtgatagattcgcattagcaaggaagaaaggaaaccaatttaagtttcccatttatcttattgtaattataaaaagtaattagtttcccattttatttcttattagttttgggaaaccaattcactgtaatgcttccctataaataagagagtcatctcattattcagggacacaaaattcacataaaaacacaagagagaaatcttaccaaagaattatagattcaagagtgaaacactcagagatcattgtaagagctttcaagagagatcaaggtcttcttacttatcgattcataattaatacaaactaaagaggaataggctattaccatcatcaaggggtcaaacctctataacaattttggtgtttttttttacttaatctttaccaattattgtcatttaattattcttaatcactttcattttactcactgtcgttgactaaaagcaaggtcaatattttggtgctttcattgagagcaaagaaacacaaatctttgttataagtcttttcaggtcacaagatggatgtacaaatgtagaggggaaatcagactgaaactactgatctaatgactacggatcctaatgtgaaaacacctacaaatcacatagatctagtcatgcctgtttcgaaccctattactcctcaacctttgacgagcccttaaataacaggacatggaatgaccacccctctagctgggctcactctgggcatgaaagaaactagaaccaccagtacttagaccgagcaaactaccacagtactagaattccatctactacatatactcaaaagccaatcattgatgacactgatttacagaattttcaagctcctctagggaaaatgtaaaagcataataacaatcttcattacgatcactaaaatactcgagcagctataaattttgctttcacagatcaaagatgccaatgcaaagagtggagcaatcaatagatggaaatcatgagagcccagcaagaggcaatcgataattgttccaagcaccacatcgtactgatcatgagagcctatcaaatcactggacaacaactagtaaaaagtacttacatccccattgatccacaacacaggccggaagagcatccagctggacacactcaacaaacccaaggaaaccttgcttggttgcatgaagacatggttaggattggtccaattgtatttctaattccctcaacattgatcccaattttcatcccatacagtagaaaagaagatatctagataagaagaagtagaaaaaatctgagcaaataaattcataattgaagcttctacccagcctgggtagccaaccctgtattggtgcctaaactaaataagaaatatcgggtatgctttcacttcactggccttaataaggcttgtccaacagacttttttccacttccaaggatctaccagttcatcgactctacaacaggtcatgagatcctaagtttcatggacgcctattgttataaggttatgccacacagattaaagaatgttagggctaccaaccaaaggctagttaataagatgttcgaagatcaaattaggtgtagcaaggaagtgtatataaaagatatgctcgtcaaatccaaaaaggttgggggcatatagaggatctagatgaatgctttaaaatcctcataaagtacaacattaaacttaatcccctcaaatattcctttagagttagctcgagtaagtttcttggctttattatgaacacctgaggaattgaagccaactcagaaaagattcaagcccttctggatatgaaatcaccaaaaaaatccaaggaactgcaaagcctaacttgtcggatagccacactaagcaaatttgtgtcaaagtcaaaggataagtgtgttcccttttctaatatcctacgtagaagcaaaaagtttgaataggtcaaggagtgtgaagaagcttttcaagagctaaagaaggaacttgcacaaccttatatcttatcaaagctcttggatagagaagaattgggaatatacatctcagtaaccaaaattgtagtgagcgtcgtgtttatcaaagaagagaataacacctaacatctggtctactctctcagtaaaatgctaataaatgtagaaattcgatacactctgattgagaaattgacctattgcttactcctgacatcaaggaaataataatgtacttccatgcccaccccatccaggtatatactggtattgaaaaaaccatatgcttttggttggctactcaaatgtgcaattgagttgggatagtatgaaattacttatcaaccgaggacaataaaaggtcaagccctaggtaactatgtagccgagtacgcgggcaatgaaataacaaaggtagaaaatgacaccaagccatagaaagaaaaggatcccctgccaaaatagagaaattatgaaagaccggtatggaaattacatgtaaactaatcatccaatgatcaacagtctagttcaagaataacccccattacacctagggcatcatctacatgaagcagtaaagtttggattcacaacatccaacgacgtagtagaatatgaagcactcattgccatattaaaactttctcagaaagtatgtgctgaattcttggacatttgtagtgatagctagccttcaatcacatcttcagggaacactggcttgaggagaaaggatgattttgtatctgagaaaaattcaagacctcctggcttagtttaaaggatacaccatcaagttaatttcaaggtaggaaaatgcaactattgatgcattggcacggtcggcgagcatcaccgtgacaaacaaggcagacttagtcccaatttaatttctaaaagaccgtagtatcaccagcacaaaaaaaataaaatggtggacgatactcctacctggatgaccccaattgtagcttatcttgaaactagaaagcttccaagtgacaaaagcaaagctcaaaagatgatgaggaatgttgcacgatatctgatctttgacggagtaatgtatagatgaggtttctctctacctttgttgaggtgtgtaacaaaagaggaagtagcataactccttaataaagttcatgagggattctatgacaaccatgctaggggcaaagtctatctaagaaaatcctgtgaaaaggatatttttggccgacaatgatcgaagtttcaaaagcctatgtgaataaatgtggcaagttccaaagattttctaaagtgcctagggctccacccaatgaattgctctaaatgcaaagtccatggtcatctgctatatggggaatagacttgatcagaaaatttccaaagggaaaaggtggagtgcaatatgcaattatagctgttaactattttacaaagtggatagaagtcaaaccactagccactataacttgcaagaaagtattagactttgttgtgaagaacattatatgtcggtacggacttcctcaaaaaattgtgtcagacaatggaattgtaaaaagcttctcgatagtcgcacacccccaaacaaatgggcaagttgaagtagtgaacaaaatgctcaaggacactctaaaaaatatcttgaaaaagctaagggtaattggcctgaagaattacccaaggtactctagtcgtatagaactactgaaagaacggctactaggcaaacacattttgctctagcctatggctatgaagtcatgttgcccatggaactagaacctccgtcccacaaaagattaatctatgaaatctcctaatggaatcactaaacaaactttaagaatggagagatctggcaaacttaaagctacaagctcatcaacaaaaaatagctagatacttcaacaagtaagtgagataaaggaaattctttttgggagacacggtactcagaagagtgctcctcaacacaaaagacagtgtgatgggtgtgcggggaccaaattgggaagggtcgtaccaagtaactaaagttacatcatcaggagcgtacaaattgcatcggtatgataaaaacatggaactgattctagtcccacagtattggaatagtgaatatctgagaaaatactaccaataaatgcaaaggtcaaaagaccacgtaattgcataatgcccaaatatcactcatgagtcatggccttctgaacagtcaccgttaaaaggtttgaaaaattagtgctaagatctgaatggccactttcaaagcacaacttattgtaaaaagcattactctttagtaatgtcttctaaacggtgttaatcatccaaaagttttttatttgctaagatcaaatcatgtaatagctttttattatcaaatatacgtaagttactttagtaacaacagattcctaccaaaaaatgaataaaataattaattattgttcaaattataacaaatttatatatgatggcttaacaaagtttagtgatttcttttttagttacaaaactacctacatgtgtagaaataggttcatccaagcataaggtccaaatagaaaaatatggaacacttaggttaatctgcaagtgactaagagtctaaaagcttgctcggtcatttgagggaacctacatccatacaatattagtaagttggcatcaaaaatacttaagcaaaaatttaaaatttagaaagctaagtaaatatactccgaataggcatcaaaaggctagattaaagcttgagattaaaggctgctcagtcagccatgtgtataaataagaaaataaactaactttaaaggtctcttggtcagcttacttccataaaaataaaggctcataggctgaacaaaaataataataaaaaaaggtcttgataacggatgagaattagcccattggatttgccagtttcaggtcctcgatggtcccaatgccttcttaatctatgactgacaaatcaggatcaactgcttcaacttgctcggtgtttccactagtagtttcattagtaagttgaccagttttcttttctccagctaccttagtttcctcctcggccttcatctagttacaacttttcaacaaggaatcatggtcgttcttatccatgtaatcaaacttggctttagggttttccttccataattcatagaaaagctctgtggagatctccgagtacttctcaaggtcttgggtacgacctttgatttcctcatttaaggcttcttccttcatggctacaagtgctttttcctttgccacttctaaagtcaattctttgactttctgctcaaagtctttaacactctaaattttgaatgagtgtacgtaaagtggccctctcctcgaccaactcattagtccgcctagccttagcctccaagctagcttctaatttttctaccataggcgcgttggatagctattgttccaattctttaattttcttagaagacttgaacaacttcttgttgactttgcacaaggccttttccttttctttaacttggccttgaaatttttccagtttagccttatctgtagtggactgggcggctacaactttggtctgagaatacaagtaggtgagctggagattcacttgaaagaataaacaagtgagaagatctacacggtatagtccaaacaaaaggtaagtgcaagccataaaaaattattattaacttggtatgctccttcaaaagggtggaagctaggaaatctatgggcatcatatctgaccccttcagcttctcaataagctcctactggatatgttcctaatagaagctaatcatgtcctttgccattttcatctcagaaggaattggcacgggtgttttctcttttgttttctggctcggaggagcgagaggaggctttaagttcttcttcactaggggctgaacgacaaccataggaactaagaattttttaacaacaacctcgtcttcaatgataaaggagctagggcagagctgagggatggtccttcttggacaaacctttatcgtctttcttttggactttaccggactctcttgccttgatggtctaccaaccttcctttttaacatggtattgagcttggacgacatagttgcacaaaaaaaaagtgacttagttagttttcacaaaaatatatagcaaaaggcaaggtaaaattctcaaaaaatataccctaaacctctgggggagcaccttcttggactattcctaaaggggcattgtcagccaaagagtcgacttccaacacttcctcaacaacccttttgcccttcccagcagaaacttgcacgatgggacgtgcagcctcctcaacaacctctctaattgaaataggcctcacaaccggagcttatttattcttcttacttttctttttcgactctggtatttctcatgtaggagtagaaggcacggccataggaaaatcttcatcaatcccctcagacagatacagcttgaaccaaatgaaattctccattgtggtcaacatagatatgttgcgagcccttctcaacagccaaagaatgacttgtgcccttaaccgtagactgaaagtgaaagggggatgatagtatgtcttcgtcaactggaaggacaggtggtagacctccatctcttctacactatagtaatctctgatgaacccacctattttagtgacctcattagcaatcgtgccagtaaactagggatgttctagcttagaaaggaaaagtaactcgagcatttatgccccgagcaagactttaatttgaacatccaattagtgtcatggggtgatggaattccccattacctctttacatacaggatgaatagcgcagcaagatatttgatcacctttgatgtgaattgcgtagggcaaatcttatagtagtcgactatcctcctaaagtatgcatgaaggggtaggatcgcaccatgttgggcatgtggtttggaccacacatagttcgcttcccctggatcagtggcaagttttgcattgtagggaagaaaggtttccacattctcaagtaggcccttggcctgcatagtttttaatcttttctacgagaggttggatggaggaaaaacctactgttaggttataattaacctatatttcgggtctttaaagttagcattatctcgtctattggtgtcttttggagc

SEQ ID NO: 14696 - DNA, 3504 bp, Cannabis sativa
  modified_base (2276)..(2285): a, c, t, g, unknown or other
  modified_base (3213)..(3221): a, c, t, g, unknown or other
ttaataaatttaaaataattttgtccaataaaattaacaataattttttaatgtaatatatatatatatatatatatatatttatataaaaaactctaaaatatatatgagagtgatgtgcgtgtaatgcgtgctattaatctaaaatatattagatgcgttctattaatctaatatatattaagtctattgagtgcacgtagagtaaattatttgtataattatacttgtatgtaggctaataatattaataataatattctcttgattacaaaaacactgactattaatatctacaaatctatatttagtctaattaatgaatccaaatcctttggaaaccggaaatcttttctacagcgaaaaaataacaagttgtctgtacaagtccaactgagcaatatcacaaaatggaccaaataataagatgataagtagaactgtagaagccaacaactcaaatcaaagtcgtctttttgttaatgaaatcatttttaaatgcaagtgggttttgaaaatatatattaaatttaactaacgagataatatatattaatatatgtatataaatactgacacatttttgtcctcaactatgtcagcactatataatgcattattggtacagtaaaaatactaaatttattgtgtatacctaacaagatcctttattgagtaattaattcatctatatatatatatatagagacgaaattagctcatttaagaaataattataggtaagtaaacatggaacaagactatcaccaactagaggctaatattgatcatgagaacaccaataaggaatatgctcctccttcttctgctcacatcatcggccttggtatgtaatgataatcttcatatgcattattaatcatttgataattattaagaccatcatctgggattgctcgaatgtgcagattcatggcaacaagttgggttgatgttggtgacaagcttaaactgtggatacgttttgagtttttcaaatctaatgttagtgcctttgggttggaaatggggtatcacatgcttgcttgttgtgggattttactctgcttatgctaattggcttctagcatcatttcattatatcaatggccaaagattcatcagatacagagatcttatgggctacgtttatggtgaaaaaatgtattacatcacttgggttttacaatttatggttcttactcttggtaacatgggtttcattctctttggtggagaagcacttaaggtattcgatcccaactctttccaagacataattagtacacaaacagagtctatataaagaaattgatgctttatttattcttctctgttaattctcaaaacataggaagttaattcaatactcagtgaccatccctttaggctgcagtatttcataatcatcagtggtttggggttcttcatgtttgccttttttatcccaacaatgtctgccatgagagcttggattagagcctctactgttatcaccttctcatacactatcatccttttggtgttgatgattaaagaaggtaactaaacattatttagaaattatatacaagagcacactatatagatcaatattctcatttttttgaagggaaaacaaattcggcaaaaaacagttatgagatacccggaagcaaagttgggaaggtgttcaatggctttggtgcaatttcagccattgttgcttgtaacactactggtgtgttaccagagatacaggtattaattagtatttttatacatattattctgtgccttcacattaattagtagttatataaataaaatagttatatttttcagtctactctgagggaaccagctgtgaaaaacatgagaaaagcaattggcttacagtatagtttgggactcgtattctactatggtgtaagcattgttggatactgggcttatggctctgaggtatctgaataccttcccaaagagcttaaaggtccaaattggattaaagtccttatcaatcttgctgtctttcttcaaacaattgtgtcccaacatgtaaggcttttatctaatctcaaaatttatgtcaacatcaatttaaggctatatatatcatgatcttaagaaacatcagttttcataaagaaaaaaacatttttatgaaaattattgttgcgtaaaaactataacaaacgtgattgaaaaatagacattacctaataatttcaattcttttcagagtagtaggtgacaagttaaaatcaccctgtcaaaataataataataataannnnnnnnnnaataataataataaaaataagagcattgttattaggcacaacactttatgtcgtttgatgattgactaacggtactctctaaaagttattacatataactcgatacttaattatactaataacgatatattaacatatagaagagtgctaaacaccactaatacattttatcatttctataataataataataataataataataattctttgcttagtggatacactttactttgcctaacccactagacactctaaagaattctcaacatccactacaaaacactataaaaaaagaatatctcactctataaattacattaaaaaaaaaatctattttcactcatctcaaacataacaatgtgcatgttaaataatgagtaatgtcaacttttgggaattaagatataataacaaaaacttaattactacacatcatgtatttcatagatgtatgtgacacctattcatgagacactggacaccaatttcctccaactcgaagagagcattcactcgaaagagaacatcaaacgcagaatttttctccgattcgccttcttcgcagggaacacatttgtggtaacagccttgcctttcatgggcaactttgtgaatctattcggttcactagcactcattccagttacctttgtgtttccaagcatgatttttctcaaggtcagtttataattgttatagtataaagataatatatattttggggaaattctataatgtacccctttaaaagggacacatcgatacatctctatctcttttagtatccaaaataattttttaatcaatttttttttccatggtcatgtaaattatacttattgaagacatcctgcaaaattttaagaaattcggaaaagtttaacacgccgaaaattgtgtttaaacagtgtgttgcacgcgtgannnnnnnnntttatacgcatgtaaaatagattgtttgaatattattttctatattgtaaattattccgaatttcttaaaattttgtaggatatcttaaataattataacgtagataaatataaaaaaaaaattagactaaaaaattttctggatgctgaaacaaataagagatgcatcaataaatctcttttaaaggagtgcattgtagaatcacccatattttatatatctcataacaaaaaaaatacatgtgttttgtttgttttaattacttttcattttaataggtaa

SEQ ID NO: 14697 - DNA, 3815 bp, Cannabis sativa
ctaagttcctggtaaaataattcccaacacttctgagagcctagaacaaatcaatttagagatacacttatatttggtattacaacaggctatgggtctatagtctttcgccgtgcacggatcaataacttttggaattaaggatatgatagtctcattcagatccttaggaatgtttccattggcaaagaattcaataaaagctctagaaatttcattacctatctcactccacatatccttaaagaatccagagccaaagccatctaacccgaaacttttgatagaggggatactgaacaaagctttcttaacatcctctattgtgaaaggtctgataagtctaacttgctgctctacatttaggcaattcccttggcaatacatgtttgatcaatgttggagatagcagagcttttgcttcccataaacttctcaaaatgacccacaaaatgtttaacaacttcctcaaagtcatctataatagtatcatccttggtgtaggctgttattctgttatccatcttccttttcctcatggcagcatgaaagtagctagatatctcatcattaaactataaccgctttatcttactttgctgagaaagaaaaagggataacctgttctgggcagtaagaaactccttctgtttgagatcaacagaattttgaaggtcagtgttagttggttgggcaacaacttcctcttgaaccccgcaatagtcctcttcgacaatcttgtgctccttttcaacatcacccacttcttgttttctaaactttttttagagtacgttttactctataaagtttcttaacaattttctcaagtttattgcctggtgtaggtctattccagctagaagtaatgttcggataggtagtcaagtggttacaaaatctgaagggtttaaccccaaccttattcagctcatgattctgaattaaacaataactatgatcaaaaaccgtctcccatttaaagcaagcttcagtattaggaaaagcattcaaccatttatcatttatgaaaactctatcaagtttagaatagattctctaacccacagcatgtttgttgttccaagtataagaagctcccgaacatttaaattcctgaacttggccattagcaagccaagtttgagcatccaaaatgtccttagcttgcaccggtctaccaccatttctgtcttggaacgaggacatagcattaaaatctccaaagatgatccatggttcatgtatcagcccatagccctcaagtttttgccaaagatttgtcctctcatccattgaattgctgccatagaccactgtagtcaaaaaagagacctttttaccactaaatttaactcggcaatgcaccagctgagtgtcctcatctaaaatttccacctgaacaaatttatcttgccaactaatcataattctatcagaggtaacattacttgaatagtatttcaaattaggaaaattattgtctataatctcataagcttcctcatgtttcaccttggtttcgaatgatgctccaaaaccaattttattcaatctacaaacattaagaattgcaatatgcttttctcttttattcattcccctcacattccaaccaatcattttacaaacttccattaatagtcaagttagagttgggaaccattactgcatcaattgctccttgaagagctgcataaccattcactgttttgggtgcttcaacaatagtctttgagaccattttttccctttctttttaggagtaatctagttagctttgtcctgaaccccgctgcctgttttttccatatcagcttggcttgctagctttgctttttcctcttctgcagcagtttcacagccattgatcgatttcatttcatcaccagtaactgattccatgtttggagcctcctttttatcttctttacagacccctggttgtttcttcttccaaactttcagtttctccttgttataatcggccactgtatgaccaagatttccacaagccaagcactttgatgggagccattcttactccaccaactgctcaacaagctacctcctttcattaataaaggaaatcaatttaggtggttcatcagaaatcaccatgtcaacaagaatgcgtgcgaatttcaccattgagcgttcttgagtgactttgtcaatcataataggcttacctattgtgctaacaagagcacctaggtttttctttccccaatattggagaccaagaccatttatccgaatccatactagaactgagtttatcatttgagctgaatccatttctgcagaccaaggaggaagcacaactggtttttttatcaaaatggataacactaacctcccggactaagtcccttgtaacctcatctctgaacttaaccaaagtgaagcctgaattcattcggaccaccttctcaatacccatattaccccaaactctcttgacaaatccctcaaagactttgaatggaggattaactcctaggactatacacacaataacattcttccagtatgaagcctcaatttctacttcatctaagtccaatttagcaaccaattgatctcctactttgataggttcagcaaaagaaagtctagtacaaggattaggaacctcatttgccttgaattggctccagatttcactcaaattagcttgaaattctttcccgacctcctctgcccaattgttcgatatgggggatcgaaccgtgctgtttaggacaggctccaaccctaaatcactctccaggatatcgaaggaatcatgaggttcctttgcaaattcgatgctctccgcacttgtaggtgctagcttccgaatagtcctcctcttcttcgccatgggagaacaggggatattctcacgcccccgaaacctgatcaaatcatatatttggtttgtggaatttgtttttaattattattattatttttaagttaatttgaattatttttatacacgtatttatttttaaaaaataattttacttacaaatttcgctattaattttttttatactaatagttaactataacaaaattgattactttaatattttcgccactaatttatttacatacatagtttgaccatataaattagctatcttttaaattaatttgctttattattttttttttatcaagaaagataatttctattaatcaaaccgagtccattacatccataaagggattcctgattctccttcaaaatagaaacttacagctcttttacatttttaagaaaaattttatctatactagacaaattccttttctgtacaagattaaacatatttttttaggctctctttaatgctactatctatacaactcagattcatatacttttttcttatgagaattgttaaaaggcacccctgatgtctagcaccctcctcggtatcatactgctaatggtgtaattaagtatcgagtcccacctctgtaccacatgcactaagtagtcgtcccgaactagtgttggtagagctgaactgtacaccgagtaccgctgagtgttgtaccacatgcactacgtactcatcctgtactagtgttagtaacactagatcgtaccctttgaaaatcatatattatatcaatgcactctttactgctaccatactagtgttggtagtatacaaatcacataacatggaatgtaatttacatacatacatatacacatatacgtattttatactaatgttacctcgtttctgttgggttgtatgccctaaataaaactctttacaatctcattagttatcaatataagaaat

SEQ ID NO: 14698 - DNA, 9411 bp, Cannabis sativa
ttttaattccgaatatgccatgacacgtcatcattaagtacccggtgggcagtgtggggaaacacggtaatcgaagggtattttcgtcttttcaggagtctagggtctacgctagaatacggtgtgcttcacctcaagtagtatttggagttgaaaaagaaaaaaaaggattaaattcaaaaatttgaaataaaataaaaaagtaaaaactgtaaaaggggtccagagggtcactgctacttgacaaaattaagatgggttacagtcaatgaatcagaaaatgcagaggtcatacagctgggtttagatttgattatctctcctcacagaaccaatttagcattttattaacactgccactgagtcaactcggtcataaacccgagtcatgattacccccgtttcaaacaaagtccggtaactcggacccttgtctattactaataataataaagttaaaaagagtaactctcatataagggtcaattgctaaaggtatatttattactcacatcttaaccacaagtggggtcagaaacttaaccatggattaattagaactagggttaaaaaaacaagtggttaagaaggacaaccacaaaaccaaagatttttattatcaacagtcatcactgctcatcatcatcatcaacatttctctccttacttttcttcttctttctcttttttctctttagtcaactaaaaaaaacttcaccattttctctttaacccatttttctttatagggttagctattatatgaaatggtgatgactgatcatatttataatctacacaaacatctaataattctaacatacccataaaaaagcagagaagacccctcttcttctttctttttatttttatttttttggaatttttttctttcaaatatttttaatttttaatttttattttgagaaaccctagatgtttgagccatggaaataacccctacaattacaaccaccacagctactaacactggtagtacgaaatcaccagaagccgagagcgaaactccgacaaggatccaacccattaagccaatctccattagtaacggtgtactcaaacgccacaacccacatcaccaccatcaccaccaccaccacttaccggcgccggccgcagtatcatctccaacagcagttgtttcgtacagagaatgtctcaaaaaccacgccgccactttgggtggtcatgccctagatggctgcggcgagtacatgccttcacctacagctatatcaacagacccaacatcgctaaaatgcgccgcctgtggttgccaccgaaattatcatcgccgggagccagatgagcaagctttattgttacctcatcatcatcatccaacaacaacaacaacccatgtcatcgagtaccagcctcaccatcgtcaccatcctcctccaccacctcagccacaccacggcggtggaaatcgaagccccaattcggcttctcctccgccgatctcatcttcttactacccatctgcacctcacatgctgttagctctttcgaccgggctatcgggtccgggcggagcccaagagaacgcgggtgtcgtcggcggtggcggtgggatgatcacaccgaactctaatagttcccgtaaaaggttcagaactaagttcagtcaagaacagaaagagaagatgtacgaattcgctgagcgagttggttggaagatgcagaagagagatgaagacattgttatggagttttgtaatgatgttggtgttgataaaggggttcttaaagtctggatgcataataacaagaacacacttgggaaaaaagatattaatggcggaggagccagtacaggtggaagaagcaacaacaacaacaatactaatcttaatcttcttgagcaaaaccataacaatggcggtagcagcaacaaaaccaacagtgagaacgacaacaacaacaacaacaatgttcagaatctcaaccatttaaagatgatgatgatgatggtggagttcatgtagcaactaatggttcatcttctacttcttgatctttcatgaataataaacaaggtgttagatagagagtaagcaagccctactttggtattaattagtttcttcttcttctttttattattatttttacttaattttctttcttattttgtttagagttttaattaatgagatcatcactttgttgatataaaaaaaaaaaagaaattaattttgcttattttcttaatgttattataacttctaatttggatatagaatatataatttgaaccaaatgccatatgccactttaaatttttagaattgaaattaataaataaatatgaatctaatgtcttatcagaaatgaccataatgattttctttcttgctcactcactccttatcttgtgtccgaaagaaagaagcagaaagtgtttgtgcttgtaatgggggcagttgcaaaatattattctagtttatccccaatagctttttacacaataatttccattttaattagatatatatatatatatactagtatgtgcaaaagctgatccaagagatcttattaaatattacactttagtattaaattaattatacatgaactcttatcattattagacctttcttctatcattagtgatctcctgcattttctattaataaaataataatttatatgaattttaatacagggcatcatcctattgttaatcttatcatatagtatttgattttatttaattactaagctcaaccaaaaagcatttgaactatttttttttagtttcttttttgtactttgggtagagctaggcttagattataggctaaagaaccctaaaaatgtattaatttattggatttgattaatatggtacacggattatgatgtatggatataatttttaatgttgaaactaataaaaaaagaaaaaaaaaaccctatctttctctaatattttaatgatcactttccttttaagggaagtatatatatagtccatccaagacccttttttttctcttgtttttatttattttttaatctaattaatttgataagatgtgatgacggtatggtaagtaatgaaatatctattggtttgttttggtatttggtcattgatgaagtcactaattcttggttatgccatagattgagtcccaagaaccaaactgcctaaccatggtcttgtctagtcttttactctttagcccttaattactttacaaattagattattattatttatttttctggatatttattattattatttttttaaaaaaattattaatatgggaatttatgggcaacccaagaagtttgactacctatatcattaattaaaaaagttagaaaaagggagatcaatgctgagatttctttgctagctgtattaaagctagatggggtaagcaagcaaaaacaaatcaatcaatataaaatatagtgtaatttaattgtgtgatatatatatatatatttgaaatatggcaaaggttttatttttaagacaaatttggagaaattattacaataaagtgatacaacgtccgagaattgaatattattaaatgtaaaagggctaaagagtgggacttgttctttatgtttacgtgtttcaaattgttcaagtaaaaaaaataaaaattgcaataaattttacagttgaggaagtacggcctacaaaacttgataattaaataaataaaataaaataaaaaagaaaaaaaaaacttaagtagttgttgggagatgatgatgatgataaatattgcttaatgagggagctaactttaaatgattagtgctcaggctttgtgtgctttgtttattcattaaccatttctagtctctagaacaaaccatagatccctaccccaactatgtcaaagtaaattagggtttatatacatgttaaaaagttatggtatatataatgttggatgatgtgtgttgtaaaatttattgatatttttttgttattaaatgaaaaattaaatcttgtattttttaaaaagttaaataatattttgaattttatgttctataaaaattatccgttttgttaaatggtaatatagattcagtatttttaaaatgatacaaataagattttaaattaattttttattaaaataaaaatttaataataaattgatctagaggtgttatgacagattagttacatcttctgcttctgttcgtgctaaaatttatcttcaagttggttatattaaaaaaaattatcaaaaattaagcccaaaatcctatttttatcattttcaaaaattcatggtctattttgtcatttaacaaaatagaggatccaatcggtaacttttacaaaacataagatctaaaatggtagttatcctttctaaaatagtataaaataatactttgttcaattttcgttaatttttttttttaacataactaatctaaaatcaatttttatagcacaaatatacgcaaaaaatacaattaatttggttataacactttcagatctaattattattaagtttcatttcaatgaaaattgagttcagtattttgtaccctttcaaaaatacaagttcataatatcatttaataaaataaataatctcctcaatatttttttttaaatattataatttatttatttatttattatgaaaaaggctcactatacaaaatatcaatggtattgagagaagagagattttgattgcaataatcggtttagtgagaatggaacatgagacatagggaccaaaagtacaataatgtctaaagcttttaatgaaaataaatatacatatatatgaatatgagtgtatgcatcactcttgtttttctatttggttttttttgcccaaattgatgtggcaaaacatatatagttttggtcaagctatatatatgtgtgtgttactttgagtgaacattttgcaaagctaatactcttaattttgtgggtttgtttgaggagaagaattaatgatgaaacaaagacaaataagtatttatattttcttaaaaagaaaagagaaaaatagtaaaaagaaaaagaggacttatgggtagtctatttcattggattctcctctcattttcttttttattttcccccttattaataattaatatagcctattttatgggtcattatagggattttgtccaatacatctggattactactagtggactctctttaaaatctaatctttcaggtcggtgagattaacactaagtttgcttttttttttttttttttttcttgaaagctcctattcttttttaattttttttaaatgtgattaaatattaattaacccctttctccctcctaaattgtacccttgaactacttttgttatttaattaataagttccccaacagataataataataataataaagtaaaccacatgattatttattactcaaaataaagagactgctaaccttcattaataaaatactaattacaagtctttaattgaaggggttatgtagttatgttcaaacatcgatattttaccaaacaaaatcttatttaaggaatattattaattagcaaataattaagaagaataataatattgtaaaataaatcaaatcaaatcttccctcagtaattatctaaataaaaacttattattagatccccaacttgcttgaaactccattcaactaattggatacgatgtgataatcttatccaccaaaccatgagagttttatttatttatttatttaattattattattatttatttaaataagttttaatttatattgaaattggcttttttcatatttgtgatagaattttcttaaatgcattgtcgtttagttatccataaagatgagaaccgaattttacatatctttactatattgtttggacacattcataataattaacagcataaaaaagaagcacacatacatataaattaaattcatttacagccaagtcaaatgaaggaccactcaattattttgcagcatatttataaagattactatagtgcgctttttttaaaaaaattaaatgaaaaataataaaaatatttttatacttatatatttataaaaaaaaaattatctttttagtgaggtagtgcagtggtccatgtatttattttctcttcatataccctaacaatctatatctatgatataatattctaattccaatatcctatttcctaagatattatctccataaaacatattgtagccctacactaattaagccatgctttagcactactttataatgtttttgtttttgaatctaattaactgcacatatatgtagtgtgaaaattatatatacctaatcccttcatacatgttaattaagatttttatctctgaatatattaaattatgtttttgaactttttaaatcgttaaaagtatttactgatctaataagattgttagatttaaatttttttacttaattttactaatagaaggatgacatggatagaatttcagaaggcatgatttaatacatgttaaaattcagatacatgattcagtagatatcaaagttttgagaacacgattgagtatatatgtacaattgttgtgtcagtaaaaataaatggaattagacaaaagtacttgaattcaataattttaataagttaacgaaagttttcaatggcctaaaaattttaaaatttagtacatattaaaatttgataaaataaaaaatatttgaacatatcatctatatgatatttatgtgtgtatatgtattatatgagggatatggtatggcttgggtttggaagtattattattgcccaccaaaaccaaaatgtaccacaagtgttatatatatatatattaagcttagatgaattaattatctcaatggaaatattggtagtaccaaaatgacttgtttccaaaataattgaagcccaaacccaaccaaatagtatagtcatgtccaatcgagtgatgtaggttagagatggggcatgtgagggaagagttgatttgtctatctaaaattggaaactatttttgaaaaaaggttatgagtgttaattatttgagcttagaattgagatgagaccatgtgagatgagtgatatatgaacaagttgaatgagtaagctgaatcgatctttggtaaagatatcataactgaagttggatccaaagatttttggttaacagtatttggcaatggcattaatattttgaatagtacaattaggtaaataattgtagggttgatgatgggtcagagagagtggcgtgtaaactctgcaaaattctaactcactccatttctgtatttatttattttcaacttttttggtgcagggtatgatgagtcaggaccataagagattaggaaacaaaccacatatactaactactaaataaatctaataaattcaggcccataatgtttaccttatctcagctattatcctttttctctaaattatacattctctcttcactatatattgcccttactcaaaaattgatttccatcttttaatatgtttgtttttggcttgcttgctttgcttggtttggttatttcttttattctagtttcaataattgggttctttatatttattttctattggaagattttttggtgattgttattaataaatgtgatctttcacatatttatttgtgatgaaaatttagtatttttttttcattctttagatgttttacaattgacagtttatgaattatttacttaaaaatattattagatttattgtaaatagtttaattagtctattattattaattttgcttaatgagcaatatatgcatataataaactatatccgatttatggaaatttgtacttacctttcaaacaaaaaaaatatgtcatattaacacccaattcctctaccattattgttatttccaatcacattccactgctacttattgttttttactttgcttaactaataaattatcaactaaatttactttttttaaatggaaaaaaattgacatcttatatatttaatgtagcatcaatttcaagtatgcttacattttcttatttaattaattttatttgtttattattacatgaaaataaaattatttataaatatattttttatatttatttatattagaaaatatcattaaattagttatattaaaaaaataattaaaaattgagctcatattactattttgtaccattccaaaaaatacagatctaatttattatttactaaaataaagagtctattcaataatttttgtaaaatacagagggcaaaataatattaattgttaataatattataatttctaaattggccaaaaaaattatatttatattataatataaaaaatttgtaaattataattataggaaagtcttcatggatcacccctcaaaagtatttacgaaaaatctaactaaccaaattgaaaaccccatttttcaaataattaattaattaaataaaagttggatgggttcttgagcttggaatcaaaggcaagcttgacgtggttacgcgtaaagaacatctacggcaaaaatgggagaatgttaagttcgatttggagaagtttaaaaaaaccaaaaatgatttcagattatatggtgaaaatgagagctttgttagtgcaacaaggaattaaggaagcttcgcttggtgaggataacatcaaaggaaagacagggaaagagaaggatgaaattcttaagatgacacataatgtcatcattctcagtcttggtgacaaagttttgagagaagtgtcaaaggagacaacagttgttgacttaatagaaaagcttgaaagtttgtatatgacaaagtcccttgtgaatcggttattcttgaagcatgagttgtatgctttcaaaatgcaattgggaaaatctgttgaagatgatttggatgatttcaacaagataaatcttgaacttcaaaacataggcatcaagattgaggatgaggataattaggccataattgtttggaaggtaatcgttgacattagaagaagttttggagtgctttaatgttaaaagaattgaagaagaagacagggaggaaaactcttcagatggtttttgctggtagctcagggaagaattgatcaatgagagaacatgaatcatggaagcttgaacataggaaaatctcaaataaagtataatgaaaagtgttacatgtcataagccttcacatgtgaaagagatttgtcaaaactaaagaaaggagattacaaaaagtatggcaatacaaatgtgacttctaatgatggatatgagagtgctgatgtaatggtggtgacaaatggttctataaatactaattaggtgattgattctggatgctcattttatatttgtccagata

SEQ ID NO: 14699 - DNA, 3802 bp, Cannabis sativa
  modified_base (3727)..(3730): a, c, t, g, unknown or other
ttaatgagacgaaaatgaagatattctaattttgattggtacacagaaatcaaataacaaaattagataaaatagaatattggaatatgatttatgatatcacgactaacaaaatacttcgatataatgtgtcaaattatgcctgcttcagggatagtatgtataatattaaataaagtaaagagcataactaaaatagcttctaaggactgaatttttgtaaaactatacatacaagttgtctcactcattatgctaaaacattgtgaaatcccaagcaatttgactgaaactgaatagttatcttagaactactaaaaaactccatcaaaaagaaacaatagttgaggccaacaaaaagtgtggtatatattctaacatgttaacttacactaacatatcatgtcgactcacttctgatcttcttctcatagagttagctaaacaaagttctaaaatggtatgaaatttcccgagtctatttttttgttcttttttcatttcaaatacagataagaaattacgtgaattccctgcaaaagtattatcttgggagaaccataaaatttggaaacgaaaagttatagtcttgattcgatttatacacacaagcagcataaaaaggaaaattacagatctatttgataaatcccacaacaaattatacaaaatcaaaggacattaaattaaaaactcaaggtccgaaacatgagattagggtaatagtagagattagaaatattataacaaaattaaaagtctcatctgcctctgttagaataattcatcttctcatagaaacgaattgagagaagtgaaagagagagattgacctcatcttttccccaacgcgttggaggtttggagtttatcatcggcgggaacggaccccaagacgacgcccgcggtgctgccgacgatggcgatgcgattgccgaagaagacgaagacgaggatgattggggtttagagagaggccagatgtaaagcgagtgaaggcgacgaaatcccccaagggctagaaccacggatctcagctgttgattaccgcagccggtgttggcccactgcctggtgcagatcagctcccagaggcgttcatcctgggccgtgtcgtgccactgcttgctcacacagccagccatagccagagtcttcgcatcaacgtgcttaaaaacctcaaacaacaaattgttgtcaagattcatgaatccactcccttcaccattacccactcctccttcttcgtcgattttaatctttttcatcttccgatcttccacagtcgacggaagatcgtccccaatattagcacgcttcatcactggcttctaatttagaaatggtctttgaaaaattgttggaatacaaaacaaatggatgagaatttgggatcgtaatcaacagtatttatacacgtgtaatacaaacaaacaagaaatgaagaagtgggacaagagaaagcggtggaggaaaggggttacggccctttgtgggtggagtggttaaaggagctttaaccttatcgaaaacgacaatatagagtaatgaatgcgcttggtttttctctcccactcaaaaccaaaaatatgtcaaaaaatgacaaaaatggcatcttgggaacaaaaaaggtttgcgaataagctgccctctctgcttcttttgccaggtttctaccaccgcaacccttatcgtgaccaatgaccaacaacaataacaataagaagattagaaaagtaactcttctatttttcaagttatttgtttcaaaaaaaaaaaattaataatattatcaaagttcgataatttgatacattgtggctgtttagatgaattaacaataacaagtttcacttaaatcttttattctaagtagctttgttcaaacattcatacagaaatttgagtcttgtttccatcacttattcatttttacttgctctattgataaatatttcagttgaaaatatatttttgtgatgttagtctgttgccatatattgtgaggagttttcaaagcctcgtctgttttggacaatggttcatagagctatggtgcttgcttgtgctacttgcgttcaactaattattacatacacaacagggagatccctcgagactgtaaagtctattcaaactcaaatatgcatgtgaaatatatttctttttccttttcatttacaaaatgtgctatttagttttgtttatatgtattacagacatgtgaggttcatactcacatttctttgcacctcaagcttttaggtacttgcacagaagccaacataaattagtttcagtcacgctcaacttaaaatatcattctctaatatttgtgcatgtttaacttgatgaatagtggtgataaaaaatattaatactcaaaagcttattgaactaaaagacaaccttgtgtccaaactccaaaggtaaaagtgaaaattctttctaaaacaagtcgggcaaccataatcaaattggttgggattgcccttccaatttacactatgctaacgacgaaacataagagacttggttctaaaattgatggtatggtaagaaattttttgtggagttgtgagaaagaaaatctttgcctctttttaaaagcatgggataatctatgccttccaaaatcttgtgggggcttaggcttccaaaaaggatggagataaaccaagttttttttagctaaattgggttggcatatgctaaatgaccaccaattcctctactgcagggtcttaagcgctaagtatctcaaaggcaatttatgaagtgctcatataaaagtttttactctttgtttaggaagaatgttgtaaaagccaaagaggttctgaagaaaggggtttctaatggtttatgatggaaaagacacaaatatatatgaaaagactcgcggaaaatccatggcaaagagtacgcaatattttgacccgctgattgatgttagacaacggagaatgggatctcgtcaagctctattcctttttttactcaaaaagtttgcaatattctaaaagggggtaagcctagtagttttctctagtaaatcttcttacttggtacaagcttttgatcatgctcctctctgtgttatggctccatccctttggaacaatttatggaatagtaaaattttggagcaacataaagttcgtcggtggtgcattctctctaacgtctttccaatttgagctctcctagctaagagaatgcagatcgaagacacatcttgccctctttgtgaagggactatggaacatcttttcctcaattgcaacttagctttccatttgtggagatcttccctgtgctgggagaggggggtcatgccagttcttaattcaggtgctagtgtctagaatttgataaaatttctatggagcctgaagtcaaagggagtcaatgttgatgatctttccctttatgcttcaattgtggtgatatgatatggcaagcccataatgataaagtacacaataacaatatgaataacattaaatattatatggactctgttacttattattatgcaaattatgactcttgtttgttcctttctcctctagtggccgcctcatttttgttgggatttatgccctaaaagtaaataattaatggatatatattagagaatatatgaaatgcaattataatataaatgatacattaattataatagtttaattattaaatatataactgttgaccgaggttttcnnnnaccaataaaatattataagattagagaactgtaagaaaattagagaagggtttttacgtggttggggcgtta

SEQ ID NO: 14700 - DNA, 7727 bp, Cannabis sativa
attggttaggacctccatccagccattctagacctcccttcaaagctcttttataatgatgagctacttccatgtaaagaagataactcttcctccaaatattctcaggttgacttcctgccaaacaaatgtactacttgttggcattcaaggatgtgatccgagagaaggcagtaacccgtcttagttcaaccgaattgaggcaagcaaagttgctgagataatcagaaagctagttgccgttacagaattaaataagataaattttgaggtgattacaccatactaccagaaagtagtgaagattaaaaaaatacttgaaacatgggaaatgcaagatattaaagtaggaagtttagaacaattttagggacaagagagagagagagattataattgtatccactgtaagatccactgtcaaacacaatgagtttgacaaaattttcagtctgggatttcttagcaacccaaggagatttaccgttgctattactcgcactagatcatcgcttatcatttttgggaatccacatgtagtttgtaaggtacttcaatatcagttgttgttatgctttcaagtttttttaccattggataatattgtactatttgactcaactgatctaatggtgcaactttttggctccatgagcatgcatatgaactttgatacactaaccactcgtgtaattaaatgttaactgctgtaatttttttctggcaaaacccttattagaacatgcttctaaggtattgttctgatgataactcttaccagggttgtcctctgcctgaatggttagcacaagaccttgaagaggaagagtatggtcgataggagaaacctgaacctgagcaatgggtttgagaatccttcttattgtaaagcttaggataaataattttaataagaaaaaatttcagatggtttggtacagatcttataactacacagtcctgaagctattatatgtgtctatttatgttgagtacattaacatagtcacatgttttacagtttcacatggaggctttctacagtagttactctgtttgtgctctcaaaacatgttcaatgatctaaatgaattaagtctggaccggtttgacaaatttcgtagttatcagtcactatatactaaacgaggattgagaagtgttagacacatatcacattaagcttgttagtcccacatggaatgtttatgaaaagtagagggtcagtatgactataagtacatagtgaataaccaatattacgtacttacctggacggggtcaatgggcaatcaataaggcctatggcctaggctggtggtttccattgcacttaggagaggtgcctccctatgatctccccaagtgggagagtcaacgtcataatttgttctagtggaggcctgcgttcgcgcggctcctctcaatttagtctttcaattttgtcttcatgtgtatgaatagcagtgtaggactgaatttctgtagtacgactacaagttctacgggcgtcattgttgaacgaagaaaaatgaaactattattcatataaaaactagaatataagacaccagggttaagttaatagtttaaaatctaaatatacaagttgaagtattttaaaaataatgataacaaacttcaaagataagatgaggtgctactactattatagttcttgtattttgtgctatgaggttacacttatttctattatatggtttataggctttatagcaaatttaacacaaaaagtaatggaaaatttacaactttatatacaattaattaatgaagaaatttatttatattttggtatagatttttattatatagtagtaatttattaaatatttaattatcatatcttgcttttatgagataatattaggaaaaagattttttatttatctggatgagaaaaacgcacttattttacaatatacagtgccttatataagcaaaggaatttaactctaagaatgaaaaataaatagagtatatttctaagcttaatattttccttcaagatagattgtacaagttttgtagacccatcttggagacaatatctgaaaaaagactaggagaaagagcttttgtgagaacatcaacaagatttttttttttgaggagacatgaatcattttgatgagtgattagtcagtattctgtcctataaatatacccaatttatatattaatattcttaaatttattctttaaattattgattagtgaaattataatttgttaggctgttttaaagattaatcatgcatttagagtcatttagagagatgttagcatattttggtagaaaatagtggaagccagcgagctcagttttacaagacaaaacttaattgcaaatgtagacgactttaaagacagaactgcacttggaactgaacatgaaagttgtagatctcgttcccagctttccagaacattttgaatcgtccaattatgacttgtattaaagaagttatgaccaaaatactaatttgaacacgagacaaaaaaattttggcagcgacgggaactcgtggccgcggtgagaacgcgatttctgctagttttcaaatttttatctttttttttaatctttgattttttttaggggtatttatatgatttcaaggttcatttttagcaacttttgaactacaaaattaagagagaaacttagagagagagagagcaagaagaagacagagattgcagcatcgattgttctacatcattgttctttttcttctccttaaactcttactgtttattatgatttttattataatgtctagtttcgagtagtttctttttagttaagggttatttcaaaactcaagacatgaattctttttttttttttgataaatcagaattttcattgcaaacaatcacatttgtacaaactatggctcaccaaagagcatgtgtatttctatacaattacttcccttataataatctaatccattctatatctttttggtctatacattttggcattacacaagcaattctgttttttactagccatttagcttcttggaccagcacagtcgactcagtgctttcttagttccaaaagagtttgtttcgagcctaccaaattttataaaccagtgttgcaatcacaacagtgaaataactcttctcgaatttggtctttttgtccctatctatccaccttaaaatgctctgcaggttttaagttcgagctctccaatccagccactctttcatctgctgtaagcaggtttgagaaaacctaaactcaaaaaacatatgatggacagattcttttgaatcattacacagcaaacaagttgcttcatctctaatatgaaattgcagaagtctatctctggttttcagtttgttgtgtactacaattcaaagcaaaaaactatgctttggaatattgagcctactctatacctgtttaccaacatggaagtccccttgttcttggtttagcagcttgtacacataggcaatcttgaattcattaacagtaaattaagcaggtgaaatgatcagtttgacaacctctttggtgctcactagtttcctccaataccagctgctttgagatggggcattgtagccccaccaatcttcatgagcaatatacacactatgtacccacttcactcataaattgtccttctttgtagccattgcccaaacatgtttcatcacagcagcttgattccattttgtaatgtccaggaattcaattcctccagcttttttagtcttgcaaagcttttcccaagcaatattgcctggcccattcatgatacattgtcctaaccatagaaagcttctgcatataccctctatttctcttatggctttctttggaagaatgagtatttgaatccaatagatgtggatagtcagtagcacagacttaattaggactattcttccatcaaaggacagattccttgtgctccaaactctgattctggctgtcatcttctccactagaattgaaaactcaggagaagagattttattggcacaaataggcacaccaagatatctaaatggaatgctactcttctaaaaacctgaagcattagatatccttctaatttccttgcccccagccgttggaagatcggttgtgatccctgcttaaagagcagtaagttgaatactgtcattcaaatttctaacctttgcagcggttgtgctgaagcgactcaggtaagccttaagtgactcgtgttgtggttgctgctttatgttagttagggatgatgcttcaggtcgtctgtctctagcagcttgaaattgtttcttaaagtctttggacagctgttcccaagatgttatcgaatggtgagtaaacttatcgaaccagctacttgttgccccagttaaagacgccgggaataaaatgcaccacaaattattcgagacgttgttggctcgcattatggtattgaagttattcagatgagtgactgggttgtagtcccatcatatttatgagatgtgtggatttttgaatccttgaggaaattcaaaatttagaatatcaggatgaaatggctcggtttcctcatccgagtcataactaggtaatttcccatgtttcccatcctgatattttctaaacttatcctctaactcaatgatttgtaactggatggggtccacttgctattggttagcattaagttgatggcgtaactcaagtgcattctgatttagtcacttgcaaagatcgggttgtcttcgattcaaatgttcacgaagatcatgttgtcttcgctcataattgctcacagatatgatctttgagtaactctaagattgatagctttccgtattgctcatgtttcttgatcagcataacgtcgaggtctgcttccttctcgcgtttgccttcctgatcaactgtgccctcgagaccttgagtgtcatgagctagaatttgctccgtcttgtacatgccttctccttagaaagaggttagatacgcgtcctctatttaggtacgtgtataaaccttccctctctgatcgagaaggatgttgagggtgtctcggtggcagcccacctatcctaggttgagtcccatgatttctctcgttatcacgagggatttcttgttccctaggtcagggctgtctcgtgtcctcattcctgcgagaagcctatagtacatcattatgttcattcccttggttccttgggatctttaaggcacgtctcgacgtcgctcttgattattttgttgttcatccactagaacatccctagtacccccaggttgttcttcttgggtgttttggggatttccttgatttgcttcctgtctcctggttcttgaacctcgaggtctgcctcgtggtctccttaccccaggatcaggttgaatttgagtattaattccttgaattgccctagctgctggagcctatctttccaactaagcattttgtcggttagatttggctaagcgttgccggagttgtctatttttcaattccactaatggtacatacctagttagatcatacgcatcctcacttctaggtacatatcctacaaaattattggttttttcgttcatcccttctgggtgttgattatcaccaccataatttctccttgaacgtgttgttccggaagtatggggtctttgagaactcattggctctttcccaaggcgatgtgtagtttcctcaggatgatttctatcgttttgattgttatcagccatggatagatttctgtttgtaaggagggatttttttctaaattttatcactaaggctctcaataaaaacaccaaactattaacgtagacttgtgttaactaaaaataataagcctttacgtgataaatatatcacaaaaatagtaataaatgattaaataactccaggaattttacgtagttttgtagttaaatctgcatactccacgagtctatcttattatgatatttttttgaataatggatacaaaatacaattgataatatttttctctccaaatatccgtccactttttctgtggaatctacccctatttataggaatataagatggcagttatttactattgggatcggtttaaaatgtaaccattcatgaaacgtggacaattctcatgtttcatttaaatgcatgtgggataatactggataactgcttaactgctttttgttcttatcattatcgatggttaatgctgatttggacaattgtatctcgcttaacttcgagttattatcattgtctatcttaatgtagaaaaaatgctaagtgttagtagatggcccacctcgtcaagtctctttagttagaatcgcgaggtggctgtctcgctattcgtaacccgaggttgctttgtatgtattcactctactttgaataaatgaattatcttctttgactgtgtactccgaggcaagtgtgtgtctcgtcaatataatggtcttttatccttacctcgcttaagactattatagtcagcgagttatgaatatcttctattaaacctttgttaacgagttatcttatcttgcatttaaatgatataaaattattatactaggtggttcatattctactgcaagacacatgtcacttacgaagtgtagccaaattttgtatataacaactaccattacaaccaccactaacaaaatttctccaaataaaaaaaaatgaaacaaatccctaaaaaaagaatagatctgcaaaaagaggtatcgagtttccaccgcaccaccaacccctaatagtgaattgctcatcgtcgacttgggacctttgggtttttggggttggggccaaaaggagaaggggagagcgagggaggcgagcttcaggattggggattttcggggattggggatttaaatggttttgccgctatatctttttataaaaagtatgtcaaataaataagggcaattttcaattatatacaagtaaattaattatattacaaaaaatgtgtaaaaaaacataattacacaattctatgcaattttataaatatttacaaaatatcatcatatcacattatataataaaaataaatgtagatgtttacgattttaacatgtcgattatttttaattaattttctaaaaaaaatacataaagttaaataaaaaaatacataagtcaatatttataatttgatatattactaaaattaataaaaaattatgtatatacatatatttaaaaaaatttgtttaattatattttataaacaacatacatgcatatttattaaatatttaattattattaatatttataatgctattattcatctaatatgtttattatgataatgtttcaatagaatcaatattaaaagttcataaataagtttaaaaataaaatatttatgtttattttgttttcagaaacaaaactataaccaaatcgtgaaattatgtataaacattatgtttatattttatattaataatatttataattattaatctaatatatttaatatatatttttacgaataaaataggctaaataggattttggccctctgaactttgacatgtaccaaattatgccccctgaactattgagattattagatttaaagacttctctgagataaaacacattgagataaaatatcactttatcagggataaagtttcacaaggacagatcgggatagacaaagtgcctactgaagtgaatccagca

SEQ ID NO: 14701 - DNA, 10708 bp, Cannabis sativa
  modified_base (26)..(47): a, c, t, g, unknown or other
atatttaggttgttaaacaacatacnnnnnnnnnnnnnnnnnnnnnnggtaaaataaattccaacattgagagtcactgtaacacaccagattcttgactttaaacacattagcaattttcaagccaactatcaaggctcatattccgcctcgttgtttgaagtgtcaaattggaatcttaaaggcatagtgaaacttatttttggcgagattagtatcacccctgcaccgagccatgttcattagatgctccatccacatacaacttccaagtgtctgtgtcttgctagattagtggattttcatctagaattatcccttctatcaggaaatctaccaaggattggcccttgatggatgtccttgggtgataagttatgtcgaactaccccaattcaatagactattttaacaatcttcaagaagcatctgtttttgacaaaacttgtctcaagggttgatcagttaacacctttatcggatgttcctggaagtaaggccttaatttgcgagatgcatgaattaggcatagggaaagttgttttagatgtggatatctcgattcttcccccagtaaccttttactaacacagtaaattggttgctggtgcttcccctcttctctcactaatgttgcactaatcgcattctctgagatagacaagtagataagtaaagtttctccagttattggtttagccaaaattggaagagttgatagatgtttctttatgtttgcgaaggcttcctcgcactcgtctatccatttaatctttttgttgcctcgcaacacattgcagaatggtaggaactttatcagttgatttcgagatgatattgttaagagctgacattcatcctgttaaggcctatacttccttcagttacgttggtgacaacatttctatcagagccttaattttctctaaattttcctcaatgcccatcatgttgaatatgaattcgagaaattttcctttggagacttcaaaggaacacttctttgggttgagtttcatattgtactttttcagtatttcaaagcactccgcgaggtcttttgtgtggtctccactttttatcgactttaccaacatatcattgacttagacctccatcttcctccctatttgcttttccaacatcttatttactagtcactgatatgttaccccaccattcttcaaaccaaaaggcatgactttatagcaataaagtcccatgttggttacgaaacttgtatgttcttggtcagggacgtgtatcttgatctagttatatctagaatatgcatccataaatgtcatcaactcgtgtccagcagttgcatccaccaactagtcgatccttggtagtggaaatcaatcttttggacaggctttatttaaatctgaaaagtcgatacaagttctccaagtaccatttggcttcgggacaaggacaagataagatacccatgagagatagaatgcctcgaatataaagtcgttagttaataacttatccacttccgttttgagtgccccttatctttcaaaatccaagggtcgtcttttctgttctttagctgggtaatttgggtcgatattcaagtggtgacaaataactttaaggtcaatccctagcatatgtgagtggctctaggcgaactgatcctggtttgccttccaaaaaattattagttgctattttattttttctggatctaaaataaattcctcccattcctcaaatggttttaacatgttcttttcatcttgaactcgaggatctagatcctcgtcctgtttctcacctttctctgttataactgccttcaattgatggctagcctttttattttgtagctctatgcgatagcattcttgagccattagttagtcacctcgcattacacctatacctgtcggtgtttgaaattttaaagatagatgtttaattgaactaactgcccctagtccaattagtgcaggatgacccaacaatatgttctaggccgatggtaagtcgacaactagaaaatcttgcattagggtagttgataaaggcgtctcacctatagttaatgggagttcaataattccttgtggcgacattgtccctattgaatctgcacaaattcaccatgcaaggttttaacttcgcattttgtaatcccattttcctcagtgtatccttataaaggatattgactgagctcccattatccaccaacaccctttttattcttttgttggtgagctagattgtaattacgagtggctcaacaggtgggcacctcacgtgctttgcgtcttcctctaaaaacacaataagaggttcttcagtcttagctttcgttgatggttccagagcaaatgctgaccgctcattcttgatttccttgacatatctcttttaggcattgctactttctccagcgagatgtggccctcccgagataaccagaatgtcctcacctttaagaggaggaggttgtaatctttggctgcctgggttattgggaaaatgttactggttttgtccattgccttgtcgctttacatactgttgaaagtagcgacgtgagatgaggctatctatcttgtctttcaactgactgcattaatccgttgtatgcccaatgtccttgtgaaatttacagaattttgttgcatcccgtttgtgacacgcatgtctcatggggttaggcttgcgaaatgcaaccctgtgctcatgtgtgagaaagatattttcccaagtttcattaagctcggtataaacagtgtaaagtggcacgtacttatcatgcttcttttgtttcttattatccttggctgatttcgtagagttgtcttttctgttagtgctagagacacctagattgttagccttcattgagatggtacttcatgagacagtgttgggtttatttcccaagccagcctttatcaatttcatctccttccttgcttcctcttttcgtaggaacacctgacctcttttattaaactcactgatattttttacagggcgaccctacaagtcatcccacatctcgcctcaactgtcgagagatcagtcgtaatccctactcgaagagtagtaaattttatattgtcattcaagtttctaactcttgcagcagttgtactaaattgactgcagtatgccttgagtgactcgccaagctactactttacgttagtgagggaagacgcttcaggtcgcctatctcttgctgcctaaaattgcttcttgaaatctttagacaactgttcccaataggtaattgagtgatgggtgaatttattgaaccagctgctggctgccccagttagcgaggtgaggaataaaatacaacgtaagttattcgtaacagtactggcttgcattattgtattaaagttgttgaggtgagcgatcggattcgtagtcctatcgtgtgacgagacatgagggtttttaaatccctgaggaaattcagtgctcataatatttggatggaaaggttctagctcctcatccaagtcgtaatcaggtagtttcccatcttggtatttcttaaatttgttttccaactcggggatttgcaattagattgggttctcttgcttttggttggaattgagttgtttgcgtaaatcgggcttcttccaattcaattgctcacaaagatatggtcgtcttcaatcatagttacttgctgaccttgtgcctgagtaactctcaaattggctactccttgtatgactcatgctttctcgatcattactacattggggtctatcccctcctcacgtatatcgactctaatctcgagatctagtacgtcccaaactagagcttgcctcatcatgtagcagccttctcctttgggaaaggtttgacacatgtcccctgctggggtttgtatacgcctcctccctatcaatgcgagaaggatgttgatggtgtctcagaggtaacccgcttatcctaagttgagtcccaggatttctcttgttaccacaagggatttcctgatccctagtcctgggctgtcttcttcctgcatttctacgagaagactctggtaaatcattgtcttcattcccttaggttatgaatgcccggggtctccgaggcacttcttgacgatgtgcctggtcatctagttgttcatcctcaggaacatctctagtttccccaggttgctcctcctgagtgttctgggggttttcctgagccatctcctacctcctggttctcgagccctgaggtctacctcgtggccttgttactcaaaaattaggttggttttgtgtgttgctttccagtgtcgccctggttacggttgcctccttttccaactcagagtttcgttgatttgcctcaaccaagcatttctagagttgacaattctccaactcaaccaacggtacgtacctagtgggatcataggcaccctctctcatagaagtagaactgtcagtatttgtgttgggttcctcattcccagtttctgggttttgatcatcatcacattggcttcttcttgaatgtgttgatcgtgttgaacgcattgttcatgaattgggtggcctccgtgagcccattggctcttttccaggatgaagatttgtctcttcagcccccattatcggccatggagatgaaattccttctttggttaggagggatttttctaagcttttatcatgtaggctctcaatgaaagcatcaaactagtaacgcagattttcgttaatgattatgagccaattttgtaataaatcaagcatagatataaagaaaataataacgatgacaccaagatttttacgtggttttacagttaactttgcatagtctacgagtctatcttatttagatttttttgatacagaaccaggattttttacaatcagtataatcctttttctctatattatttttgtcccctttttcatataatctgctaatatttatagtaatataggttggcagttaattacatttaagttcaaattctataacaatatttctcgaatatgtgggctttaattacgctccacgtaaataaatgcaattaatatttgaaaatcacatagctgtgatttaaaccgtttttaaaggggtcaacactaacgtggattaggacacactgccaaatgtatcttgctaagatgtctcacctagtacatgaacaactttttttattcataagccttccagcaatggcatgagcaccagtgtactgagcaaacttaagaactgctctttgaccataaggctttgcagattggataatcatgtccctcaagtcattatacttagttattataatgtatattatacgctaagcgttttaataaccatttcaccttatcaatacttttttacatatagcgaggtagatgcctcgctatgcattgtctatgtctctttcgggattataccttctgatgcaaaatggtttctcgtcaatacgtgaattaatagtttgtacatttttatctcgcttaagactatgtagtcaacaagttataagtatactctattaattttgtatttaatgagttattctattttgtatttaatgatataatttccattatatttgttgattcatattctctaagactgacacgtgtcaccttctcaagtacatccaaatttcaagtataacaaaataattaaatatttcacagaataacctatttttgaatttaaaaatattatggttagaatatttataaaaatatctaggttaagggaaaccattcttcatttaataagctcctataaatagtggcataatctcactattgaggaagaaggaaaattaatccagaaaaatactcaagagagaaaagcgatccaagagagagagaataactcagagatagaatgtaagagctttagagtcgaagaacacttcattctttttctcaagtcaatacaacaacaaggctattactattcttatggggacaaacctctataaaatctggtattctttttacctaactgtttttactttacactatttattttatctaatcgctttatcttgactcaatatcgttgactagaagcgagatcaacacttaatattaacttttataattaaaaaaatataaaagataaaaatatccctactaattatttctaaatcttcacttataaatgtttttgattacttttagtctaatttagtatttttttttatctatgattttttagtaaataatttgatttggtgattttgtagttttatttacatttataaatttctttccatattggtcaataatttttctaggtaatggttaatttttaattagttatattgaataattaccttaattattattacatcgagtggggtatggtgacaacatcgaatatagaaataacataacaagggatgactgatgtgatgagtaagaataatcacaataagagatgagtcatgtataaaagaatagagactaattaattttttttttttaattatgagtacttttgacttttcatttattgatttgacattgttaacgcaagtttttgttaatcaataataagtcttaacgtacttcatataacacagaaatattaagaaataaataaagtataattaacaccagatatttttacatggttttgtaaataaatctccatactctatgagtctatcatattaaatatatttttgaataccagatacaacatacaattgattatatctatgttatccctagaattctccgtccttttttctatgggatctgcccctatttataagaatataagttggcagttatttacatttaaatttgaattataaccgtttaatgaaacgtggaattgatcagatttcatttaaattgtatgttagataatattagataaccgcttaattgcatgttattcttatcattaaagatggtcaatgctgatttacacaatagcatctcgcttaactggttgatgattaatgttgatttggacaatcatatctttccaagttgttatccttagcaattataatgtagaaaatacgctaagtgttaacaaatgatttgcctcgtcaagtttcttatgaatagcaaggtggatgtctcactatatttaacccgaggttgccttgggtaacttcatttattactttgaataaatgaattatttctttgggcctgtgtgctccgaggctggtatatgtctcgtcgatataggtttaatagttttctatctttgtctcgcttaagactacatagtcagcaagttataaatattttcgatcaatcctttatataatgagttattctttttcttcgcattaaatgctataacttcattataccaggtggtttatattccactatctgacacatgtcatcatctgaagtgtagccaaattttgggtataataattgccccttaaaaagttcatttttaataagaagagcttttaaaatgattacaagggtattttgtcttaatcttaatttgaaaaattgcatgctttgagttttggcagttcatgatttcaaggcacatcattagcattaattacccaatttttccaattctctcttattcacatctgttagatctttattcttttaatctaacggtgatctctctcaaggtataagacttaagaaaaacaaccatttttgccatttttgcttttcaaaactctcaagcttttctgcgaaaaacaattctcgactttccaaaccctggcatggcctctttatcgttaacctactttctatgaatttcttctgatttaatcttccaactcaggagttctcagaatacatcaagtcactcgtcgcatccccagttacagagcttttctttgtgcgaaaattcatctttgaacagtaagaggtttactccttttttggtatttctctttcgtgagttattgttcttattttgtaattaattgcatcattattcactacgtttggtttaagtgattttgatttagttttttgggtaatttctagggtttaatagggaaaaactttaggattattgtattcataagcttttggtataaattaatttcttctaaaaaattgggattttttttttttttgtataaatgtcctaatctggttttcaaattttaactccagaattcttaggaaatagaatgtcctaaggaattggcccttccattcaaacccaaaatccagaagcctcaatcaaaacttgagataaatagtgctaaaattagggaccatttaataaaaccaatcaggatgaaattgctagtcactataggcattttctacaagagataactgagggtacacatcattacttgcaagatgcagcctggcctgaacctttgtctttatcgtctattactttggctaaacccttgtttttatccagagtcactgttgctttttcattaggtgaccttgattttgaaatcatgtatactaagcctcgtaaatcaaagactcctcaggattccaatgtcacctttgaggtcgagctcattgaatcgaaagtaagggccattggagaatacgttggtggtgttttaaagtcctacgacattaagcaaaggcgaggatgctgcattaaatctgttgctcctagagaattcatctcttaccttccagaaagagttatccgccaggaatgcgatggtgccagtactagtggctcatttgggattggcgcttggagcctcgagcacatcaatgcttgagtagttctccccttgaaagagtacaacagggaattctgtaattatcttggaattgccccctttcagctgattccaagttcttacaggattctggcaagtttaaaagttctttaccatatcttaggatgggagtgtcccactccccttgaaatagtttatttttattctgtcaaagcagtccccgcgaggaagcattgttcagggggtttttattatctcgatacccacacaaatgatcgcaggatcattgtgaggtttctaaataaaactgagttcaaggacaatttcttctgaactactggtctctcccccatcaacacgactgcatttttcattttatgtaagtaattcttatctcaaaatttttgttttgagttattttcatattttaggctttgaggtcactgacttattatattattgtgttgacagcggtctcttgaagaccgattccaccctcgagatggctgagcaccacaaaatccagctaggtctcccattcagactgcaatcaacaaactttcttttgaataaagccaatgtgaggactattggccttcttggctcagacgagttcacttgtgactataagtttgcaaagtactctttgtgggagaaggtcccagttccagctaaagtagagagccaagattcgtgtacattatctccagaaagtaacccctcgggatgctgaagaagaagcatcccatggtaatcaatataacttctaccgtacgtagggcagagtttacctcattagtaactttctaggatagccaatataacttctacataggtttgatagttggtatcctaggttccacatctagcttagttgcactagctcatactatgggattgccgagcagtttatgaccaacttggatagggcgagccacccagattcaaattgggatttagatccaataaacccttataatatattcatgatgacacggcctagggagattagtatttactatagtcctcccttttcatcatttgatgattattgtaactgtctttaagtgggagtttattcccaattttttcttctaactatctttgaataaatgttgacgtatttatttgcctcgcagatatggatctagaaaaccttttcaacacctctggaaaaaagggaaagaagaggattgcagcctcgaaaacctcatcgagagtaaatacaaatcctctcaagaggtcacgaaaaatagctgccaataagaaacgtgcctcgcaacccataaatctcgagcctatagaagatcaggttcaagtcaacactctagccattgtacatgttgaggaacaagctcagggctcaactcatcaggctacatctttgagtaaagggcctgaaatggttatgctcgaatcttcttgccccttgcccaacaaagcagggaacactggctccaggtattgcacgcaatttgccacctctttctagcgccaattcaaatccttccagtctgacgactgggactcggtcaataatggtagctcgaaggaattgtttgagaggagtctcaatttaaacctctcggttagttcccttctttttctctttgttctttcttatcattctttgaaatctatatgtaaaagaaaatcatacatatatttatcctttgtagtcatcctttttatcttatgtggcacaacaacgaggtcttcaaaaggtccaacaactggaagctgaccttcgtaaatccattgaacaatgcaaagtcgttgccaagcaatggaatgatgcccagaaggagaacacacgattgactaaggatgctgaagagttaaagaggagccacaaggcagaacttgaggtagctcacaagatgccaaaagcaagtccgaggcctatcaaaagcttgaggaagaactcaacgcagccaaagtgaagcttgtaacatcccgatttcccgagatatcacataggatagtccgtataaaacaatttaataagataaagacaataaaatacttttttattgaaaaata

SEQ ID NO: 14702 - DNA, 12592 bp, Cannabis sativa
  modified_base (5323)..(5339): a, c, t, g, unknown or other
  modified_base (5432)..(5439): a, c, t, g, unknown or other
  modified_base (5515)..(5519): a, c, t, g, unknown or other
  modified_base (7088)..(7088): a, c, t, g, unknown or other
  modified_base (9001)..(9009): a, c, t, g, unknown or other
aattaatagttttttttttttttttggttgctaagtagttgctttgttaatagttcatacatagttacccataaaataaatttgaaaaagatggataaaaagaaaacaagaaaaaaaaaaagcacataaaagttaactagttattattttattttctgggtctgaatgctctcagacccacataagtttgaagaattgacaaccccttaagtctatgaataaagtaattgtcaggtgaaataagaataaacgaaagaactaaaacgtaaattttctcatagctactatgggagtctccaaccaattttgcatgactatgagataaactacgaaaacatgactatacaaggctttatccaaatatagaaagacaagccacaatatacaaattacatcacattccctcttcatctctcctctcttcacatccatacacaccattctaagagagagagacacataccaaacttacgattgtctgattagtctgtcatgcaacgtatctctgagttttatgaatagagcttgttgctcctcgaaagtgaggttcatcaatatctgaagaagcaataaggaaaaacaatcagtaatggtatttgaagatcgtcatgatgaacattacatgcatagacaatcatacctggtccaatatcatctccacggatacactttgaggcacgacaaatgactgatgatagatgtatgcaaatactgccatcaccatctgcaaaagagtatcgaagtttatacagccagagtaatgcgcaaaccaaccaggtgaaaaggaaggatttcatttcatacatatcatttgaaatgaaatgagaagaaaaatccaaaggtgtatttagaagatttcatcacatagtgggaaatggttagcctcaaactaatgttaagctcacctgacaatccattctgtctgtaattccaccatgccctggaatactatcaccaaaatcctgtaccaaaagagagggatagtattcttacaatgttgatatctatgaaagtagaatagtcattaatatcaaaagcaaaccttgactttaaaagctcttttaaaaccacttgcaaagaagcctccgaaaggtgctattattgatgcaaataaaccaaaggatgcggcatgccactgaactggcaacacagagaactctctccatgggaactgtataaacaccaaaaacatgtaataaaaactcagtaatgaatttaacacacaacactccaaacatttatttaataataataataataataaaaaaacacacaattagataaatttaacctaaaacaagcaggttcaaaggttgatttatgcccaagatttaaaaccaaaactccatacatgtcaactttgagaacaacagtaatattacctgcagcctcagtctaggcttgtcagaaggtccaggctaacaagtggaggcccatggagcctagcttgggtcttagaatcaatcctttgttaaaatatttttccaaaaaaattaactctttttatcttattcaaaaactacaattttatttttaagcattatactagtgtaacatgcatattttagttgttctcattaaatatctttgttagattatgacaagggttggttaggactcttcaggccaagtcttggccctttacttgtcacggatgaaattcgaccatagactctacaaggctggacagtccacataatgatcaatgtcatcatctagaaattcgtaattctaagtatataatagaagcagaagcatcaaggattggacgggggcagtcagtgagaagaaagaaagggatatttatttcattctcgtagtaatatgagataaatcaggctttactaaatggtaatagttggatttaggtaataggttaaaatttagcccgaatgaaatgaaatataaaatgtcaatacgaaagaacaaatattatctttcttaaatataaacttataaaagaacttctacacaaagtttgagaatgacaaacatttttgttgaatcagttaagagttacccaatagaaacatatctgaattcaagcagagaacaattaaaagcacagataaaatataatatccaacaaatgcatgttaaagagaatgtcacgttgctcacccatggaggaatccatccaggtaaggtaacagtggaagccttgaacagcggaccaggatcacattgaagccagcccgttgataaatcctgcaagcccacaagtatccacaatgaaatagtttatctttcaaacggtggaagacttaaaattttaaataaataaaattaccttccttgggcatgttaaccagggataacgacccatgatgttagctaactgcacaaacaagtataaacactttagaaaaactatattgctaactaagctgaacatatagacaccagtcagattattcacataccattcaagagaatataaggatactcaagtactaaagtaaatatcatctagtatggtaatataaagttactcgtaaagaacaaactgagtctaatccacaaagcccaggtagttccttgatctaaagttaaccaaaaagcatgtgtgtatgcacacacaaaatgcacaagtattgaaatagaaaggttggtaggtacgacctgctcattcaagccaaacaagttgagaaagtatgcatttagtataactctaagcctattttaaactgtaacaagatgaggattaagatcaattctgcctcttagctataactactgttgttaataagcacaaagagctgaggcccaaatatagaagaccaaacaaaaagcgatcattctttcccggatgaaagaaaaacataagcacctaagaaaccaaaaatcagacaattgtctgtcataaaaatttctgaactctcttaagtaagaatacaacacgaaaaatctcaggaatccatgctaaaaaacatatatggatagaaaagcatgcttaccataaatgcagatatgatagttgtaacagaagcaccaatgaatccctcccaagttttctttggagatagcttgattaatggggtctttccaaagaagaatccaaagatatatgcagcaatatcgttaataacaatgagtgttgccggaagaagaaacctgcatacatatggtacagtgcatcaagaaaaataaattataagatcagagtataagcacatacagaatataattgaggggtataagcccataataagtggacaacaagtacaataccagttcccatttgtacaattcaacttagcaaaatgataacattctaggacacttcacggttaactcacttctacaggagataagaggtgaaaacagagtacaatcatcaagcaatttcacactctaactttctaatgtagaaagataaggtggatcaatagatgatttaggaaggtcctatacagactgattttctgagtaatttattttaccagaaaattccttcaaaaatgttggctactgtgaacgaggactgcgtaaacacaacaatgagaatcatgtgtgtccatgcatactggccaaattgatatttgtacatcttcttcttcaatgtaacgatgaaccacacaaaacctgagccaaattacaaattaaaaaaaatgatgtacatataagcagctaaacatcaggaggaaaataaacaaaaaggaacaagacacacaagaaagtaaacattatatataagaagtaaccaaaatgaaatgctaagtgataattatggctttgtgatgctatgagtctatgagtgacacagtgacaccaaaatcaaagttcccaaaattaattaaaataaaatgtttattgaacctgtgatatataaggagtaacagataaccatatgatacttgataaggttgctaacaagttgatagagaaacttgtccgaagttactgtattgaaaagccgttgactgagaatgcgaccatatacaaataacatggcagtgaagaagaagtgcctggcatagaaatgaaaaaaaaaaagagtaagcggaaagtatacattagctattattttaaagataaattgcttcaattagaaacacacttcaaccatcactagaacaagtaattaaaatcctcaccaatttaaaagcctaaatcctggtagatgactatcttcatgagctttccttaataaattgaacagctctttcgccataaagatttgaataacaacaaccatagcagtaatataaagatgacccatataaacaattaacacaaaacccccaatcatccaaatggaagaatacgcccgtatccacattgacttgtacttgttacggtcattaacaagtaaactgcctccatttgttttactaacatctggaacagcctgaaaggccaaaaacaaacagataaataaacaaaaataaaggcattccatttgttttactaaatataaaatcacaccaaaatacattagcacccattacatattcatgaatatgtttccccactcccccacaccccaaaagggaaaaaaagaaaccaataacaaaaaaacagttataagtactttcaacttgattgacaatgacagaacaccaaattatgaagtgactaacctcatttgaacgtcttcgatggcgagctcgaccagttggggttgatggagtggtaacgttatccctctgcatgactttaatttttgctttcactcatacgataaaagtcccacctgaaacatttaagggcacacaaatttatttaattttttttaaataaagaaatgattttcaaagtacccaaatcagctaatatatacgaataataattctccaaagcacagaagtaataatctacattgctaatcagattcaaaactccatataacgtttagaaccccaaagaaataaaacaactgaagccatatatttctcaagaaaaaactactgaaatgtaatgaaaaagaaaaaactctttacattcaaatctgagagatatagacagagtgagaacaaagttgaagtatggtttttccgagtggacagagttagtgagatgaataagaaatgggtttcgaaacccaaacaatagcaaaaacggccgaataagaatctggcgcaaaggggtttgggtttggatttcggtaaacgaagggaggagaatagaagcaaaaccaactatcaaatttccgtgcgaaatagaaatatcggaaaataaaagattacatatttttgctactcttgctatttatggttaattaccgccattagtccctacattttctaaaatatcatactttagtccctcaaacaaaagaaattcgcattttcattcaaaaaaaaaagctaattaggatttnnnnnnnnnnnnnnnnnacatgtaccaaatcatgctccctgaacttttaaaatcgttaaaaatgccccatgaactattaagattattggatttaaggatttttgtctaannnnnnnnaattttactatttcagtaattgtttatgtactaaactatgatcccagactttgatatctaccaaactatgtccctnnnnntttgacatgtactaaattatggctcctgaacttttaaccattttagaattttttactaaaattggaaaaaaatccttaaatccaacaatctcaatagttcagaggcatttttaacggccttaaaagtttagggacatgatttggtacatgtcaaagttcaaggggcaaacaaattagccaaaaaaaaaaaaaattgcattttaatgaggatttcatccaaactgaaatgacaatgttaaattcagacggaattttcaaagagtatcaaaagttgaaatcaaaacgctaaacagataaattatatgcttaatgtttaattgttttttcttaaaaatatattattcctaactaaatgataaagttttcttattaaaaaatcatatactacaatttcacaaataatataagcctcattaattatttaccttgggttttaattatttctatttattgcaagtttttttaatttagatcacatatttttcaagtgtacagagcaagttgagttattatatctttaatgaggggccaaaatgttaaagtttataaaattgaaggagtaatagagtgaatatagttgattgatatataggatattattatcgttctggaggtcaagtttcctgattcctcatttcgtgtagacagatagatgcataattctaaaacacacagacgtcgtcagatcatgggtccatctttttcctattacacgtggattattcctgattcaacacgtggatatccttgcctctttcattggttaaatgactttttccttgttttaaaattaatttaatttggttaagcataatcgaaaggcaaataatatcgatttccttttcattagaattaatatattcttgtgatgtcaaatcaggaaagaatttcgtaaagtttattttacattttaatcccctcaattttttaattttttaagggaaatcattcatctatgatatcatgaaaatgactaaacttcttaaataagtggagcaaacataaccaaaaattaattatcattattataatatacaaagagataaagtaaacagttttatgaaattgtgaattagaaaaagaaatcgtacacacaagcaaacttgctgttcccttttttctttttatttgctcagataaaattatgcaaacttattgtaacaaaaccattcccaaaaaaaaaaaaaaaatcttatggtaaaaccccaaaaaaaaaaaaagtaaaaagtgaataagcatctaaattatgcttgtcacatttgtaaagaataaatgtggggtttattgaatggaagaggaaaaaaataaaaagaattttatgaaggagaggagaaggtgaagaagaaggtacttgccaattggggtcctcaattcattaattaggatgagaaatcttccaatcttttcttgctttgcccacaatctcactcttggaacaaactattttcatgttcattgaatgttttatagggacttgttttaggcaatcactattataaatttatttacttccaacgactataaatattattcatatatttatatatcaaaatatttttttttttaaanaaaaaaaaaaaaggagaagaagagggtgtaggtgtatagttattgataaatttggacaactctcgtaatttttgtcactatttgtttttttgtcaattccaacaatttagggtgataatgacgctccaatgactttttcaatgataaattaatcttgaaaatcttgttaggtttatttataatattattacaacatctactaatgatatacttctacatctaaattattatattattcagttgtatttggttaacatttgccattcctctatcaatcaatccaaattagattaagtttttattaacataatctattagacttagggtgcatttatttatttaacatgcaaacatatgatctgaatatattttttattatttttaatttatataatattaataaatttattaaattacattttattttgaaaaaaatattcaaatattaaattattgaagattatttctttcttgataaaaaaaaaaaaaaaaaatacttcctttctcatttggattagcttatttggattacttccttttatttggattagctttagtgtaaaatcctttttcaaaatgtcataagataaaaaaaaaattaaaattatcaacatcatattaatataataaataattaaattttattttatatatgtaaaataatatgttttaatcttctctattcatgattaaatatgttaaaaactaaaattaagatattaaaggtcagtttgacacaactgtgttatggaaaaaaaaaaataaataactgtaattgtgctgtgagaaaaaagttgaacaaagttagtaaattataaattttaaagtgttgtgagttgttaagatactattataatgataatgataatattgtgataatatagttcactataatcacaaatatatatataaaaaaattatgttatataatatttttatttataatatattttaattattttttccttaaagtataaatttatatgaatttgataaaaataaattataatatttttatcatatgtaaaaaatgaaaattttaaatatataaaaaactctaaattgatgtgatatggttaaattaaaaatatgaaatatatatttttattaaaaaaagagagatttaaatattatttattttattataatttatttattttaaatatttttatttttaatatataataaataagtaaatatattttttagtacaaataaatttattatagtcttttaattaaaacagttttttctaaaaattgggttgtactaactttcgtttttagttgtagctttatcgtaaatttttcaataaattattttttatttaacgtccaaatgtgattttcactagcagtggttttatatttagtatataatagcatatataatagtatagatggaagcacggccggccctgaaacaaagtgggccacaaggaaaaaaaaaattgggccattatgttagaaaaaatgtggtatttttcaaaatcagtaaaaaaaatgtataattctaaagatgaaaaaaaaaattgagcccttgggctgggtgggccctaggcacaggccaagcccacctatgcacagggctgggcctcgatggaagaagaacataaaaataaaagtgtaataaaaacttgcattgtcataacctcactttgcatatggcatcatccctaaccttcaaaggacgattaggtcattatgctaactaaccattctcataaaatttctaaagagaaaatatgagaaaaaaagtagagaattttttttatataatttttttatattaaaaattatacaccttacaaattaaaaatgaactcctacttatagagtctaaaaaaaaataaaaaatataccatataaatagtcttgagttacaaagtactaataataataataacaataatnnnnnnnnnaataataataataataattctatagtaagtaatacagttattattactattactattatcattattatatagattaatattttgttgatcgatggaaaaggaaattgttgagagggagagtttgaattaataagtgtgtgattgatttatcatgtaatatgatgggtgttatgggagttggcgtgaggagatggaaaaggcagcaggaggctcacgtggtggagcagaggagaggaagggaacaacgggaaccaataggaaggcgccatgtggcgtgtggctggaggaaagaaaggccacacaggcgctgattgggacagtttggacgaatagaagggtgccgcttggatctgacggggcagacagactgggcctcttagatgggcttttctctttattttcttcttttccttttttctttttgggctccttttttaagctttgtcacttttttcttcatttaacaaaaacacaccttaattcctacaaagtaacaacaaattaaattgcaatcaaatatttttaatataaaaatatatcttatttatttcatgaaaatattaatttaaacttaatttattttaaactttaagatcataaaatatacattttttcaccattaatcatttttaaactgtttactaaatatatttttatcacaattttttcaaaaaataacttttaatttttttttaaaaaaaaatcaaagagtaatatatatctcttgaaaccgtgactttgataccatgataagaatcatcgaattctatctcaaaaccaattggtaatgagtaaaatagtgcatgttcttatatatggttcaatacatttacgtttaatccatgtgggacaatgttctcaaataattgagagtgtctcaacaaccttaaaatatttataaatacttttcaaactacataattaatttttcattcgagaaaaaaaaaaaaagaagaagaagattattatagtactctacataatccattattaagaaaaaattgagatgccttgacgaatctaaaaggattatttactggacattccatggatcaggattcaggacactaataaataattttataaatatatatatatatatatatttatacgtataggacaatatagagattcataactattgaacgtccgtagatataaattccattaatattaatttcaatccgttaataccatgataactggggtaccaatttgtcttacatacccaactagtctcaattatcaattaattaatcagtcgatattctttattaatattaccacatcaccgttggtcctatcacccacttttgtcctaatataacaatccgacttataggtaatgtctatgcttaattagttaagatgaaaaataagccaaatcatgaatattgttttggcttatttttcatgccatataacatttatacaaatatagcccaaactatagtcttatttgctgaacttattatagaagagaaaataatattataatttaaattaaaatcagcaaaatgtgtatatatataattaactcaatggaaataactaagctatcattgtggtcatgagctatgattatctttattctaggcatctccgtctcaaaaaatctttatatacagattctctctcaaaactcattactattattattatgaaattcagccatttgtatatataggcgaatctatctaaaatttcttattaataattctagctatagctagctaatgatcatgggagcttctctctgtggtttcaggagtttatcaaatagaccaatatccaataaccaagatgatcatgatcatcatggcaaatcttcagcaatcttggacttgatcaaacggccaggagggtgcttaaaatcatcagatgagaaggctgctaataaaaagaggacattgcactcatcaccatcatctctacaaattactcatgatgatgataataataatcagatgcagaagaatataagtagtactactactaataataataagttgattatgggaaagaacaagttgactactctagaggattggattttagcttctcctggcttaataaagacagaccaaaacagtagtactaataatattaataatggtggatcatcaggaggtagtggtgatcaacttcacgtattcaaaaagtcaagaaagatacatccttcttcaataactaataattcaacctcatcattatcatcttcatctcatgatcataaatattattcttccagaacaattactactactactactacatgctcttataaagcaaaggattcttccaagatgatgagccgaagtagaagtgggaagttgacaaagaaggtgagctttagggaagagcctgatatcatcatattttcctccccgccagaatcacaacttattcatatctaataatatatatatatatatatatataacaccaaggacgcgtacgtatacgtacatatatagtcccatgcacgtcacaatcttctatgaatatatatacaatatatatatatttgttatgaaatacgtacttaattacaataattaggctataaaggagcccaacgtttgcatcccattgcttatgatttcaaattctctacttgaaatgtctgttttgtgtctttcttattactgtagtttccgtgtaatatatagtatgtgttaattaagcagaagatgtatgtgctaataattataatgagattagatcatatttatatgggaaaaggttgattttattgccctgagcttattatctatcttgtagtacttttggataaaatttgctgataattatttgaagttaattagtgttctctagtacaaagaattctgttctttagttttattagatagatagtaataaagtaataacttgatcactatataaagttccaatataacaattattttccaaacaaaaaaggagctgaatacaccaaaaaaaaaagatcaaactttgataatctatgtccgattgatttgactctcatcaaccaggttatggttcaaaaagatgaaagtagtcaatgaaagaccttcggctctgaaaggtggatacaacaattattttacttttatgtagtcaagatatctagcaatttttcaaagttatctgtttttaaaagaaacatgcaattttctattattcaaaaaaggaaaaagattattggcattttcaaaacttttttaaattttatgttaaggtcctgcgtatgtagtctgtagactgtagtggagattattggcattgtgatagccgttttggaaatttcatgtgtgtaagactctgtaagttgttgttttgtgataattaatcaaatttgaggtacctactaaggtaaagagaaccaattaagtccgtatgtataatgaaagtacatagggtggcaataagtgttgacgtatcgtgttgaggttttaaattagtgaaacgaacacgtcttattgtaatacaaaaaaattaggaaaaaaaaaggaaaatacaaaaaaggaaaaaaaattacaaaaatactatgggccgacccattaaatatttatattttatacagtccacatacaaatat

SEQ ID NO: 14703 - DNA, 5082 bp, Cannabis sativa
agaattccatttctgaggtaagttccatctcatgcactgttattcctgttttggttacagatatttgactgtgttagtaattagattattgagttaagcttgatttcaatttcaaaattttagatccgatttatatgcaatgctgtcttataattattatttagaacaaatttgttttgttgagttattaattcttacaatgtgacaatgtcatagacgtaatcagttcctaaattgtatagataagcttttcatgtttcaattttgattatagacccaatttacacgcagtgtaacgtttattgttggtttttgatctgttttagatatggaatgaaaaaactcagagaaacgcatcattgttcaatggaagcaaatttcgggtatgcaaatttcttatggatatcaagtacaaaatactatattatgtaactattaaatcctatggaaatgaggttattcgtcaggcgaacaaagatttttggttgtgcattttaatttcttttccttatctgatttttcagtaatttatgaaatgaaacgttatttgatgccactgatagaaagtctgacattgtggaaacttaacaccttttataagatcatgagctattcacctccatctattctattttctaaaccactcttccaaattctaacaacaattcttcgtttacatacattgtgacaattgccaagttcgaaacctcgtaccaatatttggtcgagtaaaaacgaattccacctttttggttagatttaggtacaagatgcattacttttactagtgttattaagcaacagaattattagggcctcaattatgatattttttacccattggttgcagttcttatacttataatgtacctaaaacataggcatcatttggatgtatagtggtgtgcttaacttgtttttgaaatctttgtaattctatgtttgttcagttttgtaataattgtctcaatatccaccttgcaaacttacagtatggaggccatacactgtgcaatgcagatggatccattcaagagtctcatgtacgcctccacctgggtttgacagattatcggttggtcttgctctcactctcgaaaatgaaaatgaaaatgctcacatttagtagtgttgtattatatctgtttaaaccttttttctttcataaccaaaaaatatatataatctttatgtatattttccttttgagaacaaaaatcttggcttgtcaaggttgaattttcactaaaaagatttggtagcattttttccctttccttgatgcagttctctcaagttaacaagcatctattctccaattgctagacaggacgtttgttgggacaaacttgaattccttgtgggaaaggttcttggttacatcagaaggtatcccattatgctaaatgatcaaaaacattaaaaaaatactggagtttctttccccaattctttctctatactaacttttactttcatatttcatgaaacccacaaaggggcagtaactattgattgagtttgtgaccttcgaactttaagttatatctgaggtcgtcatgtgatctgtataaatcataaattggagctatatatcattagctgaaatgaataatcccaaaccgaaaaaaattaatataaaatagatcagctgagctcagctgtaggaacaccagttttatcaatataaaattcaagtttgtttcagatttatactgtatatatgaaaactaccagttatttgaatggtctactgatttactttgcttacttggattatattgatgggaaatgtcccatctgctcatctatatttgcctttcagatgactctgtacgttgtcggcacacctcaagtcctctaggtaatggtgccattattgagacctctgacaagaagatacttgtgttgaaacgaagtaacaacgttggagaatttcctggacactttgcttttcccggtggccatccagaggtattaaatctgatatacatatattagtatagatatttttttcatttctttgtagtttgatatttagtttctatcttcgatatatgtgggtgtggtttgatagattgcattcgtctgtatgttttggctgcatgtctatgcctggaattgtatccccagacagtctcaacactaattttcatatctgtaactttgttaatagcatctataagctttctttcatcctttttccaacatattactaattgtgtttttcggaaataacacttgacagcctgaagaagttggaatagaatgtcatcagcgtgaaaagaagttaatggattctgacattatcaacaagaaggtttctcaggaaatgtttgacagcattattcgtgaagttgttgaagaaactggtgtacctacgacatccctggtaagttttagcctttttgtctaaaatgaaacatgcctttattttaattttcctttctttctagttttttgtctacaacctacattaattgtactttattgctaatagataattatttctgttgttgattttatttttatccttgagatggtaagagtttcttccagtgaaaattttcaccataataatactgtatatgtcccgacccatccaaaccctttttttccccattgtattgcttgtgtcatcaacatatctcatatcaatcttaatgtaaaacctttattttcaacaaatgattttgatagataaaacctttatttcatgaaatctttgtcacgtcttaactggttagcttagtggcaataaaaaataaatcttgctaatgtacacatcaaaaacattattttataatcacacctacacgattcgggacagtagattccttttatcagatgtactttttagggcaatgcttaattcaagtctaatcaggatgagccctattgacaaacatttcaaatgatgatattcaacaaaagaagtgataattattttaaatatgatgaaatttatgacggtctttctcctagccaatgtaaacaagcagcatgacctagccactaggaggaatttcgcagccgtgtattacattagttcagtaatctgtactcatagataaattacttcgagtttgtattgatatctgcagatatgaaaaaatgggagtcaaatgacttttgataccagtaactaataatttacaaagtattgtaatcatgtcttatagtggactcttaggtatattttgctttcaataataagcctgtaattccaaaacaacaacaaacaaaccatagtgcctattttgtcacaccagctgaatggttatatggtctgtcccatacagcatgcttcgagtcacattcttcttgtttaatttacttgttgaaatgaatttcataaattgatgcttgaaacaaacacttgtccaagtctgaactttgcatcctaatgcagtgccagccggttttcattgggatatcccgcagggagttgaatgttagaccagctgcatttttcttcatcaaatgcactctcgactcgaatgaagtcaaagaattgtattctagtgctcaagatggctttgagtcaactcagctctatacagtctcaatggttagtttaagttgcaggaagacactattaactgatggatttcaaaattttttatatctagattatgaattcataaatttgttctaaaatcaggtggaattggaggatatgacatcgaaaatgcccggctgccatcacggtggatatgctctttataagttaatggtagaagcacagaagggtttctgaagagctgtaagcaacacttaggccggtcctatgttaatttgggccttagccaaaaataaaaattgaggcccagtgaaaaagtaaggttattgagagttgaactctcaactttttagttgtttaactaattaaattaccactaagctacaacacgtatttaacattaaaagtattattatttattttattactaactataattttaatttttttttcgaaatgagaccctgagtggtggggggtggccgcctctttcgtcttagctcagggctggccctgtactgagtttctggatatgcctttatttttatgaatatgaactttgtatgcactaataaattacccctgtttacactgtatgcttacaaatctggttacaaataaatatcataaactaattttcaaattgttaaaaattattcctcttctttataattatcattgtagatcatcattgtgttgcatttgaccaactataactcacccttattaatatatatgttccaaagcatgttatattatcatgctgagatttttatgattatctgtgtacttattgtgaatattatatttaatgtcacaataatgacgcttagtatattctaattattattattttgtaaggatattttaattatttttatctgaataaaataattacttgtcttaaaatgagtatagctcaaaagttattttgttgaaacgatgaccctttctttatgccgtgagatttatcactttctttcttctggaaagtcatctttatttgctaatttattataattaaggacaattgggttataagtatttaaagttttgagtttgtgagcggagttaatttaataattttttttatcgtatttagtaaaattgtactgtaattctcgttcagtttcgttagtacaggttttgttaggtggcgtttggttgagatgaatgaaaatataggaatgagaattggaacaggaatagcaataaaaaaattaataaaaaatttattgaattttttcaaatgaaatagtcattctactaaaatagtgggatgatattccaatattttaaaatgtaactaaacaaaagaatagaataaaaattgtttccattccacattagtgttttaaacatgacacatttaagaccaaaattctaaatcattgggtttgtgaggaaacatgtagtatgagttacatctatatcttttaatatatttaaaagggaatttgtattgacaaaacatgacgaaaattacagtttttattaatatttaataattatgtcgtttataaattcaaatttttaaatacttatgcccgcaattattg

SEQ ID NO: 14704 - DNA, 4172 bp, Cannabis sativa
gattggattggatcgactattttatgaacacccctaaaaaaattataatcactccataagtatatataaatatatctatgaaaaaaaaaaaaaaagcagtcaaaggcaaaaataactctcccctgtatatttattatttaggagttgagtaaagtagggttataaatagcttgagttccacgaatgcaaggccccttctttctcatcatgtccatcaccagatcattgttcttttgcttcgtacacaggccaggactctcttaattttgttggccccatagcaaacattttaaattaaattcaaaatatgtatacacttttttgtatttaattcttgtcctctccattttccattaccataattacattatttttcagttcatatttgttatttttacatttcatcaaaatattatttggcaaaaagtgaaagactagctagtaacaacaacaatttatgtagttactttgcaggcctatgggctggcagtgctaatactcaaccacataaaaatcagataagctacagtagtattaattaatataatataataaggtcttctcactataacttttacagcaaataaaaatattatctcaacaaaagaaaagtgagagcaataaaatgatgatgagacttgagagttggtgaaggagagcaattgtgtagagtaagtaaggtggcatatggcctatcaaaactggttattaataattaaaaaaaattaatatattaattagaaataaaataaaattttatttgatgcaggagaggaagactctataaggttgatgattaattgtcttctaccgattagccaccatgaccccatcccacgaccatttttatttttctttttgtataaaaaatggtaattaaatactgtgagacaaagaagaatatatattttcttgaattctatattaactttttgggttacaataacatttctttggttcaattcatgaggatagaaaatagagggatatagggaaaagggaggtgatgtgtgagtacgtacacataaagggtgaagctgaattcttccattccatttgtgtatagattaaagtgggttgttgttgggctttacagagaccacatgatgaaaagaagaggtgttcagtttacttggcttccttccttttattttggttcactattactccactgtctctcacacacactcatgctgctaacactagtattgactattccatctctttctctctcaatacttatatagatatatatatatgtgtgtgttgctttcttggtgcactaagaaccaaccctgtccccactactctactctccacgaatagacctacctagctaccacttcatgacacttcatatatgtgtattttataattgttaatacatataaacttgctttgactaccattaattgttattacgatttcattcatatatagatatagactatagtagtggtcactgactcagtactggttagtaacataaaccatagaataatattagtattctaagtcgtttagatccataggccagaaaagagaagttacttattatacttatatatataataataagacgtagtctatgatagctaaaatctcataacataatgattaatgcatgatactctagatttgttcaacctatagccaattttaggagaattaaattaatttttatcattttattattaaattgtcattgtatagagcaagactagcaaatatactcgaatatctcgatgagacattattgatacgagagaaaataagagagaacaggcctggggaatgaaaacagcccacaagagattttagtagtttcaagttgtgaaacattgttgatgagcccatactaatttaattatttgttgataaatttataaaagtcaaaaagctattttttaattatcagaagtttgtattttgctaaaataaggaataatgagatcaaaaaaatagtgacattgatcacctagaattagcaaactcttgaaattcatttctaatgaaaaagattgatacattaattccaattagtcctttaatagttattggatcattggctaaaataaaattttgtaacgttgtagggcaaactcttaacaggaatcaccattgaaatttctaatgaaaaagattgatacattactttatattataatcacatcatgttattgatggtgaagttaaagagaactaaaactcttttaacaggaatcaccattgaaatttctttgacctcttcatctacctgcaaattcaccaccgtttgagttgaatctgccatctttattgtttgaagagtgagagttgttgtaagaacctctacctcgaccacttgatgtgggagttttgcttgccatgtttacttgtggtgtaacaactgaaccaaatactttgtcagtgttggtgagagtttgaaacttctctattttgctatcaaagcttagcaaaatgtcttgaagttcttgccaagtggttttgggtcttgcctcaatctaaccacaatgggaacatattttgtatcaagaccagagagcacatttgcaactagatgtgcttctagataagggtcaccaactagagctagaatgtgtaaccaatttttcttttgcctcaagtactttgccattattgaagatctttttctcattatatctgtgttctataagatcatccatcttggcttgggagtatgaaatttcaccatacaatctttcaagggcttgacatagtccatctgttgtttttgacttcagtgacaatgaattcagtcatggagctgtataaccaactcatgaccagtctagtgctcaaattcaggattaattcaggtctagtttctccagtagcatcacctgcagtaatgaattcatcaagacataattgtgtaccattaagaaaaccatcaagtctatgagttctaacaacggttgaaaccattatttttcacaaggtgtaattattgcggtctaacttgagagcgagaatggttggttaagtatgctgaaatattattgtgagtaagggattttgagttgagattgattgttattgcggttattgacattgcccataacaacaaagcaatttgcaggagagcttgttgtttgggaaccagtggcagcaaggtcatttcaaggagtagtcatgagcttaggctttgtttggctctaataccaagatataatgaagaataagaaaggaaatgatgaaaaataattctcacctcattttgctaagaagttgaactcaatcatttataaaaaaaaatttactcaatgagaaaagtagttgttagactcaatacaactgtcatacaatacacaaaatacaaggagaatattctaaccataattcccaaatcattacaccataattcccaaatcttttagagcatcaccattggattcctagcagggcattgttaagaccgtagagcatttgggcttacttgtctcgctgacgatcaacgctgagttggcttgattctcaacatttacaaatgataagtagccagtgacactaaagacttgtatgaatgtaggccattacataccaacgctaacaaaaatttacagtgaggtctaacaccagttctcagttatagctcaatgggccatttcatagactatctctataaagcccattatgaaatttgaactgccatacccatttcacgtccatcgttaatgaattctcaaaaggcaatgataatttttaggggctgtggggtttactggaaagttcaccaaacaataccaccattggatggtgcaatggataagtggaagcggacgttgaaattcttcatattattggctctctttttaaaattttcttctttgttggggtaacatatgagattcgacaacgtgatattggtcttttgtcaaaagacaaaaagggttcactccaaagtcttataattctaaacccaatttttctttcgattggaatatcatatatcaacttgtccttttaacaagtcagcaaagaaaaaactacaatggaaaaaaagaaaaaagaaaagaaagatgaaaataataggttggtggaaactggaaagggataagcctaggagagaagcaatcagcttatggaagtactaggggcctttaattaggaagagaatagataaagacaagacgattttggcaggttcg

SEQ ID NO: 14705 - DNA, 6203 bp, Cannabis sativa
taccatttttaccttttttccaaaaataggaaagctagataacttttctttcaagtttgaatacacaaaataagaaaccatattaaagcataccagccaaaattaacatgaaataataaaatatttttgtccattaaatatgccaaaaatagaattaacaaatgtcaactccccaacggtaacagaagtagatctcaaccctaaacaagcagtaggcttaccagtgcttgaagaaccaccacttcgagcatcctaagacctccaaagataattaatggcacaagaactaaccacatatgctaaatacgccaacaaagagcaatacactcatctgataatccaataagagctgataaaagcaagaaacatcttttaaataatcaagatctttagcaaccttttgaacgaattaacttaagtgaagaacataaccaaagtacatgaatggtagtctcattattttgaaaacaaataggacaaaccttaaaaatatgaaaaccatgacaagtcaaattggcataggtcgacgaaaaatttgaaattattcttcaagtaaaattttttattttgggggaagattgaaccctcaaaagaagcttctaccaacgagaagaaccaaaaagagatgattcttgtcgccactccagactcgaaacagagccccaataaccactcttaacagtatacattccattatcttgtctttcaaacaaagaggagtagacaaaatagctctagccgccacagtgtcaaacatgttctgaataggagaaaaatttcatccaccagagtcaagtttaagatcactaattaaccagttgaaaattagggcccccttaaaagagtaagctcgacccacatggtcctttggtatccatgcatcttcccgtatcttgatagtatcaccttttccaaccaaccaacgataacattgcttccaaagatatcgatcccaaagaatgctttttctaaagaaaagaagcatgttttgtctcttcgacatcaagcaaggaaccactagaataataaaatcccttcatcactttcgctgctaaagaattaggatagttaaataatcgagcaacttgtttggcgagtaatgattgattaaaaaaaatatatcctggaagctcatacctccattatttttatgacaacacaagtgagaccagatatatatactaatgcatcttcttcttatcatcatcccttccccaccagaatctagcacacaattgatgaatctcgttgacgattttcatcggcaaacaaaacaaattcatagcataattacggatggcatgaatgatagactttaaaaggacttcgcattgtcattattattattgttgttgtttcacaacaatatatattaaaacaattattgtttttctagagaaaaaactatagttcgatcttaattatttttaattttatttgcagtaaaaattaatttttaattgactatattttgcacttatatctcttttctttttattattatttgaatatatattaatgtgctctagcatttctctagcaatatatataacacattaattattagtgtccaattttagcatttctttattttaataataataaaagatggatagtaaaagctatgtggtgttgttttcgttcaccactaaagattttaaaaaatttatgaataacaatatatatttgcccaatttagcattctaggggttgatatagctagcctagctaataggtataaattgggtatcaccaatattcatgttgtgtgtgtgtgttttttttacttccttaatataatatttaactgtcggtaacaatttttttttgagtcccattaagaaatagttatttattaattaattaggtagcatcatgtatattaattaattattaatgggttgagtaagtatgatttgtttgaagagaagtgtaattattcaaagaccacaccttcaacgttttcgagactcctcggagaattatatcaatctcattaattcatttttattattattataataataatattacatagtatatgaggttacatttatggctaaattattggtacttcctaccaaaataaaataaataattattagttattacgacccctgtttatatttattaattaatatatacatatcaaaaaataaactaataaacatatattgagttttgggaaaaagccaaaatttatggggccaacctaggaacttgttcaatccttgtctactatttcaatattattcaaaataataatttcatgtgtaaataatttgattaattaattgataataatatcattaattagtaatagtactagtgaagatcaagaagaatagtttaattatatatagcacctaacgtaattcatgggatgcctttgtattggggatatggtcattcttaattattaattactttgattattaattgccttaataaattattttggaaaaaaacaaaatcatattccaatccaaattgtatgtatattgcctgaaattcttttcatgtgatttgattcacgggaataatattgtacttcatcaagtactacagttattttattttaaattcatgtaagatcatatataggtgtttatgtgagtctataaagtaaaataaaaatcatgtttttttttaatatttgtacgtactaattgttaatttgtgtgaagttcgatgtttgaccaataaaattactcatgaagtagtttttttcttttgctgtaaaaacactcatgaactagttgtgtgtatacaattaagtgaatattgaacatatgtaaataaattgacaattttattattacatttttctttttatatatatattatacactgttattttaataaaatctttattaattgttgaaaaaatgtagattgcaaactatacactatgacttctacaattatatggaatttagacaaagaagaagataaagagtttaattaaaagctatgaagggactccgatacttaatgttaaaatgaagggtctagatgcattgaagaataaagatcaacgcaaattatgtattttcttgataagtatttgtggtccctttaaaataatgaaatatttttttttgttataggttaattgtattactttaaactttaaaaccaatacaaactaacaacacctataagaaagtctgaaatcatctatacttaaatctcctatacaagtatattattattggatgtaagaggtggacttgatccaagttgaagcagtagtgaagttgagcgtctagctagaaacgttaaattaagcactattgggaggcaactcaaattttaattcattcatatttcattttatttcaaggcatttcaagttttattttaattattttattgctaaaaacttggaaatatggtgagctacgggcaccacgcgacgccaactcagctcaccgcgacggagcttcaaccctatagatggggcctcaggtaagtccttctctcattgggttatttatcacatcggggacaatgtgaacttttatcaatttgagagagtggtttaattttacttttcccgtgtttgtttgtttgcttgcttgtttagcttagttttttttttaattgttgttgtttagtgtagtgtggttattaattaaactgatatctattatgctattattgttatttttgggatggattaaaaatgtgagccacgcgtttaattctttgactctttgaattaatttggatgcttattggaaattttatatagatgtaaattgttaatattaatttggattgtatcataaatgtactatcttggcttgcaaatgattgcttgaataggatataaattacatgagttattctcttgaggcgatcatctttgacaatgcttatttggaatatgatttaggaaattttctttagattgtttgagcatttcaaacctaccttgatgttattatccttcgtttatcaagtttgagcttaagcttgttttagaattttgtcacttaatttaaaacctataatgtatccattcactacttttatttccaatgcactttaaattatgccataagcttatgtttgaaaagtgggtgattctgaaaatgtgaaaattgtacagtgttctccaacatcactaagagaagaaaaaaaaaagaatatatatatatatatatatatataataattattgtgaatataagagggatgttggacacatagttgtaagcttctcaatcatagctattacattacaaccatgaaaacccttttgattccaagcaaggattgttgacattagtggagagaggtaagtcatgcaagtatatattaatcattgggttgtgaaaagtataacagagtagaattattatgatgttattcaaacaaaaaaagtttaatttgcatctatgcattgtttttgttcacaggtggcagcggaagtttgattgaaagggggcttatataattgtttgttagttcatgtgtttttttcttagtttttagccttactcgaagacgaataaggatttaatttgagggaattagttaactattttagcctatttttcagataacttttaagagttatttttcttctttgttgttatttttttgtacaattttatgtttgtttttctttattttaggttctcggaattttaaagtgtaaaattagttaactaagggacaagatgagttggaaatcaggaaaaaatcatgttgaatttatgaagcgtggtcgcgacaagtctatttttggtcacgactaattgttgtcgcgacgaggactagtgtggtagtggcaaggagctttggcagaattgatgtttttgactctctacagtagccgcgactagactacctatggtcgtagcaacaactttgtacgggtcaaggagatttttgtcttttcttgactttaagttgtaaaactaagttttagaagggaggttttgaatttttatggattcattcagagaagaagcttagaaaacaaaagaagaagactatgggagggagcgtggcgatccgatcgagttctccatctagtttctttctcttcgctttaatttcttatgttttattcttttttagactaatcatggatttgaatgttgagattataaactaattttccaatttaggaatatgataaatgtttgatgattttattctaaaagttaatgtgatttgttatttcttctttcttgattgtgtgatttattcatctttgtgcttattacatatgtttgcttggctaccttatgcatgatctataattgcaatacaaactcttaaaagtgagtactgagaatgctctaaatgaataatcatagatcttactgtcccacaaaattttttcaaaaataatgtctttttatataacaaccgtaaatcaacaaaacagaacaattaaaaacaacagtggaacaactaaaaaataacagtaaaacaacaatgaaaacttaacacagtacacagtacaaaaaaatatacagtatttttttaaaaaaaaaatcgtcccacaataaaaaaagaaaaaaagtaagaaattgtagtataaattaatgtaaaaattccaataaaatattaagcaaaattttaccacgtactagggtttagggtttagggcgatacatgttacgtacataaattctaatacagagacttagtatctggtcgatctattaaactaaccccttttgttatgaataaacaagagattcacagaaggagcagtaagatattcaagcatgaaaataacaaattaaccatgttacaaatgaatcagaaaaatgaaatagcagcagaaaaactgtaaagaaatgctggaaagagtaaatagcatatatacacaaagttttatccagatttggagcataaaggtctcctacatcccgcttggctttggccatcaaatccaatattgagtagagattacaaggtgtacataaactcattacacttacaagcttaattagtatgaagaacaactcttcttcctcactcacagctcaaatattctaatagaattactttgtgatcatttccttcctagatcgaatttagggaccaaatcttccatatgtacatacagccacatcagcaatgatttcagtgctaaataaagtttcaacatacactcagcagccacgtcatcaacacacaattgtcgaatcaccatattcctcacacctttgata

SEQ ID NO: 14706 - DNA, 3723 bp, Cannabis sativa
tcgttgtagtatagtggtaagtattcccgcctgtcacgcgggtgacccgggttcgatccccggcaacggcgtttcggtttgttttgcctttaatttaagaggatatgtcgtttttcacaaacgacaattattcaggtcaagtctttaaaaacgacaattttaagaaaagcaacatcttttcaataaacgacaatcatttcgtttactgacgacatcggttttcataaacgacaatctccgcctgtcacgcgggtgacccgggttcgaaccccggcaacggcgttttacttggttgtccttataaacgacttgtcgtttttcataaacgacaattattaacgacatttcgtcaataaacgataatattaagaaaaaacgacattgtttcaataaacgacaatcatatcgtttattaacgacatcggtttttataaacgacaatcttaacatgtttagtaaacgacaactatattataaaacgaaatgtcgttttttgtaaatgacaatatttaagaaaacacttatgccgtttatcacaaacgacaatcttaatctcaaacgatatgtcgtttagtaaacgatatcggttttcataaacaacaacctcaatttacaacgacacgtcatttatctctaaacgatatctctaagctaaaacgacataaagttttcacaaacgataatcttcaaccctctagatttttttttttgttaattgatgaaactaacagaaaagaggagaatagaagaaagcttgaatagagagagagaagagagagaaaaatgggtttgggaagaagtgagggaatggattccggtgaggctagctcgagcggaggtgaaatgggtcctaacacctccgaaccgttgattccacggagatttccgctggctgctcagccggaaatcatgagagctgccgagaaagatgaacagtacgcttcattcgtctacgatgcctgccgcgatgcttttagacaccttttcggtaattcaattcataatttgttcatataatcttgaaatttcggttctttgggctttttcagtatgtaaatctctgtaacttttacttgtataggtacaagagttgctgtagcttatcagaatgaggtttgttctttcttcttgccttaacttgaaattgctgaatttttgaactaaatcaattgggtttgttttattcttcttcaacagtacaaaattgtctgaaaaatgtaattttttgttggtgcctttcaactgttgaattcttgagataatggggtttttatttgttctttcattaacagttcaaatgtgtctgaaagttgaattctttaactaaatcaattgggttctgttaatttttagtctctttttcccatttatgccttttctaaatggtttagccattaacttgcagctgttgaattcttgaactgattgtgttttatttgttcttctttaacagttcaaaaatgtctgaaagttgaattgttgtacatgtactccatttctgcgtaaaagaatgagaataggaatagaataaaatctaaaatgcatgaaaacttcggaatggtcttgcattttatggtggaaaagcattcgaatgctttcaaatacaaccaaataaaagaatggaatgaaaatcaacggttattgtagacaacctaactgtttttatggttattgtagactaagctactggggcagatgctttattatgtgttgactactggttcagggcagcaaactctgggagaagagtactgtgacatcacccaggtttgtaaccttagtattggttttcccttttttcgggtgggattattatgcttgatcctgagttttatgttttccttacatttctgttatggttcttgtaacaggttgcaggacattacgggcttccaccaaccccggccaggcgtgcacttttcattgtttaccagaatgctattccttacattgccgagcgaattaggttcaatactgtgttttactcttttatttacttctttaaacacagtttcttaaagtaaaggcttctgaattttctatttcacagctcgagagttgcttctcgtggcattgttcttgcagattcactatctgaagatccctatggaagcaatagcgatcgtgttaattcatctacaatgatgattgatagttcatccacttctacttcagagcaatctgtttctgctttatcaaggttgaaacagaaattcaatcggttatggctctctggaattcaaagatggcctgtggtacttattcatattctaacttttaatcttgcaacttcatgttaattttaacatgtttgttttctttctaatatatccgtgctggtgttgtacttaggtgcttcctcttgctcgggaattcatgctactacttgttcgcgcaaacctcatgttcttttactttgaaggtaacactaatttattttcattcatgttcatcgcgagtggaattttgctcggttgtgttagatgttctaatttttgttgtcatacttctaatgtgtgcaggcctctattatcatatctctaaacgtgccgctggaattagttatgtctttattggaaaacctttaaatcaaaggcctaggtatgtatagagtttccgaaatcttcatccttctgtaaaacaaatatgtaactaatagatacgcttatctccctttctacagataccaaattttgggagtgtttttgctaattcagctatgtattatagctgctgaaggtctacgtcgtagcaatttgtcttcgattacaagttcagtccgtcaggcaacactcggagcccatcatgcctcaacaggttaaattaatgttggttatattactcaagttgttagtctcagtttctgaatgtcatcagccactaaaacccaaaaaaacactataaaaactttcttaatttcgaaccattctcaaatcctaggtgatcttactcgatgagtttacaggtggaggtttgcctattctaaacgaggaaggtaatttggtaacaaccgacactgataaaggaagttgggtaaacgattcgtcgtcaacttcagaggtatccttacttttaaataacggaatctaactatgtatgtattgaaatgaatttcttaatttggttcccttaacttatgcagtcgattagcaaatgcacgctttgcctaagtaatcgccagaacccgacagccacaccttgcggccatgtattctgctggtactaactgtcatctaattatctttctttgctttgatgccatacatattatataacctgtttgtttggtatgcaaatttgtaggagttgcattatggaatggtgcaatgaaaagcctgaatgccctctctgtcgaacccccataactcattcgagcctcgtttgcttgtaccactcggacttctagctcttgatcttttctattgcagcaaccctaagtagcggtctagtagtacgcatttgttccaaagttcgaatccccataaactcgtggggccactggaaggtttcccgatcgaactgccatcgccaaaaaaagaagaagagaacagatcttctgtactgcagcctcctgtcaagatagcattataatagaaattgtagcctaacaatttttatacaatttatactcatttattaataatattttagcaaattattcatattaactcttctccttgtttcttaatcatttttcttaagaaattcatgttatcattgaca

SEQ ID NO: 14707 - DNA, 4205 bp, Cannabis sativa
  modified_base (3947)..(3961): a, c, t, g, unknown or other
ccataacctattttcatgaattgtaagtcaaacttcaagaattcccgtcagtggccgactaatcaatgtcgatgacaaggaagacgaaaaaccaatctgtagatttcagccgtcatgaaaaaagaattcatattcactgttttcattggcgcaatatctgctgcagttggagcacttgatttctttggtcgggaggaagaagattaatttgttcgggtgttaggctcatgacttgttgaagcaatgccttctccatctcaggtgtcagctgcacaatgacaagaaaatgaatattatgagtaaaccagtgagaagaggatagaagcttttaacagttgagattgagaaagagagtattaccgatggggcccgaggaggctgatttccaggacccatctgaccatgaactactggcggatgtgcagaaagctgagttaatgctgaattttcgggtggagcaggcatccatgcagatcctctatccatttgcatcggatttccaccttggttgttgaattctgctcccataggcatgtttcctccctgaaaacacaaacagaaaggttaatttagaatttcaacttgtttttattactcagcaattttccataaccgggaattgtctttctgaaaatagaaaactaattacgatctttttctcagaactttgacatctactaaacggtgccccttcaacttttcaggtcattaaaaatctcctccgaacggttgggattgttggattcaaggatttccatccaattttgttaacaaacttacatagatgaaagttcagggggcacgatttttgtcccccgttgacatgtactaaattgtaaccctgaacttttcaggccgttaaaagtcacagcagcatcgaaagggtatgccattccaacatcaccgaatgtttctaatcgaattaaagtcattactaacaaatgaaggcaatacctgatacatcgactgtggaggtggctgactttgatgtggatgctgcggatgtgaaaatgaaggcccaacattgcccggaggcttattacctgactaaaaaaataacaaaaattagtctgaacacattatcttgatgatatgctctatataactacaaccgaataataatcctccgcttacatgaaacatgggctgtgaatgatgctgtggaggaggaccaccatgttgatacccccccatatgaggaggatactgatgttggaaattccccattgaatgcggtcttggttgtggtggcaaaggcggttgtaaaggcaaatgagagattccacctgcctgcatagattgttgttgcaatggacccgaaggtgtagacatttgggattgatgaagaggaggttgctgtgaagaagaatggtgaggatgagaaggtaaatttggaagcggaagagatgatggtgtagcctggggatgcgagtgtactttaggaggctgtggtgtttgcataggatgtataggtgtaggctgaggaggctgaatatgtacagaaggaagtgcgggagttgagatagccacgggtggctgattctgaggttgcatccgtgcaggagtctgcatctgagacgaaccagcttggtccttaggacccacttgaactgacaatgactgagaagcctgaatattagactgctgagaaatttgtgttggttgctgagaatgctgcggtggtggttgctcaattttcggaatctgaacacaaatatcgcatttacacaagtagatcattagaaactctcaaaggtcaaagccttgtcattaaaaagaaacaaaatttgacaataatataccgcttgaggtggctgcaccattccgagcattatctgtgcctggacaagaaatatgaaacgaacgtaatcagtcaccccatttaagaagtagttgataaatactttgttcctcaatatacaacaggccatttaaatcacgatcaagctactaaaagttatgctaatatctagtagtacactactaaataccttttagcttacaagatttccagatttcaattctatccccaaataaaattgcttaaaaagaattcagaatgaaaatatttaaagaaaagaaagcattgaaacagttcaagaagacacaaaatctggtctttaaattgacaaagtaaaattagttttcttaaatgatgcaatcggaggatgtgaaactgttaattgtttgtccgtctaacaatttagagttggaaagtgaattatgatgccacgagttgcataaacaaactctgacgggagatactctgtatggaaaaataacagtcttaactagacaatagaattacattgtgtttttccaattgtaactaactaaaagtggcaaagatcgatgacgactacaacacactggattgatgtatacggtataaaaggctctacacttctctcttatttttaaacatattttatgagatgataacttgaaccagtagtagatgcaactgtgctgtaaaaaattcacaagttttccctaaagagatatcgaccgagtgccaaaatttccaatcaccactgtcatttaaacaaggaaaagcacaaccaaacagtaacattatcacagagcaacaaagtaaagcacagaacagtttgacaatccgaaattgttcgccattgggcacaaaaacaatcataattcccttaaattgaagactaaatcattccctatatgattgtaactcattatcagaatcatttttctcaaagtttctcacaatattctcatatgaaaccaccaacgaattatacattcaacttaacttataggccccagtaaagaatctgtcagctaattcatcgaaacacagttgaatttcataaccacaagccctaatttccataacatgacataacaacagattaaaagacttacaaaaccataaaaaaaaaaaggaacgtcaaaactcaatccccataaaaacaaaccctaattgcaacaaacttctcaattaaacaaaaaaaaaacccatcaaatttcaccaaagttcaattcttttacccaagaaactcaaaaaaaacagaaaatttcactgattggaaacctgaaaaagagctttggtaagaagcgggttctgaataaggatttgtctagcttgttgctggttctgctcaatcaatgtctacataaagagaacaaaaacattcaatccaagagaacaaaaatcaaaactttcattacgctaggtttagtagtagcgagtgaatcagtgtttggaaaatgagaaaatgaagaaaaagaaaaaagagaaaaccttcatctgagacatgatatcatagagctgtgatttggtcattccagcaagattggatggtaagccatcgcctgagatttgcctccccgccattgtcaatgtcgccactcaccggcgagagagaagagaatccgaaagagagctttttttgtggttattcgttcgaatacgaaccagagattctgcgaccgataagggcctcctctaatgggccttattatgggctttttaaagcccaccaatactaaaccgacgataacacgactcgaaactcgaactttcgtattagggtatgtaatgtaattttttcaattttatccatatggaaggggcagcaaaataggatgataacacgactcgaaataagattcggctctaaaaataggtagattaggcctgtgtctacaatccactaatttcgaggcctgaaaatatctatttttttttaattatatattttattaatcttgaaatatattatatttttttatctaaataagaaatttacataaaagttagtaaatttgagttcaccttaaatggattcgagttatttttgggttgacccatttaatacatttaataagggatttttacaaaaatactgggtttttggtcaaaatttataattttattgatacacagaattttttacaaaaatactatttttttatannnnnnnnnnnnnnnaacaaaacagaacaattaaaaaaaacagtaaaacaactaaaaaaataaccgtaaaacaacagtaaaaacttaacacagtacacagtatgaaacttacacagtatttttgaaaaaaattctgtcccacagtataaaagtaaaaaagtaaaaaattttagtatgtggtgcaattattcctttaataaattgatcgtgttcgagcgggagaataaaaaaaaagaatgagcattttgggtattcgaat

SEQ ID NO: 14708 - DNA, 7198 bp, Cannabis sativa
ataccatataaattggtcaaactttaatgtgtcatatttatcataagaacttttaaaatcccatagtaagtgtaatttcctcttgttaataatacaataatctttgattattaaggatcctatttctttcaagtcaaaaaaggaaaattgaagaaggtagaaggggttattgtttctttctatagtattagattaactaaataatttaattataaggtagtacttattgattggtggtgtttttttgttggcacgttttaagaattttagggttggttgagcaagcattatagggttagtttggtatggtgtaacactatattcagataaaataatactacattaattattaaaattttaatacaacgtaagttgtattatttaatacataacaaatgatatgtattagcttgtattataatatttataaagaatttgggatcaactccaatctgtgacctggatccagggatccgaactcggacttaggatctcgatacgaactcgagacccgaatctcgaatccgagcacagacctgaaccttgaacctggatccaaacctgggcacggacccggatctgacctggagtcggtgttaaagtcgagtttattaaaaatatactatcattttacataaattattaatacaacttaccaaatatactattatattaaataatactaacacaatataataaaatagggcatacaaactgatagtattttgcaaaatgttggagtggtgtatattggactagataagttaatgtttggttaaattaaactatccttagctttaaacttagtcaacccaggctgaaccccatactcaagcatactaaaacgtaatgtttctcttaatgtgtcacatcacattaatatgttttataaagtagttaatgcttaatttatttttacttttccgagaaaacccacaaaacctttcttacaactataataaaactatatttacgatatgagatgatattattgaggtaggtaggttatttgattttacaaggatgaagactagtgtaaaaattgtgatatatgggatacatttgtatcaatttagtattgtgccacaatcgcaaaatttgatgtttagttaatatttttatttaaaatataaaaaataataattttattgtataaaataataaaaaataaatgtaaaatatttataatttaatgacataactaaatttaataataaaatattaatattataaaataaatataaaagtagtacaattttcatttctactattttcccacttccttagtcgcttgtgttataaaaagtttctttctaccatagcaataaaaagtttgggaaggtttcttccaagaagagatgctcttatgtttgaaaaaatattttatgggacaaggagttatttggtcttggtgctatttggagggtcaataatggtaactttatctcaatttacaatgatcattagctcttgttgaactcgaagctcatcacttctccgccttctttcttaggaatagaggcaatggtgtcctcattgggcaactcgcatgatggttgggacactggccttattcgacgttctcatttgataaagcttgtgccattttttccataccttggcctatgggcaatgtgtggctgataaacttgtttgggagcataagagacgtggcttttattcaattaaaagtggttattggtttgccattcgatatgtcactgaaaacattgcatcttctttctctaataattctacttggtagtatcttctccggagtcttcatttacctgctaaggtcaaaagttttgtgtgaaggtcgcctttaaattgcatccctactatgatcaatctccaaaagcatggcctcctcaatggtaatttgtgtttggtgtgctctttactacttttcatgctcttcggggttgtaacaatctcgcttcaattcaaaaactctacacttccaagcttggtgatccttcttaagtgacatttatggcttaatttgcaatgccatccaacatcttctccaaagaaatattgaattaattcttgtcaccaggtggcacatttggtattatcgtaacaagtttgtgcatgataaggtcaccattcttccagaattagtatgtccttgggtgactaatttttttcacccttatcatcaagaaaacagctgggttactcccctttgtccaattgttcctgcttgccagcttttagagctccccccttttcggactcctccagcaaccacggtcctcaaagccaatatcgatgttgtcctcgatgttaatagtacctcttgtggcctcggattggtctttcgagatttgaatggggcgatatttgcgttggtagcgtgaaaatgtgagtcttttcctcaacacgagtaggcataggcgcttgctattagacaagcggcttcgcaattcatatctattagaattcacatccatttcggatctgattgccatggtttggttcataaaattaatatgcctatagtcttagatttgtctttgaatttaattcttgatgatattagagtttttcttgtaaacattttaatattgtgagttttactttttgtcccaaaactgtcaatatagtagctgatactcttgttaaatttgcctcaacatctactacaaatacagtctagtggcctagttatccaagttgtatttagaaccttattttgcttgaggccattgatcaatgaatttcctagctcttgacccttgctctttgtattttggtggtgttctccaaggctattttttcaacaaaaaaaaaaaatgcatttattgtgatgcagattttacatatgtcatattatatcatgatccaaagttgaattaacttttggtatgtgacaatttacatcaatttttggtaatagatcaccaatttagtgaaagtactttcaagtgctttatttttttttaagcaaaagtagtaattctacctttaattcgtctaatctccttgttttacctttaattcttatgtcgtctaatatcttctttttacctttaattcttatcattaaaaaataataagatattttttaatctctacaactaacaattagagccataaaatttatcaattctacataggtctttcttgcttaaaaaaattgcatttattaatttagtccaatctaataagaaaattacattaaattaaatggaaattttatttgcactctaaaaacttatagatatacctaattttaataatttttattttacataaaatatatatttttaattatgttagtttttttttaaaaaaaaaaaaattctttcaattcatattcttaaaaaatatacttatcaaataaaaataaattatatttaaaatattataacaaaaaataataagtgaaattttattagaaaaaaaaaagcattatatagtttataaaaaaataataaaaataaagttaaaataagtcatgaaacaaaataatataagaaaaaatatatatattaagagtgatttttaaaaaattaatttaaactcaatttttttaaaatattaagatatacttattattattttatataatacaaataaaatttctataaattaaagtgcttcatttagttttataatctggctgtgatggcaaaacaattataagactacatagactaatcaattccattccaaaccaagaaagtagaaatttcataccaatctaataatcttaatgaagatacaatacaaccgtgcggataagttggtcggtagaatgaagtagtattaactattaagatgtctttaggaatgggattgatgatgtaactaatcaaaagtattaattaaatatgttatctaaaaataaaaaagtatgaaatatgtttgtattttaagttgctcttacgtagatatgcggcacttttgagatttatacatatttgttataaagtcaacatcatatttaatcaactaaaataatgaataaaatgctcatcatctcacatattattatattatagagccagggacaattcacttatttttttttaaaaaaaaaatgcaccaaaccaaatagttaccaactgaatattcacatgagcatattcggcaactctctaattaattaatttgtagcatttaacttgtactaaaaagaaaaaagtgtattgttgcggagcattctattatgggaggtcgtaaagtatacgattaagataaaattaaattttaaagcctcatttaattattattaaaataatagtttgagtattttagtgtaaagcttttaaaaactcttaagaattctaaaattcaatcctttatacttacacattaaatatatatatatatatataaccattgaatagtcacccatatatatatatattttttaaaataaaaatgtaaagattaaaaatttattttagcttaaagtaatactctttaccactacactaaataatatttgttatattttcttaatatttaatattttatctttatattaatattttttaatcacatttcgggggcccgggacgcacacctgacttgcctactcttaaggtgggccctacttgacactacaaaaaatgtcacttttaccagtacagttcgctactgtgttagtactgcgctggtaaaaaggtcaaagttttaccaacgcacatttgcagtggctaaaatttaacttttaccagtgcatttacgcattgggaaaagtcatttttaccaacgctttttattttgtgctgacaaaagtaacattttttgtagtgtgaccctttatagtccattactcttgggcagggcatagcggctttgactcttgttcaagttgtacattattaaagttagagagagagagagttatttattaaaaaatatttgagaaatactaaaaggtcatagtgatgcctcatatcctctaagatgttgcagaaatatttaacatacacagaaactgtttgaatagaaacttaataagttaaatagtttataatagaagataaaaataaacataaaataaagaacactctaaattatgtggtataagtaatatgctcgaggtcatgctcagagaataaaagttatacaattacaaaactaaattgacttatataaataaagactctttcttgaatttgccgcaactgttgtaatctaaactcctaatcaaaattttgaagtgctaaaatcttgaactctttcaaatcataacacttgcactctagaatgacttgcaagcaagacttctcctgaaacttgatgaacaacatccaagtgtatataacctgcacaattattataagaaaaataatacagaagcacactataataaaacactaagaatttactagactcaaattctttacacaataaagttctctctaaaaacttcaaaaatatttagagaataatactacaggaaagatgatcaaaactatagttgtaaatatgtgtgtgtcgagccaacccataaaaagatatggattgtgtcgtatcgtgctaatatttaaaagtaagcccgacacggctcgtaaatccatattttcgtgccatactttactcgggttggttcattttcacaaatgggtcatcaacccgttttcttataagcgctcgaattcagactctacttttttactattttttttatataattaatgagttaatcactaaattatatatgtttttttttatagttttaattgtttttatataattttttaataatattttacacatagttatataaaaaacttaattaaaataattaaaatttgaatatttattattattattattactattattattatcatcaaattataagaatttttaatgttttgtgcttttggattagtctattcatacttatgtgtcgtgtcttcgggtttgttgtgatgcgttgttcttaagtagattttttttatatcgtgtcatgccaatttacaacatcatgtcatgttgtgctcaaatgtatattttttcgtgtcgagttgtgcccgtactaattttatgtcatgtcaaaaatcttaactcgtatatacagctttaataagaatcaatgacctaaggatgtccttatacactctaagacaccttagatcgtggaaaaaaataaaaaaaaaatgaaacaatcacaaagcaaatgcaaaatattttctgttaaatagattcaataaactttaatagtttaagcaaaattttttaagtaaggaaatagtatactcatttactccacaaggtaggcacgaggtttggacgagatatatgatcaagaaattcacattcaataaacaaattttctataattataaatatcaaaatattatacactttatataaaaaaaatcaatttatttatttacataaatagaatattattataatattttcaatacgcaagtatacgtattgttaacaagtaatagactcacaaaaagtaaagtcgatcccacaatgattgtaattaagcactaattaaacttttacttctatttagttattcaaatttaagaaaaattagaactagactttaatgcaataaaaacaagcaagtaaattaatatgtaaattaacaatgattgaagattagaataattgatacccacttttcagatttcgtatcaaaattatagacaattaattaatgacagagcaattaaaactaattgagtataataaaataaaatacatagaaaattaggagaaaatttattcacattaaatagatgtcaaacaatatccatcaaactcctaataaactgtttagctactcttgtttaagggagttaattggaccacatccaatgattttaggcctatccagatccgatccaattatatattggatgatcactactacaaaagtcagaatttgcgacggtcctaaaaatattttttttggaggctgtcgctaaaaaaattaagtaactgtttaaaaccgtcgagaaaaattagtattccatacggtttacaacagtaattacaggaatatgcgacagttttaactggaattcgtaaaatttattggcccttataggcgacgattttaaaccgtcgggtataagagcccaataaaaaactattacctacttctcgccacatttgccacgtgcccacctacttattttctatttcccacatgcccacctattttttcttcatttcccacaccttaaaacgaaaatcttaactc

SEQ ID NO: 14709 - DNA, 9645 bp, Cannabis sativa
aaaaaaaaaaaaaaaacagactttgacgaaggagagcttcagtagaacaactatggcgaattggatctcttccaaactcaaagctgcagaaagcattcttcagcaggtcaatttctcttttccttcttctttcttaaatcaaaaaatttaagaaaatgaaattattttgttattattttcctgtttggttcccgagaaagcacgggaaactagagagaaagctgtttaattctggttccaataggagttgatctgtcatttgattgtatgtttattttgtaattttgaaatgtgtgattcagattgatcagaaaactgcggattcgctcaagaaaaatgagaaatcccaaattgacgaactgaatttcgatagtgaaaccaaaaccggagctagtttgcctctaaaggaccaattcaagaagaaaactcaggtaaacagtgattttcatggaacattacgtagtgatccgactagtcttaagagtcttagtgttagtaatagcaagaatgagagttcgagttcacctaaagaggttttggataatactacgaaacctaaaacaactcttagcgatagtgattggactcaactccttagtactccaaatccgcctacaacaacatctggttcctccagtcgtggtaatggacattctgctattcgaggtttgaggaaagatgggaggcggtatggtggtgctgctccggtttcagctggatcagaggttaggaggcatcagaagaatagtaagagtgtttcgaagccggttaggagaacaagtagtgtggaagaacacaagttgaatgggaaagccagtgatggagatgatcccgggttttctgattcgacaatgagatcttccaatgctaaggtggagagtgatgatggtggtagtaagatttctgaaaagcaagaagttgataagggaaatgaagaaagtaatagaatttcgagtttgaagacatctttgctatcagtaaatgaaaaccgtattgctcaatctgaaatggtgtcaactgtggagaaagttgatatggaaatggggagttctgtaacgaggaaacatgattctagtaatgtagcttcgagaagctctacatctgatgatctaaagaaaagtacttcttcaatgagttatgagagctctgattctagatcggattctggttcgagttctgattctgaagatgaacgggaaagagaagaaaggagaaggagaagagaaaagattttagctgaaaaggctgcagctaaagctggggaagctatcaaggaacgggaaaatatggttgccagattggaaggagagaagcaaagcttagagaagatacttgaagaacaaaccaaacagcaagcacaggaggtaaaattttcctggtttttttgttgataatttttcttttaatagaaacaaacattttattaatatggagaaaatacaaggaaattatatggtgtaaaacccacaataacagaggaaaaaagactaggattttacaacagacaattttaatatttgcaccatatagagaagattaggttgcatcgatattcttaatattggcacctgattatgttgatgaggttcgtttgaataatttattagaatggtatttggggaagaatttgatattattgtatgtactagtgtgaagcataaagcattgctgtcttatgaaaaaggtattctgcatcataatacaagctattttttgaaatactttgtgcatttttagcattgctagcccaaacattgattcaaaatgttttgtttgaaacttgtcaaacattgattcaaaagttttgcattcactctgtacttctttttctttttcatcgtctaggcttcgaagctgcaattaactatgatggagacaatggaagctgttgagttagagaagcaaaaacataataatacaagaatggaagtcttagctcgattggctaaacttgaggtattagaaattgttttgcctgctaaatttatgcattcttttcttcaataaaatgcatctaaattgtcatatttttcacttcttttgctatttttggcaattgattctttataaagtttaggcaacacatatatttttgttgactttgttgttagtggttactaaaggtgaaaagtgttgcagactgcgaatgcagacctcgccagatctcttgccaatgtgcagtggaatcttgaagtagaggtatgattaagatgcttaactaattttcctttcaaacctgtcatgttatttcatttgttctgagcaataaaaataaactagtatgaattttttttgaaggtttgagattgtatgtatgggatgtgagaaggtttttgactcacacaaggacatttatttgtatattaatcttataaagcttttagtaaattatagaactattgtagaacaagtgcaaataacaagtttattatttattaattcacatttatttattgcaatttctttagtttcagtaaataatgtaccagtaaataaataaacacggtaatctttaaatcatcccgatcgttttatttgtgcattcactaattaatcgcacatactcgacaatttcaataggctaatgaagtggctgaaattcgacagcaaatcgagttgaaggaagtgaacaatgaaggtatgatctgttttataataaaataataaataaaagcaatatggtgtggtagctgcatcttttttcagttgaaaaatagtaagagtagaaatgatcaagtaataaccattaggtgaggatttggttttctttttctttacccattggttcggtgtaatttgttgtttcatttacaagtacaatttcacttattctaccttcttgtgtggttttccgacatcaaacaaacttctagcttccctttctatgagaattccgttatgtaatacacaatttcacttatgctgatatcaattgtttttcctcaaagttggcttataaacgccctataacatataatttcattatctccttgtagaactccaaagaaagatttctagaagtcattggaccgggacatctttgaagaaagtaagtcggattttgcttgtcaagatattttgataacttggttgtgttaaaagatggctaatcttccatcactttttgtatgaaatggttttgtagtccttaacatgacaatttaaaaattgcagcttgcagcctcaaaaggagttgaacttgagatactggaggcagagtactcttttgtgattgataaaattggaaagttacaaaataaggtttggatttcatgtttgtttgttattcactttcttatgtgcatatgtctaattgttacagattgtgattcattgttctatttttggttttttttctatttgcttgctatgctgaaaatggtttttcataactattatgtccttgcattttctcggaaacctctcatgtatgagtttgtgtttgtggctatggttttggttccacacctggcttttccgaatgtggttattccttttatactatatttttcggaattggattctttatcgacaacagcattgttaataaaacgattgtgtttttcaggcaaagcagctggagctaaatattgacatgactaggagagaattggaggaaccgacagaagtcgaggttgagctaaaacgcaggcttaaccagatgaccgaccatttaattcagaaacaagcacaggttttacactttaatcatatacttgttttcaattcaatcccataaaagatataaaagtagttattgcaactgaatcaaaattaaatccaagatggatctcattaatttgcaaaaaatcttatatttatatttggcttcaaccaggttgaggctctttcttcagaaaaggctacaattctattcagaattgaggtatattactcttttctatacaaagccagctaataacttgaaccgaaattcagaagaaactcggtataatctgtgatcgtgtttgtgtatccttcaggcagtttcaaagatgctcgaagaaaacaaatcaatggcagatttctccagttcatcatcatcgagggacttagaatcgggacaatgggagctctcggattcaaagttgaagcctctaatcgaagacaaaatccgttcaagcaagaagcatttgtattcattggtacaacagttcgatgctatattcttggcgggagcggtgttcttgaagaggaatccaaccgcgaaaatgtggtcgttggtttaccttgtgtgtctacacttgtgggtcatctacgttctcatgttgcattctcaaccgtcggatgagtcggtatctgctgttgttttttcgttggaaaatatcaacaaaacttcggctttataatttgttgagtttaatttcgttgagagttagttagtattcattgtacaatacatctacttatttgtgtatcaatcaaaagtatatattaataagattggattgaatatagtgttttgtaaagaaaaagaaaagaaaaaaaaaactaactttttattattttatttgaattggaaaaaataaagaagccaacaagattttgttatctttttcaaattttacctccgaatgcttaaaaacattttttaaaaaaaataaaacaaatcaattttgaagaaatttttttatgaaaagcaaataatgaaaatttaataaaatgtacgagtgacaattcagtgagattttacaagttcaacatgacacgaaaattataaagattgtgtttgtgctttataaattttttgtgtcacagatcatcttcatatcaaccatttaaaataaatttaaaaatttcaaacaatacgattaacactaaaaataacaatttaacttacaatccccaacatgacatgagattttgagagttcaacacgacatgaaatttatttgaattgtgtttgtattttataaatttttcacgttacgagttatgtttgtgtcaataattttaagacacgccaccacgtatagtcacccataataaaattgtttgttcagttatttcaaatataatcaatgagtattataatttgggcatcacattttttctttttttcttcaattaaccaattacatttatttcaaatagactcactactttatgagtaatgttttaggcattacatatattgttgctcataattttattttattttcaaagcatactataaagtgccaaacaaatgcctaaggtccacatttttctatttttctttcaaaaaaaaaaataatttttctccttggcaaacaaatagagattgaattgtattattttatgacatgtcaattgtgtccaccaaaggcttattacatttacatcatagaatgaattatattagctgcacatatcaaactcttttttctttctttctttcttttttatgtggttgaatgatcttaaattctagtatagtatcatatccacaatgaatttggtgattcaaagccaaataaagcattaaattgtacaataaatccatccatactcatcttcaatccatcttcttccatagcatttctataaaataatgcccaaaatgaaattcaggaacaataatgaagatgagaaaagccaattgataatttagttgggattggaatagtgaacaaaaaagaaaagcaattatctcattctcatccatatatttttctattatatgaatgtagaagtcaaataaatgttttacaagtgcaaaatctgcatgtaacagcctacataatacaattttacagtgaggtttttcatggtgttcatatttttaatagaattttatgaactcacaagtttagtagccctgcatgatgagcgagaatagcagcgaccgaagaggaggagaaaacttctcttgaaccgcgatgataggacgaagcctatacatttgttggggcagtggaaattgagggctgaaatgaaaaataataatgttaaagacactcagtttcttctttcataatcactagaaacagatatagtaaatcacagaaggagaagacatgaaaaaagatgaagttaacctaagttttcttacaggtcctcctgtatatcgagccacattttcgaacttcttatgtgaagattccaacagaagaccgaatcccccaccgtaagaaaatctaaggacaggcattggtcaaggttccagttatcatgacagacgaaaaaacaataaattgctacaaatgttggaattttgttaagaaaatataatctctaatgtaaagatatatgatagatatatctcagaaagctttcattaaaccagcttaataacattcttaatacacacatagttcgtcttattaaaccttattatattgtatagtattatagtaaattgagttttatatcatattttacataatactatgttatattttgatttatgtcaaaagattatatatttatatgcatatacaaatcaataccaaacatgctattaatcaatacaatgtaatacggtgtaccaaacgaacccataaaatattaaaaaacacaattactttagacatgaatttcattgcaacttagcagactcaccacaatatatagtatggctttaagctagtatttaggcacaaaagtgaaaagactaaagacaaacataagacagcatgtagtaaaactagtttcaagcacaaaaacctgaaaatttttcaagaaagtgttcaaggggttgatagtaaaattcttacatataaaaatgtcaactagtagtgacaacatgatgatacaagaaattaaaaagattcaattgaggcaaaaattgtattgacttgttcttctggatatctaataaagataaaagctcacctttaagcaaaatatataactcagcgtcttttcgaatgaaaattgttgtgcagagccatcaattgttcaagagataccaaagaccaagcttcctcagtttgagcatataatctttgatttagagagtccactataatacttacattcccaaagccaaatatttggtgaccattgtgcattctaccatgttttggtttaaaaagtaagccctgttgttgtgcataggcctcaacaacttctttcatgctcaactcagggccatccatactacttgtgccaccaaagcttgcagccgcagcagcttgttgtgcagcagctttttgctgagcttcaaactgtctttgctcgagagctcgaagatagcttagattttcctttaaacctggttggactacttccataccttcaacagccctattcatcatatctagaccacagttaatctgagaccgaatattctcattagataaaagctccttgggaataagttctttccaacccaaaaaccactttgtaacctcttcaaagttcgggtttgaacaaagccaatgatacaaaacctgtagccactgtggaaagaaaaacttctccagcatatcaaccataagatgaataggtataacagaagcccactttatgacccaatcaaactgatcaagctgcttttgattagcagggttcacctggaactcttgtaggataagctgtaatttgggaactataaatctacgcatcatttgttcccaactgattgaatcaaaaacaaatttccaaggtgatagtaaaataaaagcagaaccatcactaggatgccaagcaccaagaacattactcaatttggagcgtattgtttgataaacatcctccaacttgtgtcccaacaatggcagccatggatgcacccagacatggatacaaacagtctcccggtgtggctcccatgagtccacagcgctccttaatttcggcataactacatcatccaatatggtatctagaactgatgaaggcaacagcttctcccaagagtcaataaatccaagcattggttcagggtgcctagcttgccaagtattgacagcggagattctcactgcaggcaccacaacctcgaaaatcagctgagaatatggagaagccgagtcccatatatccaatgattctgctccttgaagcaaagccttccaagcagataccatctctaaaccatgagacgggttccgaagagggtcccaaccttgaaacaccctgataaacaaaggcaaagcaaacgagcaagcaatagacgacaaattacacagcttatactcttcagcgtatcttctttgtaaatcactaaagcactgtgcaagtgaatccagagttaagattcccatagaattctcttctccaattctgtccaacacacccatgatctcctccatgctatctaattgtttcttctgtcttgcagcctcaacttctaatctttccttctcatctttcaaagccattgctgtatccctctccatcctcaaatccctatcaatcttctgaatatcaagctcagttaaatccactatcaacctcacattatgctgaagctcaggcatgggaatatcctcttccttagatcgttcttcagcattcaaattctctaaattcgtcacaacacgaacctgaggaccacgcatatccaacaccctctgaacaacaacctcaccaccaccttgctgctcctgctttttagcaagcaattcctcagctgtaatgtaatcaagattcttcttttgtttagctagagcccgtttcgaccaaagcttttccttagagggttgagttgaagaacccaaagacacaacagccataggcttaggcttagtcaattcctctaaagttggaactttctcagcctccttgtaatcattatatcccattcccatattcttaggcctcaatttagcttcaattggtgcaacaataccttgctcattcttcccaagaccacctcctttataccccattttctcaagtaacttcatcccaatacctttagtatgtttctcaaaaaccccaacattcccaacaccatcagattggcgtttaccactctggtgaaattgttgttgagaattaccatcattctgttgaagcaacttaagcctcttctgttgttgtctttctttctctctcctctgagcaccttccattatcttcctcccaaaagcagtgggtaaaaagctctcaccttcatcctccttatcaactccttcaacagtagaagaagacccaaaacccagaccaagaccgggtcttgaagcaatactatcgtcattattagtatcaatagcttctttagagttattctcaatctcttgggtaggcataactgtaccagtggatacgaaattcacaggctttgagagattattagactgattacgatccttacctcgacgctgctttcttggataatcatcatcatcgtcatcgtcgtcatcatcggcaaagacaccgtaaagagcatcgtctttggtctgagtaggtttttccttgcgctttcggtagtagaattcgcccccaatccattgagcatcttcgaaatcgttgtccatcccgaatttctccatctcttgatcctcgtccattgcgaatatctgtttgattttgtagccaaaaccctaaaaccccaaatttaagaatttcaagattagggtttgggggaaagaagaaagaacagtataataatagaagaatcgaaggaatgaagaaaggaacgagtttggaactgagtccagactcgggactcgggaagagttagagagagaaaattaatgataaaaaacattt

SEQ ID NO: 14710 - DNA, 11151 bp, Cannabis sativa
  modified_base (469)..(483): a, c, t, g, unknown or other
  modified_base (1909)..(1911): a, c, t, g, unknown or other
  modified_base (3532)..(3533): a, c, t, g, unknown or other
ttgttgtatttgtgatagtttaatgatttagtgatagttcaaattgcagaaaatcgcaccgtactgcaccgcactattttttgcggtgcgagtgcggtttggaaaattagaaaaactctatgtgctggttggtttaaaaaatagttaaaaattacaccaatcgcaccgcgaataatcttaatttatggtgtttatattacacctagtagctactaagctttaactcgtgatagggttttggtaattggacatatgtatatttggtgtgattttatcaaaaaaaaaaaaaaacttgtatatgtgcttttagtaatttaataaatgttatgtttggtgtgattttaaaagagagagattgtcatgagaggtaattgggctcatggctatcgggccatttgcgggctcaaaagcaatatgggctatacaacaaaaaacatttaaaaattaagaaagagagagagagagagannnnnnnnnnnnnnnagagagagagagagagaataatttagaacacgaatcccttcgagcctgaagccttttacttaataatcgatcttgcctaggtaattaagtaataaatatattgtgttaattattaatatattgaaatatagaacaaaaaaattatgtaattaaagaaatactaaagttaacatttatttttcattgttattattaaagaaaaggtctcaaattcaatcagcctatcctggccactggataatagagtttgtcatagcaaagactactctgtattgagtctattgacactcctaacattacaaatagctctgattaatattcccaataaacgaatgaagcgagaatcaactcaacattactaaaattaatttttattattatagtttggcattgctccaatattactttatcttcaataactaatcacatatatactaattaatatggaagttttaaccatttgtttattgtgcataatttctgcaccaaaattagcatgattaatgatatgagtccaagtattaattacacaacctaagtaagagggacctccaaaattatagttaccttaattattttatccaatctaataagatatatggagtatcggaatcttagaaagaaaaaaaaactccgtgatttaagcttgccttgtagttgaagctgacaaaaaagttgtacccacgaatcatctaacaaaaatctataaacaatatattttctatatccactttaccacttttctttactgcctttggatttctttttctatttttattttttatttttttggacgtgtggtttgcttcttttccttgttggtttcactctttcttttgatattattttatcataattaccatttcattattgcctttattaattaattattatagtcctccattgacatagggtttgtgacattcatcattgtttcttaatttcccaattttcttgcagcacaataacgtcatttttatataatattcaattattagcttattctcttcttagttgaattaataactatttgaatacgtataatttacatggtgtgcatgttactcttaataatatacattgttaatatatagtagccctgaccctacatgagatatggggtcctgactctttgaactttaattaatcaataatatatatatataatatatgtatatgttatctgtatgtactataggctatatagctagcttagctagggccatagaccatatatgccacgcttcgttcattcataaagattcagaagggtatcatatgatgtccgcccaataattagccttacaagccaaatcgccgaaaggaagaagatgatgcccttcaccattattactattattatttaagaagaacatgtgtgggcttgagcatatccttctctcacttaaattatatatatatatannnatatatatatattagattttatatattaaatgaatttggagcttgaaacgtcccatcaatatatatttggatatcaaactcatctcatctataaagagaaagcaagtagtactgttgttttagtatttatgattcatggaagctggcttacttacttacaattattacgtgtctcctcaaataaatatatgaagatacattgatataaaatctaatatttctatttcatatttattgtaataaatcttttatattatcaaaacatttgtagttgaaaacaaaaggtaaagggaatctttcattatatgcatgtcacatgaacatgtgtactgtgtagcttccaatttccataggcatacgtaatctactcatctaataaggtatttatatatatatatatatatggtttggcaccatactaccagtcataaatttgaatggcatatccaagtactagaagactccaagtagaagtggacataaaattctgaaaatatcttcgattaggttacgtacgtcgcccaaaccccgatcctgcaggtgctcccacttgacccacaacaacaatctcaactacataaatttaaaaaccaaccccattcctcctcatcatatcataaatccgtacactctactaaactcaataaccccatgcgtttttttaacccaaaaaaaaaaacaaaaacaaaacactcaacccaaatttgaattaaattataagaagtaatatataataggagtgtcacgatgtatccaaaatttaaacaatctcattaattattctaataataaataagaaaaataacaagattaattatatgatcattattgaagaatggaataaacataggccaatagagattcgggccgaatgggatcactcgatgagacatcaataacccaatagaagtcaaaaacatatatatatatataatatatatataccatctctttccaaatcaacaacaatctggtgcgaacccaccattattgaagaaaacaattaaaacacaaaactaataaataaactaaaaaaaaatcataaaaataaaaacttactatagacacatcccacaatttgaaaacaagacttgtccgtgcctcacaaagcaacgtccgtagggagagacaatattgttgtcaacagagacttgatgagaatcgcttgagcttgatccaaattcacagctcttattcaaataaacaaaataaacaaagaaagaagaaaaattgtttctttattgaatgtgtatcaaatttgtacaagagttggtcttagaccgagtataatgagttgataatagttatttaacaactctaactaactataacggacactaacaactctaacatgtaactaacaactagtttaggttcataacaatgccagctaggattaggagtcaacacatttaacaattctccatcttgaaccttaatccttgcacatgtaatcttcatgagttgcgtgtacttgaagtgtagtcatgagtgtccaatgagagaagcttttgagacggtgattgaacttgactgatggcacggattttgtaagcatatcatatggagttttagctgctgagactttctccggtttaaaaacttaataaattaatatatnnatatatgtataacggtcggttttggttttttcggtcggtttattactaaaaaaaaccgaccgtccaatggcgattttaaccgttagcggttttttcggtttttgatttcgtcggtttcagttccaacggtgttcggtaggtcggtttgaacggtttttttgattttctagattttacgctcacccctagtttcaccttaccatttttatgacatctcttagaaaatgtagcctaacatcaatatgttttgttctcttatggaacacctaatttttactcaagtgtagtaaacactgtaatagaactctggtctataccaagttcctttgttaatccattttgctaaatagtttctttgatggcttttatgcaagccatgtattcagcctcagtgattgacaaaagtcattgttgtttggagcttatttccagcttattatgcattccttgatttggaatacaaaaccaagttgagaccttcttgtatccaaatcacatgcatagactgagtttagataccctaacacttcaggtttcttagtgttagagcagtagactaatccgaggtttcagttccccttcaggtatctcatcatttatttgatagcctcccagtattttcttctaggtttacttatgtacctattgatcacagtcatttcatgacacaactcaggtctagtgcagatcataatgtacatgatacttcccacaacactgctgtatggaatattgttcatatattccatatcttctggtgtctttcaattttgagtgacagacactactagaaaaagagatgaaatcaaacttagtctgaaaaaaataaacattaaagtcgtatataattttttttgtacaatagttttgtttgatctattacaataaaaatttgaaagttaccgctagtctatctcaaatagtctgaatgactagttcgtcaacgtcctcaaaattgaacttttcatagaaatggtattgcgaacaacaaacttcatataattgttaaacttgttgtcatagtcgtttatcgagccccagtccccttatgatatttaaattcaacttttgtccagcaagctgcttggctagtttttcttcaatatttttccccttgtactttccccaaactctttttttcttactgttgcttgcacttgcatcagccactttagacatacaagctagatataattaattaatcaacctattaacaaaaggaacatgtatttgatttaattaactgtgggtttaaatattacaatactttcaagtctacaagtcatcataatcatcatcatcatcatcaacagttacattagtgtcattatcactatcactagtgtctttatcatcactataaataatgaaatcatattaatcttgacagtcaggctactcatggtccctgttggtcacttcaattgggttgatattatcacggacatatttgacattgtccaattgtaaaagttgtacaactaactagattcttgaagagtttctttcttgtatagtcgtggtcgcatcatcatcctcatgtggaaaatcccacacattatggggggtgtaaatattgacaagcttccaatcactccattctttaggtcgagaatataatatatcaatttgcttgggatgcaagtatgaatggttcattttggtaccactgacaggcgacacagacactagtgaaaaaaaattattactttctgtcttgtttccttttgtgtctcaccacttgcacctaaaaatgataacactataatccttcaagttagtcaactcatagacttgtttgagtatgccacaaaattttttaccaccttctccaggtaccaaaacatcactgttttgggtgtttgattgtcatcttgatcctcaactaggaatttaacattgttaacaatatatgcaggataataatagcatgttggattagagagatttacaatggcatacaactcatctgattctttcccagggttattcactcaaagttgattgatctatcattgagtgaaaaatataatcaatattagtacaacaaatcgaatttgaatgacaaaattaatagaaaacaatacttacttgagacttgaaccaactggaaaactcgttctcttgagctgtgtcaatattttgatcacccccaagttgtagctcattcatatgctcactacacataaatagtaaattaagaatgcaaaaagtatcttacttgatatacttctccacttcagtacaattgttcaaaatgtaccactctgccttaagcttttcttaaattggaaaaaacacgacggtcctcttaccaatgggtcgactaacatgcttgaatacagagaaccctttcaggcttatttgagacgacatcactatttcgatctggttggttaaactgagtttcaacttcctagaagaacatggaacaaaagcttaatgcctcattaattgcataagcttcataaatagatccttccggttaagaacaaatttttacatattatttgtacacggacatgactcgttcaattggatacatccacatgtagtgcactggggccccaagtatcacttctttaggaaatacatcaccaagtaaaccattatgtcaaaaatatgccagtgagaaaatagtttccaatttgcaaagaatgtccagaatacttttttgcatgctcttcaagtcttcaacattcaatgtcttcgagcacaattttagaaaaatacacacagtttaattattatatcccggacttctttcttcaaaaaattttgaatgccccctagcatcaagtattgtaacaacacatggtagtcttgagacttcaagccaaaaatcttatcttcattctcattcttattcttctctaaatttgatattctgtctattgaccttccttcacctaggaacctcatcaatggtgatcctaatccgcagtacactcagcggaagaaaaaagaccagtccttctttcttggctacgttcctcaatgtctgaagttatcttgcctcagttgccacttacacttcatctttctctgtgtggcatgccttagaactaaaattctctagacaaactaaagcaagattgcttcaactcaagggacaattctcccgtgttcaaaaaggtaacctatccatctctaagtatattgaaaaagttcagtctattttttatgctctcacggtggctggttcacctgtccaggattaagatctagttcttcaagtcttaaatggcttaggaccagaatttgactcgattgtctctagaatcacttcaagaagtgatactctcaccattgaagaagtccaagctcttcttctgtcccatgaaagcaggctagaacatcaccaccaaatgaatgatctaacaatgaggatacaagccaatcttgcctttggatcaggaagatcaggtggtgctcgaccttattccacaaaacagatctagctcaaatgatggctcacattaaactcaaggtcgtggtagagggtactcaagatttcccccatccaaagtgatatgtcaagtgtgtttaaaagctagccgcactgctcctgtttgtcattaccattttgacaagaacttgcaagttccaaagcctaaccccaacaatcctcgtgcttatctcattaaacaagagtttgactatgatcttatggcatatgctactacaatggttcaagactttggtgatgattgccaatggttcgcagacacaggggccacctaccttgtcacctctgatggtacacttttagacaaccctacacctcacacaggtcctgaaaccatggttgttggtgatggtaagaaattaatgatttcccaaacaggttccacattcttgccctctcttacctcatcatcttccttagctcttaattatgttcttcatgtaccttcaattactaagaaccttgtcagcatttccaagttaactgatgataacaatgttattcttgaattttacaaacattattgttttgtcaaggataatcaaacgggagtttttcttctcaaagggaaacgtaagcatggtctttactctcttggtgatgcctcctattcatcaagctccactgcagaatattttcttgaaaattctgagattagttctaagtgtcttgtaaacacacgtgtcaatataataatgagatctttgaatctcttaattcttgtaattccaatttcatcaataaaaatgtatgtttgtcctcagattctcctcagtttttattacctatgccaataatgatgtgaataattggcactgtaaactaggacatcctggccaaactactttaaacagattgttaaaacaacttcctcactctggcacaatacaaacattaaaattctacaatgcttgtcaattaggaaagagccataaattaccatttccctcattcaatagccatgccactcaaccactcgagttagttcatactgattttgtggggaccctcacatgttccatccgaagatggtttcagatattatattttgttcatagatgatttcagtaggttttattagatttatcctataactgtcaagtctcaagcgtttgacatgtttgttaaattcaagagcatggtgaaaaatcagtttgaattaccaattaaagttgtccaagcagatggaggtggtgaatacaagccctttgccaaatttctatcatatcaaggaattctctacagtcatccttgtccccatactcatgagaaaaatgggagagtggaaagaaagcatagacatgtaactgaaacaggactcaccctacttgctcaggctggccttgatcttacctattggtggcatgctttctcatgagcaaccttcaccattaacaggttacctacacctattctatctcacataagtccctttgaatgtttatttgggaaagcacctgactacaacataatgaaaccatttggttgtgcctgcttcccccatctaaggacatacaactctcacaaaacaaacatgagatctcaacagtgtctattcctgggctactcatcctatcacaaaggatacttatgtgaaaacagcaaaggcagaatttacattgccagaaatgttgtcttcaatgagacatgttatcctggaacatgctcacctcaatccaacaccacataataggtaaatactcatgtccgcatatctcagtctccatctacaactttttacacaagtaacactaattctggttctattcttgttgtttccaatgctactgcaattgtgaacattgagcgtgcaagtcattagcaacaaatggatctttagagtaaaattaaatgcacatgggacattagacaagtgcaagtcaaggttagttgccaaatgatacttgcaagttccaagaatcgactatgaagaaactttttcccatgtagtcaaacctgttactatcagaactgtgctctccttagttgtgtctaacaattggagagtgacacaacttgatgtaagcaatgcatttctaatgggacattgaatgaagtgatgtatatgaaacaacctcaaggctttaaagatgatgagttcccagatcatgtgtgcttattgcacagagatatatatggtttaaaataggctcctcgagcctggaataaaaagttaaaacagagtctgatttagtggggttttcaagcctcaagagctgatacatctctatttgtttatggttcaggagctacccaaattgtgctactggtttatgttgatgacatattagtcactggtccaaatcaatgcctcatttccaagcttataacatatttgaactaattcttttcattgaaagatctgggggaggttcactattttctaggtgttaagattgtaagaaatgagtcttatatgtatttgtctcagtcaaaatacataacagatttattagttaagctcaatatggagggaactaaaccttgtcctaatctcattagttcaactctcaaactcagtctaacagagggggatcctattgaagatccaacattgtagagaagcaccataggagctctatagtatctgagcttaacaagacctaatgttgcgtatatagtgaacaagctcaaccagtttctcaaaactcccaccaccctgcactgggaagcatgcaagaaactgctcagatacttgaaaggcacaattagtgagggattactgcttaaaccagtaaaagatgtgtcgattgaatgctactctgatgtagactaggccagctgaattgatgatagaagaagcacaggaggctatgtagtgttcttaagtggaaatttagtttcctggtctgctatgaaacagcaagtagtggcaaggtcaagcatagaaagtgagtttcgtgctttagaaattgttgcagcagagataaaatggattggctctctcttgaatgagttgcatatgacacaatctcattctccaattatttggatggacaatcaaagtgttacagctcttgctgcaaatctaatttttcatgcaaggtccaaacatatcgagcttgatcttcattttgtcagagatcaaatcttggacaaacaacttcaaatttgatatgtgcctgcctttgatcaagttgcagatgctctcactaaaccttatccactgacagatttcttcacctcaagtccaaacttcaaatggctaaaagcccttttcacttgagggggatgttgacactaaagttagttaagagttagttacatgtctgtacaagttagttagtcttaacaattttacttttcacttgtttttctgttacttgtaacaaactcattttgtgcctataaataaagcttctagcaatatgagagggtgcaagtttttactgcattgctactctcacttttttttttctctgcaccagtattgttgttcatacaagtcttcatgatgatctcaaaatacatctgctgatgacataacaaaggaaggaagaagtataagtaccctacttacaacatgtggtccctaaaattatctaacatcaaaaggtaggaaagggatcgacagtgtttgattctcaataaattctttgataatacttttggaaatgagactattaggaacatctatgctctctgaacacactccttagctacaataaagagtgagacttgaaaaaataaactctaatcatacaagaaatggctctctatagtggcaaaagaatcgaaatctctctacttttatgctaaactcttttaatagtattttaatgaaaactattattactttttttattattttataaaagtatttatatttaacaaattcaaattataaaatattattaaaataatcaaatactaactaaaatagggagcatgattggaacaataacaataaaagtggctctctattttaattttctaactattttagctaagaaaatagagaaaccaagatgctctaatataccacttatgttttcaacactataattttaataaattgtgaacaatttattttactgaaaagatgatatataggggttttttttcatttttacattttaaaacagttttttttatatatttttacggaattctatatagaaacttctattgcaactaatggagtaacct

SEQ ID NO: 14711 - DNA, 3550 bp, Cannabis sativa
ttttttttttcttttcgatcaatatattagtagagcgaaacttataacgattttatatcaatcgatacatttcacataatttttaaaagcacataatcttaaaatataatttatataaattattttctaatatcaaaattgaaagtattttaagttaaactatatttgtaaggtaagtcaaacttaaaatatcatgattatataaagtactaattattgataggagacatatatatacacttatgttgcctcaatatttaataaaaatctcaaaaattataatctcacatctcatttcaaaaattttaaaaatatatattatttaattaaaaaaattaaatataacacttaatatttcttaattaaacttaattaaaaactaattgtacgtaacattaatattttcactttaggtctgtaccacggttcatatattattttcagtgatgaatattgtgatatgtttaagttgtttatttaaattatcaatatgaagcaattcaaccgattatgcactttttttactaaccttattaatgaattttacgtacttatatattatctccacaaaaaaatctcaatataatttttcattaaaaatcattatatatttattagttttacctatcatttcttaatgtgagatcttaatttctaagtaggactaattataaagatcaaaataaacatatacataagtaaatgaaaagaaacataattaaaagcaagagatggaatatatatacgaatcacaactaagtgcgattgatcgaacgtgttctgccattcaagatatgggaggaagaattcacaggaacatttctgagtagacgagccattttccttttcaaaaattttctttaatcatgaagtttatattgtaaagtttcttgtaaagaaaattacaaaagaaatttgtttgaggttttttctaatttttataaagagaaaactagtatagaggatagtaattagttggatagtttgagtatgactagttagttgtattggttgtaagttgtaattggtgttttagtgagcaataaaagtcttcttacttacaaaaaaaaaattctttaattgcataaatcatatagcaggaaattgtatccaaattaattgagctaaaagtgaatattcagaggggttgagaggggtgatttttggaaagtgtactatataatatatatgagctgtttgatttgaaatgaggggcagaaaggttgaggtagaggaagaaagagccagccttcccaaaagaagaaatacactatatagtcatgtgaaggcatttatagtggggcttaggtgttttttgtaacctagtgcacatgggttgagggtccttttaataagttggtacgaacaaaaggccatgcagcatgtgaggccatgtgcatatctccaaattggcctctctcgtcataagatttttttttttttaaaaaaaataatcatgattttgtcacaatgtaattaggatatcagtagttttaattacgtatcaagtttacgtaattataagatttgagtactatacttgatgagtttttctataataaaagacaaaaatccaactgaacaaatattatagatatgattatgtcaatgtgtgcatgttgggtgtaatgatcaggaggagctcttattggttattaagtgaaagttattagatagtttgtcgctttgcgaccttatatatatgtcaccaaactcttcgtttataatatatactttctctaggggcttttccaatatgtctatttcttttgttaacttgatatagtcttcttcttctttcattatatgtagctttgcttgtagactgtactagttttttaacattccgattattattaattactctttattattattttcttgtagtatttggtcatcattttttttttattttgggagtgagatgatgaataaacgaattcgtcgtgttcgccttctccaaacatacaaatcacctcatcatgatcttgactttgttagaaattatcttagtcacttggtaccagccttaaggaagatcaacaaccaaaatagcagtagcttttgcctctgcgacgaagaaaatggcgttaatcataacaagctagctaaggcagtccgatttgaagtcgacatggcatttgcattatcagcaaaagagttctattttgcatggagtcatgccttggaagcgaagcttattattcaaagagatattagtgtgaataattataacaacaaaaatactaataataataatgattccacatatcaaagatattcttctttgcaccaaatttctttcactaataattttaagagtggtgagattagtagtactagtggtgaggtaaagatgacgatgatgatgaagaagaagaggaagttgagtagaagaagagagagaaaaggtactgtagtaatgaaaagtagtgaagaagaggatattaatattgttggtgaccgtttggctcgattgagaacacttttgcctggagggaatgagataatattgggagagtctgatgataatcaattactcacacaagttgcaagttacattggctgcctccagttgcaggtcaatgctctcaagtgtctagtggaattaagccaccaatgatatagatatatattatctgaatttgttttgtagaatctatgcttgtgctagtttataatatttcagttataattttatgtaatatatatgattgattgtttctctcgtagctttaatatttttatattttttgataaaactatatcaaattagtttataaatgtatatatagatatagatattaatatggaaaatttatgtgcgtctcttaaattaaatggtgcactcatctatccctatctattttagtaattctagaagaagttttaatttatttttcttttcatgatcgtttacattataattatttaaaatttcctagaaaattttaaacaattcgaaaaaaatttaacaaattaggagtaagttttaaacagcttgtgacacatgtgactcttttattttttatacgtgtctgaaatagactgttcgaatactattttcagtattgtaaattattcagaccatgaaattttttttttctaaatgttgaaacactatagaatgcaactatgcacttttttcgggatgtattgtaaaaataccctatattttaaggaaaatgttaagggacactttaaggtgttaaacaccagaagagatggcatactgttattggtgcattttaatatcgagtccactaccacaaaagtcagaattcgcgacggtcctaaaaatactttttttggggcaccgtcgctaaaaaaattaaatatctgtttaaaaccgtcacgaaaaattagtattactgatggtttataacagtaattataggaataggcgacagttttaattggaattcatcatttattgggcccttatacccgacagtttatactatagccgacgattttaaaccgtcaggtataagggcccattaaaaaatcgtcacctacttctcgttacatttcccacgtgcccacctac

SEQ ID NO: 14712 - DNA, 7943 bp, Cannabis sativa
ccaaagcacaatgccacataagcaagttcaagagacaagggaaatgaccaacttcaatgacaatcccaatgattgtgggatattttcctataaatgtgggatatttttcctagatttttatttattattcattatcttgtaataagatacacgatttgaagtgagataccccgacttgtgggggatcactaatgaccttggacctatatataaataatgataggctagggtttacagaccgttttctagaccttcgacttcttactagactcttgatcacattctagaccttgaaacactttctagatatccacattgctttctgacttatctagacacttcatcccttaagacctttccctctcttcatctttttcttgattcttcaaattttgtcgacaccaagtctccatctctattgagatacatgtttatcaagaataagagattattctctattattgcctttattgattactgttcccaagaacaccaccaccaccattattatcaagtttatgggtattgggtctcccatgagcttattagtcataagcttcgatatagcttttgtctaagagatctctatttacactatcatccacacactcttgagaacataactctggtgtgttggaatcaattaataaaaataaagttgacatagccccattactattacgacatggggtgagctactataaatctctagtgtcattttttttttttgaagttttatttagttaaattaatttagtacaatcctcttatttttttatgatcttcttagatcagttgacgaaaaaccacatcaacataactaattaagcgagaattattaattacacatacaaaaactaaataatatttattttgcacaaattaaagtgaaagaaataatgatatgtaaatactcttaagtacaacactacatttgtttcaaataatgtgagattttttttaaaaaataattcactaaaaagtgaaatcaataaaattttaaataataaaaaaaattgtaaaaattgaaaaaaagaaaaaaaaagaaaaattggaatataacttaaatatatagattagatctagtataaccacttttgttggtatcaaacaactcatttattcactttcaattcattttagcattgttattttttattattattaattaaaagaaaaagaaaaagaaaaaaagaaaacctacatttcttcgtttggactctccctcccttttaaacctcattaaataatctcttaataactttctctctctttctttttattttttttctctttctctctctaaatgcagtgtgtgtgttgaagcactattccaatcgagtgctttcataaaaaggggaaaaaaggacagaaaaactcaaatccctatctctctctgtttctctttttctttgaaaccctaagaacaccagttcagagagagaacaaagaagaagaagaagaagcgaagatgggtcagaagtccctgatctacgcgtttgtgtcgagggggactgttattctctccgagtatacggaatttagtggcaatttcaactccatagctttccaatgcctccagaagcttcctgctgcgaacaataagttcacttacaactgcgatggccacaccttcaattacctcgttgacaatggctacagtttgttctctttccatccttgcttttttcttcttgtttgtttccttaagaaaattatttgtagtctttcgatgcgcttagttgttgttatgaccgttattggaagatatgtgttgttcagattcgttttcttcataatcctactatttggtcttgcgatctggtctgactttctgttttatcccgtctttgatgcgaggaaatggcaggtttttgggggatgtagatatttttgggcttttttctttttaaatatttattagttcgtctgattgaatatgagatacggtgaaaatgagatgaagccttaaaggacttcttttgccaattgaatgcggttcctgaaaaaaaaaaatttgcagcaaggatgatgatggctaactaatgtctagataatgatcttagggccattattccacacaagatggaacatgtaaagaatataattcacatagtgtattggtaggaatattatcaggtagaatttcatgcaaagatgagttcattgaactacagttaattattctcgcatttctttgtagttgatgttactaacacagtgattactgttgagtgttttgaaacatactgaaagtcaagattgagcctctgaatttactatttattgaatgttattgaatttgtaagtttggctaaattatcaccatggatgttgaagttatttagatggcttgtacatttcttgatgaaagtgaaatggggtatatttttgtttctctttggattattaagagctaacctcataacaatatagtaatataagttttgatctatgttataacagtattataatagatagtgatgatttgagattttataaacacacatgcataaaaaaaaatatatataaatgttaatgttgaagatagaaaatatattgtgacactaatgacctgatcatgtaggattgtagccaaaaatggtcaattaaacagagcaaatttgttgctatttaaccatttttgttcttcattgtatgttgtgctttacaattttctgtttcttagtttggtttcataatcttaacaatcttgtaatattgttgtgctcaaacccaacctaaaattactagcaagattcacgttcaccttatatcatttctctagttgaaatatttctttaattgataataacagtataattgaaaatattttgtcctaaattatgtgcaagtgtacttgagtacttgaatatattcaataatggactataataccgagcatctaaattgttgaatggacttagaacttcttgaaaattgacttaatcgtaatttttaacagtttacaaaattaatttaaatggcaacactatattacttaaatgattttcatttactaatcaaagtatgttcatcttgcagcttattgtgtggttgctgatgagtctgtcggaagacaagtacctcttgcttttctagaacgtgtcaaggatgattttgtgtcaaaatatggtggtggcaaggcagccacagcacctgcaaacagccttaacaaggaatttgggtattaagtccttgtttagatcattgagaaacttaatttatgttttttattgttgaagtaaatgaaatactcgagctattccttgcaggccaaagctgaaagaacacatgcagtactgtgtggatcatccagatgagataaacaagcttgcaaaggtcaaggcccaggtttcagaagttaaaggtgttatgatggagaatattgaaaaggtaggcatgcgattgtccttaatatgaaatgggcagatgctacatgttatgtattcaatccaattgcccactttaaagcacttatgtttacttgatcgtgaaaagggtgctttccagattgggattgatgagagtttcacttaacttgagagtttcaaatcattatgccaatctggaaattctgtcccatgttatggcaaaattttggttcttggaggactggatataattgtccaacccactcaaagggtgggtgggttaatatagtcctaaggaaagaaactattttttaaaaataaaaaaataaatcaaaaattagttttttatatattttttattttttttataatacaaaaatatattaatattttaattataattgtgaataacaaaatatgcacatcataatttggtttttttttttttgtttcttttactcttttcctattattagttatttttattattcttatatattatgaatattaaattttatggatcattattttttattatttaaactataatttatgttttgaaaaatatattgagtaatttgcggcgtaaatatctaatcacctaagtttaacttgtgatggtaatagtgcataaattatatttttggaactttcgtaagtacccgacttttcttattggtgatttggtttgcttaaattagtttttaaataaaaaataaaaatttaatgacctggatcaattagagactgccatgtggtcattgacttgacacttaacagcttacggaagttttgtaattataacttaggtattattaccgtcaaacattaaatttaggtatttatgtctcaaattactcaaatatgttatatacttcatttagtcacatgtacagagtactaagatagtttaatcataattaataatcatccaatcctgcttattaaatgcaccaaaaaattataccaaactcagaatgatatatcaattcacaaccaaaattacacaaaaaaataaataatacattcatcaaaaaacatataactcaacacaaatgaatcagtccagacttgtatcaaaatactacaaattatctatttgaacaaattcaaaatttaaataaaattgaagaaacaagtaactggccagcccgtgtcctcaatccctgacatccctggatctttgacacctgcattcccaacagccatgatcatccaaatatattctgttgtgcagccccaccttcttcaaccccaacaaaccaacttacctatcttgcgtagcagccaagacaatacctcgtcatcgagttactgtccaagaagtaaaaggatttttaaattaggatttaagatgatttataattaattttgttgatttacatcattttttatttcatgttaacaaaacaaatttaaatttatttttttactttttctataactaaaaatttaacattaatttacatatgttcattttatattttaaaatatacttttcaataatttttctaatttaaaatcaacttgaaattttttttttttaaaataatattaaatggaccgacgagtgttgtcctagtcatcgcttggtaatgacggcaaatggtttttgaacttttgggtactttctctttcaaaagtacagattgggtatttatgtggctaacagcagaagatgcttgtaagatttaagcagtacaattttttaaaaacatggaaggttgatattttttttgttccctgccattttggtttgtgcaacctacttaacatacactcttatttaaaagtatactttatatgaaattaagatattattattataatatattctcttcattagcactataagaagggtttgtaagaatgaaactacatagtggccttgtcggctagattagatatgggcataggaaatccaaacaaaagaattatcaaatgttattttgacaaaatttgcttttaagtggtaggtgaactgaaagaaggcttgctagttctgacttgttagtaaggtgatcctgtaatcttgatcaccctgacccactagtgggttaattttcataaatcaaatgaagcaggcagggcttcaagtaaatgctgccccaccatgtcaacgatccactaagattttaatgctggggtttaattaagtaaatgaatcagatttttcatgcttcaaagcagatacttgtgttaaatagcagtttgattccttcttgaagctgcactgatatcatgggcaaaaaacctggtccatagcatttcaccaagcatttcttttatgcttttaagactgtggttcatctatacctatactttgcactggctaagaaatggttagtgtctatgttatgatggccaatttttatagggcggtagcattgtaagaccatctccaatggaagatgtaaaaattattcaatatttggcacaaaaattgactttgtgatatgtttgcattaaattttagcattgtgttccaatactcaattgcaaaacttgatgtaaaatttaatgtttttgataagtgagctacattttagtttttcatcatttatttggagatgctctattgtgtttttgataaagctgtgcttctttgtttctataaatgaatattgtcagtcctgacgcctctatttttctatgtttcgaattacaggtgctggatagaggagaaaaaatagagctccttgttgacaagaccgagaaccttcatcaacaggtatggaaattttatattttgtatgtatgcctactctgaattctttgttttttcttttctttttatttttttttttggacaatgaacttagacattaagggttacaattagttaaaatttgtgtaattgcgttttcccaacctctctttctccatcacaaccgacttggatttataacaactgactaatggcatttcttattgttaatttaattttattgcaaagtttagtttaatgttcatttgctataatagttgacttagtctagttcatgaagaatctcctgtttgcgtttaagaaaatgatagttaattcattaacgttcaaatgtgttttttcttcttgggttttatttattcgagaattaaaatgtgttttctaatgaaataataatatggttacaggcacaagatttccggactgcagggactaaaatccgtaggagaatgtggttgcagaacatgaagatcaagctgattgttttgggaattctgattgctttgattctcatcatagtcctctctgtatgccatggtttcaactgtggaaagtgagcatctttcgtcttcagaaggcttttgatatctcaagctgctttacttttgcaattattgtataagagacaaaaaaatatacattctctttgtatgtagttaaaaaaatatatatccaggtatttggcttagacacttgaaacagtgtgaatgataccctatatataagttgttattagaatgctttccaagagaaggtttaaaagtatgaaaattgtcagattgctttgccatagtgctcaattcgtttgttcctttttacatatatgaaaaataaatttattggcctgttttgtataatttgggttaatgtttttcatatttgtccttagttttatagattatggaaccaatatttactctgaaaattctctttgaacatattaacccaattttttttattaggtgggtaatcgtttggttgtgttttattaaaattaaggttttgtattctatgtattctatgctcatctagtgacctagtaattacttttacttttactttaattttttcccccatttgacggtatgtatgaccttgaagcgattatttttcttgatcatgattaaagctttatcaatgatgttttagtgaccagattacgctgtgatttccatttgggtttgttattttctataaagaaaactttgggtcaatgtaaatataatcaacggtgaattattccgtgatttgttggattagctatatgagtcgagttaggtaaactgtaacatattttaaatatccagtgttaaaaaatttatttcaattcaggggttccctttcgcaaaactactcaaacaaaccggagtggggtaccagtttacgcttatctgattttttgaaagaacaaactatcaccaatctgatttgaaacaataactatctcccccactttattttgttaggtaaggcattctcattaaaaacttcatacaataaaataaaaactttatggtacactagaagcaccaaatatgaggcttcacaacggcaattatacatttttcttccttttacgtccccggttcaagccgtgttagaatcaattattgaattcctcgccagtttttgcgctagtccatggttttaagtaggactccaaaccaaataatattctatcacaataattagaatacaacaactaatataggtcaaaattattaagaaaaaaaaaaaaaaagcagtcacaaaacccagatactcattgacatccatcaattaagtatatatattcatatttgttctttttttctttcgaccaaattccaataacttttatc

SEQ ID NO: 14713 - DNA, 10430 bp, Cannabis sativa
atggagcattatgtctttaatagcagaaacgacagtatttatattttcaacctcggaaatacatgggaaaagctccatctcgctgttagggttaaacttactatcctagcgaggtgacccaacgaaatacactgtgcagtgtatctgaatccacgtcaatataaataataaataatcttaaaaaatgacaatctacattaataagtatttacctattgatttttttatgtgacaaaagacaatataaataataaataatcttaaaaaatgacattttgctacaaattttgaaatgagggcatttattaacataattctataatttgagatcatttactataatttttcattattcaatccagagaacactgaagctactaaaccattgtaagagcttcgaagaagattaataattccttgctctcttttcataatcaatacaagaaaaaggagaatagactattaccgtcgtcacgaagtcgaacctctataacaaatttatgttcttattacttaattatcattatttattttttttttaaatcgcctaattaatttattattgttggctataaatgagatcaataaaactaaatgaaaaataacaaataaataagatagtataaatataaaagtaaatgaaaacaatatgtgcaaacaatataatattgttgtaaaaataaggtaaaaataacaacgtaaacatattataaaaaactgtaagttgtattttcgtaataattttgaattttttagtatttttttttaagaaaaacctaaaatatatgacgctgaaaaaaagttttccaataaaaaaacaaaaatgtataataatatatggagcgagtggccgagtggggccgagccactgagtcgagttgattatgactgtgtgctgagagagagagagtaaaaataataaggctggggctgggctaggcagctgcgcctacttttagttttgagtttttagatctgtgactttgaggcgtcgctcgcggctctgccagccattaactcttccccaaaggccccaatcaaacaaaactcagccgatctattctccttctctttctttctcggctctgatccggctcactcctctttccctccaaattcttttccctctctttctttcctcaattttcttgctctctcctattcccgattcggctataatcaaaacggacttattcaattctcaacctgagttcgacttgaactttattatgggttatcgtttgttttggaaatgaaactttgctacggcgtgaagtgaatcgcttagttggttgagttggtgggggagtcgatcaaactctctggatttcactctttctcatgaattttggggtaagaagcatatgtaatgcttgttttgtttatgtttgtagtttggatgaagtaatggattttttcttgttaatttatggaattatttggaaatgggattatttgttaggcaggagcagcagcagcaactgtgactgtgactgggaaaacagttgctcaaatggagtggggggcgaacaataacacattcaagacttttaaaggtattcttataattggactcaatccttctcgttcatgcttaatgtagtttatttgtggatgctttcatgttttctttattggatgttataaatttgaaaggtttttcagctgggcttttgactttgatgggggaaagtattgatgatatttgatagtttataggaggaatattgcttgtgaaagacgttttgaatgattttatcgaccctatactattaccaccctgatgactcacgcaaatatgagttgcttcactttaacttgtggaattttaatttttctacatttttggtggtcaattttcctgtcaagggaaaatgggttggttttaagtgggaaaactctgctgaatttgctgcttaagcatcaatttgatacaagatgtctcaatgtttaaaggtccataaacatgctgctattattattgttacttgggtattgaaccttacagaatctgttttcttcttgtcatagatatagaaccaaaatcagttatggatctagcagtcattccaattgatccagtagatattggattggggtcttcagataagggacatggacatcctatttcgacaataaagccaaggaaaaaaacaatgacatcagtgtatctcaaattcttcgagacagctccagatggaaaaagccgcaggtgcaagttttgtggccagagctattctattgccactgcaactggtaccttttctcctcccagtctcttgtttttgttggtgttatgttactgctttttttttaaaaaaaaaaaaaaaaaaattaattcatgtgctcctatgtctattgctatctaagtataatttcactacctactgtgatttatagaaagacaagggcttttagttgaagctttgaccagtttcattgatcattaacaaacaattttttgggtttcaactgaattacttacaccttaccatgggatctttgggtgggatgatgagcggtactttacattcattatatgcaaataaagtgcatttaccaatctcttctactgtgaaggtaacttgggaaggcatcttagtaatcgacatcctggatatgataaatcaggcgaagttgccacgaattccacgcttccacctgtaactgtagtgaagaaaccacaatctcaagggaaaacatcacaagtggactatgatcatttaaattggttgctcgttaagtggcttgttttagcatctctgcctccttcgacgttggaagaaaaatggctggcaaactcttacaagtttttgaatccagcaattcaactttggccagctgacaagtataaaacagtatttcatgatgtcttcagaagcatgcaggaagatattagagcatctttggtgcatgtttcttctaaggtctccatcacacttgatttctggacttcgtatgagcagatatcttatatgagtgtaacatgtcagtggattgacgagtattggaccttccagaaggtattacttgatatatgtcatataccttatccttgtggtggtgcggagatctatcattctctagtgaagatccttgagatgtacaacattgaaaacagagtcctttcatgtactcatgataacagtcaaaatgccatccatgcttgtcatagattgaaagagagcttagatagtaaaaagatgggatcattctgttttatcccttgtgcagctcgtactttgaacttgatcatcgaggatggattgagaacagtaaaaccaataatctcaaagattcgtgagttcgtacttgggttaaatgcatctgcagagctttctgacgagtttagtagattagcaatagcttgtcaagaaaccagttggaaacctccactagattcttcaacaagatggagtggaaattatcagatgcttgatattgtcagaaaggtatttgctgttgtgctctaaccactatgcactcttgctttaagacatgctgattcgtattagatcattttgcaccatacatgctttcgtcttttttgcattcgttgacaataccaatgaaattgctgagttggcaatgatgatttctagttgttgcacggctaatatttgaaattttgggatttgtaaattgaaaaatctaattgtaaaattgtactgactaaagatgacctggggttttacttaggctgggaagtccatggatgcacttatcaggaagtacgataatacgctaggcagcaggttgttactgacccctgccgagaaaaatgcagccagcattgtccatgatcatctggaacctttctacaaaaccaccaacaacatgtgcatgaacaaggtactcacaatcgggctgattcttttcttcatggatcacatttctgagacgattgcagcatgtagagaagttcgtcactatccagactggctaaagaattctgccgaagaaatggccaagaaagctaggaattttaataaccaggtgtgtaatatatttacttatatgagtgcaattcttgaccctcgaatcaaaggagagctaattgcggagagcctcaactcggagaattttcttgaggaagcgagaaaccatttcattagaaattattctaccagccatttcccatccatgactggtggatacggtgctcaagagatagaagatggaggcagtgtctcttttgcagaagaaattgcacgaaagaaacggagagcaagtatgagcaatagtgtcacagatgagctcactcagtatctatctgagccgccagcaccaataccaacggacgtcttggattggtggaaaggcaacagtgcgcgataccctcgactttctgtgatggctagagattttttggcaatacaaccgacttcattggcggcagaagaaatcttttgtggcaaaggtgatgagattgacaagcagagactttgtatgcctcatgatagcacacaagctcttctttgcatcagatcgtggattttagctgggatgagattgaaggtcaagtctactgaaatagactatgagagattaatggaattggcagcatctgctgctacaacagctgataacactacttctgcctctgataagaaacagaagtaattaacaagtttctttattactttgaggccataagaggccaaggtgatatttgtcatattcggttgacttccagctgggaagctcaattagttaaatcgtttcataaggttgtatttaacaggtaatatttaagtgtcaatgtacatatcagcgatgaggcaaagtcgtaggttaattttatctcctgatttgaagttttgaactttagtgcaacacattatttgtttcttgagcaaaacacaagctttttaacatctcaacattcccacaagtggaaagttagggattagttagattttacgaccagctctacaaacataaaatgcatatgtatggaatcatttatcgggcataagaatttacacaaattaacccttggaaacaagggcataaaaaaaaaatcactatataacatacaaagttgatgattgatacagtattgcttgcttccaagggtttatgtaacaagcataaaagacatactttattcatcctaaactgattaatatgtattccagaaatgatcttttccatcctataccagaaattcttgttcaaaacttgcaaatgaagaaaaagaaaagtaacccagctatttgacatttggataataccagccatgttctagggcaaagaatcattagaggaggtctcaggcattgtagtaacaatttctgaagttacatggttatctcttgcatgacagtaaaacctggatgacgaattacttgtatcttaatcatgtaaaaatcttgtctaccctgttctctacaaccatagttctggtctccaatacttgagcttgtgcactataacaggtacacttgtgggaggaatctacagtacaacgaaaagaaacagtaaggaccagtaagttgatgctcttatgctgtgtacctaagatgaccgcttaaacaaacagcttaaacaaacatcggaaaatatgactatgtaaaattgtagtgtgcatccgtggaatgaaatgctgcatttaataaatagtatgtgtcagaaagcatcagtgattagaaatgaattgctaagactcgctatcaaagataaattcgtcataattcgcttacattatgatgagatgcttcaggttttcactataaacgaataaaaaacaagcaaagaaatcactagcagacttttcattagtttgaaatattcactaaataataatccaaaagttacacctggatgatggtttcaatcatctaaaatatcataaaagcattagataattattagcctttaaaatatttaatgtttatgataaaaaccactaatggaaataataaggcaaggaactaagaaaaaggtgaaaaatataaataaacccaccatgcttctgcatttaaccaaaaattaaaatttgaatgaaacttaccatgccatcatctgttacaatcaacgagatatattctgatggagtagcatcatacctattacaaaaacaagaagttagataatcttagacaatggcattttaccaatttgatgaaggaaaagaaaagaaaaaaataactttacaataagtttagaagttggagattttctttatttgccaaatgttccaaataattcacatcctttctaccaggaaccactgctatagcatcagagtcacctgtgaacaatttgcagtttttcagtctctttcaaggaaaaagagagtaaaaagtgatggcagaaggaatgaaaccagggtacttagtcttgtacaaatacaacatacctagttcattggagcaaattgaatcaagttgtaccctttcatgaaatttataagcttcacaacagatcaagactggaactcggaatgcatgagcaaccatagctacagatgcagtgccaactctagaatatacagttccatttgacaatacagaagcagcccccaaaattacttttgtcacatcatgcataacataagaaacagcatttatatgagtgtatgtacaactcaatcccttagacaccagcctccgaactaatgcttgaccttcaaactttgggcgtgagtctactaccacaactcggaactgcttcccaagctcatgggcatacaacagagtcatctcaaccacacaagatgatccatacgtgagaagaacatccccatctctaaccttcgtagcagcatgccttactatgactttgccagcaattagtatcttctcatttataaatgtgtcaatatctgcacaaattgcagcttttgcttctgactcagaaagtgaatgtcctaaattggcaatatgactcttcaaatatctaattgcatttcccatgctgatagaaagtggcctgcattcagtaaaaaaggaaatatagctattgagtttggcagttaagtccctgtaaagacttttctctggtggagtggagtagtctctaaatgcttcctgcaatgattgaagcatggcaatacagcgagcattccccccagaaagatctccagccaaatactgtaatccaacctgaaaaatatcagcgcatacatcattacacgagcgaataatgtcattcaagccctgttagatttactaaatagtgaaaggtatctcttcactgtaatatttactttcagtttaaaatatataaataatgtgttttctgttgtaggttcagagttaagttagcaagagaatcacatacgtaacacacaaaaatgaatatgctcagagaatatgtgcccaaacccaaaaatggtgtgaacatacaagcatgcataggacaacaaaaacggaaaaacagaacattatttttttaccttgtacaactacgacttgatacatgttaaaacaattcccaactatttccaaatccattaatatcacaaataaaaaggatctactaatttcccctttcctcaaatttcacaaataaaccaaatgctttcttaagcactgaatgaaaagctatatggcaaaacacagaacaagactaacaatcttgaatgacttaaaggtctgtactgtaaccaacaattcaaggagacaataagataaccctcttggtagtgatcagccatgttgtttgcaacaacaaaatctgagtttgagtcctcgtgggtacctacataacacaattattttaattttctagtctctagtagattaaggcggagccttgtttttttttaaaaaaatgacttaaatgttagtttgcaactattattaggcatgcaacgaaatgacaccatcacactatttccaatcacaagaacgtttgtgcatgcttgttgttttctcaggtattttctagaattaagctgatgttcacattacttcaataagaaatgtctagtttttttgagcttgtctgagtggcaaacaataaaccatacacaagatttgccaaaactgaacataaaatattgtaagcctcatcaacaactgtcaatgatgaatggctgatggctgtcattacattcatagataccttataaattgcaggatgtattggctcaagttggaaaaaccttgattgaagatcaggaagttgggtcccatgttcatactggggtaaatgtagaaacaattcaactctgtttttagcttcagtttgatagaacaatgcacgcttttttgccttctccactcgatgcttatcatcaaattgcatgcgtggtggaggtgcatctttctttctctctttatctgatagataatcacctccttttttatcagaagcagccactgaaggtgcaatagaagaagactctttcctcggtgtaggctgcttcacagatttattggaagcaactctaccagatactgcagcagatttgcttccatctacaattaccatgaagaagaggaacaataaacacagattaattttaaaaaactccattgcaaacaaagcacctagctcacaaaaatatgcatataatcacatttaagaaaatgctacaggaaaacattacaaagcatgatgcctgtacgaaagacatgctactcatatgccaaatgcagatgaacatcacgcaacaaaactaccaagcatcatggcaattacggtagtgaaaaattccagcaatagaataatgaccagataacctattcaagggcagagagaattagagctcataattcttctctctctgtatgcttctattcaagaattaattaattgaagcaggaaggcaaaccaatttaaacagcatataacgtaacaatctcttgtctctccagcaaaggggattaaatttaatttagacaagaaatcatcttaccttagaacgaaaagagaaacagatagagaaagagaggcaataacgaagagagaaacataatgagaggaataatcgaatagtaaatgaaccttttgcagcgcgttgagcctcctgtaatgcacgtctttccgctttagttgttttggatttcaagggttttgaagtggactgaagctcattttgcacttcagtgacaatcaccccactcttttctgcaagaacgtaatgatttaatcacgtcatggaaaataatgcaagaaataaataaaacatagcagcgcacagaaaactgttctcgcggctcacaacgcatgaactaacataaagctgcaacaagaaactgaaaatgtattatgtactgaatcattaaatgtcattcataacccagtcactactgaattgaaattgcatcaaacaggaagtcccaaaatgtatatatatctcagaagcattcttttcctcattggcctttaacctctatttatgcatcccacaacgtggttctatggaaaacgcgcaacaaatttgcaattgagaactttaaatatgcatcgtatcacaagtaacatactaacaggcaagcaaatagagcatatatgcatgcattgtattcgacttttcgagttctccgatcataaattgaatcatttcagtgttgtagaaatcaaaagatacgtggtaaataaacgaattattaccaggcacgtcaagagatttcttcacttctgaaccaacagccaaattcctcaccttagagactaaattatctggaacagtcgctttcgtcgattcaaaaccgccgcccgggaagctcgaagcgagcttaccagaagagttccggcggtacaaacccggtgaagactcctccgagaactccaactctccgtccgcagacaaactcttaggcgaggccgcaggagaagtcccaagcagcgagtctgacgctgggttgtagcttccaaccggtacatggtccccggcgaccggacgacgaaacgctgaatccggaaccggtacagcagctgtacgggacgttaggtcagagagttgacgtggcggaggaatcataaccggagataaggaattgctggtcggagacactgaggaagaggattccgcggcggttggaccggactgtgttcggccggacaggggttggacctgagcgtcgggagtgaagaatcctacgcggcggaccttggggtcgatgacggttcgagaggcacgacgcgcgtccatggagcgagaatgttagtcgatgtgaattggaggcgatagcggtgactgagacgactgggtggaattggatgccatgattttatgggtttggcttttgcctatttgaaaggaaaacgtagaagaagtagctagtatacatgaataagttagggtttcatgtggagcgggtttcattactagattctcagaattgaagatggcgatagataattggtaatacaatacggacgatatcggaagaagcttatatacatacgcattagggtgtttaaaaaaatttacaaaccgccccaaataaaccaattaaactaaactgagtaaa

SEQ ID NO: 14714 - DNA, 4881 bp, Cannabis sativa
  modified_base (4646)..(4648): a, c, t, g, unknown or other
  modified_base (4765)..(4776): a, c, t, g, unknown or other
ttagtcacaaaaaaattatgttagactaaaaagttgtcactaaaagtagcagttttttgtagtgatggtcatggcaggccatggctcgctctgtaagagcggagctcaaggaaacaggaaaagcactagaaagagaaagaagagaggcccaactttgtctgaccgagtgaagaagttgcatcagaagagaaagagctacttttagcagtaatgaatgaaatactcagctcaaaaagagatgaggggtccattaccatttataggaaaaaaccagtacaagagagagatacttgtcacctcataattacaagcactggaccacactaaaaatcaaggcataacataaagtaataacaaagagtagaacaccatgattaggcactaatgacaatataaccaaataattatttgttaacactacccctcaagcgagatggtgtctgagttactctgagcttatccataataacttgaaatcttgagcgcaagagccctttggttagatagtctgcaatctgatctgatgaaggcacgtatctgatgtcgagtagtttttgaaggactttatctctaataaagtgaatgtcaagctctatatgcttggttcttgcatgatagacgaaattggcagccaaatcacctacactcatattgtcacacaacacaattgagacagagttcaatgagaacttcatttctttgagcagagattcaagccaaaatatctctattgtaacatgagttaatgctttatactctgattttatacttgatcaagatacaatagactctttcttggaggaccatgacaccagagtctcaccaaagtacacacaatagcccccaattgatttttgtcattagggcagcaagctcaattagcatctgaataccctattaagctcaagttatcactgtgctgtatgtgaatcccatgatgttgtgttcctttcaagtaccttaggattcttttagcaccactatagtgaattgttgtgggacacttgagaaattaactcaattgatttacagaaaaggcggtatcaagtcgattgtaaacatggtattgcagagctccaattatgcttctgtcgtgtgaaggattttcaagtggtgtgtcatcacttatagacattggaacacctgtaatcattggtgtaggataaggctttatatttttcatttttagcttatctaatagttgaacaatctacttcccttgtttaggtacatccctattgagtctttgtgaacttttattcctaagaagtaattaaggttgtaacaaatagttagattaccatacatgcgatgataatatcatcaacataaactagagccatgatcacaaattttttagtttgaaacataaacaaagagttatcagccttggattgaaggaagccccaatttgttagagtctgtttgagcctgtcaaaccaagttcttagagcttgttccagacaataaagagacattttctaaattgcatacatagtctggtctgtctttatcctcaaatccttttggttgtgtcatatacacagcctcctcaagctttccattgaggaaagcattattgatatcaagttgtctaacatcccatactttagacacaacaattgtcaacacagttctgacagttagggctttgataacttgactgaaggtctccccaatgtccagacttggcctctagtgaaagcccttaacaacaagccttgctttgaacctctaaaaatgtaatgacaccctaagttaaatatgttgaattattaaagaattagggtttaactatgagattgaataattaattatgatttatatattgtagagatttatttaaattcagtatgcactaattatgctatatatgtgaattttttatttcccgtattttagttcggtagcagtggagcgtgacgttgggccattagagagtcacattttatatagtttagaattttattgatagcggggtatcagggttagacattgagagtgtcagaaagttgttgggattcaaaattgaccaattgcccttaggtggcatgtttgcctttgatttatatcaaggggtatattagtcttttctctgagacttttgtcttttgtgggcataaatgatctgattttaagttttatttgaaaaatatttaattcattttatcctaacaactaagtaataagcttgaagaacctagaactctctctaccattccctctctttcgaagcatcaagaaccagctaggagttgaacatttttcagctcaactcagtgaatcctagcagaatttgagtgcttcacatcaaggtataatctcttagttctcttatcttgattttcttaagcttgaacaagattttagtgtatgattttctagattagggttctgtgttgagaattaatgtttcagtttctgttttggggttagattgaggttatttgagctgagatttgttaggttgcttagttgtggtgatgatttggcaaagtttgagttttagaactcaaactttgacctctaatggtgaattgagtttccgtgtttgaaactgagatttattgcttaaatttggttcattatagtatttacaggtatttcggaagataatatggagtttagagttgaattgaagtgttggggatgtttttgggtgttcttgcactgaacttgtcgatcagttaagggggacctgtaggaaccggttgaccgattggtccccaagaaacccccttgaaccggaattctggttggggaaccgatctaccggttgggacaatttttgaaaccctagttttcccgtttttgtgatatttagagtattatcatgttatccatcgataaggataattttagttttggttttaagtccccagaaagtgttttagcgtgtatctcatcaaggttatgaaaattgtgatatagggccctgtaaagcgtcgagcagctattccactcaggctgaccggcacacctgagcacggaaatgaggtaagatttgcatagaacttattatatatgcatgttgtgtttgtgattgtatatgatttgggtgatatcatagcagcacaaccattgtgtcggtttggtagtacatgcatcatattggttaagagtgatatttaccccagagagtattaattggctctatcatggcggcacaaccattgtgttagttcggcagtacgtgcattgtactggttaagagtgatatcatggtcaattgtactcttgggtgctattgattctatcatagcggtacgaacatagtgctggtcccgcagtgccatcatagtgctggtgatatcatggttaatagcaccagccattaagaacattcttaatcatttggttagtcttgtgaataggtgtatgggcacctagacacaagtcaattttataattttttatatgcatatcttactgagtctgtcgactcatcagtttgtaccatgtgtaggtaaggattaagcttagatggaggagcagtgagttggggctcggcaaggattgtacatatcgcggcagtgcaacctggagggtttcgatcttatcacattttgagttttattttggtgttgccctgtattttgtaaaaaaaatattatgtaactttatatattctatatgtattttcaacatcagttttaaactcgggatcccgacttatgagattttataaatataataaaataagtttaaattcgaattagtcaattttcaaatacgggcgttacaaaaaacttccatttgtattgtacttcttcttctagacccacttattacctaccatattgtagttaggagaaggtggtacaaggacatatgttctgtttctgagcaatgcaagatgttcagtggacattgcattattccaccctttatatttcaaatccctattgaaagaacttggctcatcatccttttcttcccattttgtcttgctgagcttgaaaaaaacagcttttgatcgagtgaccatagggtgtgttggtttaggctcactttcttaagtgtcttgttcttgtataggttgttgcagttgtggtgaagacactgaacactcagcatgcattgtgtcaacaggattaaaatccaggtcaacaaacaagtggccaatcaaatcaatcttagagtgatgagatgagtcgggagtcttttctgatggtgatgttgtaggtgtagcttaatttttacttgtatcaacaagatgagtattgtttgacttattttgggagaatctgcctgagttttgttcttcgaaaattggaaaagacaaccaggtactaggagttgacacattaacagtctgttcatgttggtgagtattgataaagccagatttgaatgggaagtctatctcattggaaacaacatttctagagatataaagtctcccagttgaacttaggcacttataacctttatggaactcactataccctaggttgacacatctagttaagtggaattagaacttatgactttgatagggcctttgtaacaccctaactagcataggcgtgttagcgtgatttttaacgtactgtgcggcttgttgctaatcaatgaggttattgaaaatcgtgaataattgaaatttgcttatttaattaaaaacttaaagtattacatatatnnnatttctggatcccgtttacaaaatacttttttaaaagtttgctatacatataaacaaaagtttgtcgcccagggactatacaacaaaagccccgttgtcccaaagatcgtacgctcnnnnnnnnnnnnccccaacatgtacaatcttcacctgctcgtactcacggctcctcagctttagccttgcccttatctacacataaagatagcactgtgagttgagagactcagtaa

SEQ ID NO: 14715 - DNA, 6260 bp, Cannabis sativa
  modified_base (39)..(40): a, c, t, g, unknown or other
actttttagtttcaattttttatccaaaaaaaaaaaaannaaaaaaaaaaaaagatataatatattatggagttttccttttaaatatatcaaagataagatgactggaaacaaaacacaacacgtggaagcgaccctagcgagtatccacactagaaatctatggcctgagattgagctacttgttcctttatctcctccattttagtcaaacaaaaaatcaacttcttgtggaactctcatcttcacagacttgaatttaaagggttccttagctacagaattataagggtcatacagagtttgtgcgttcaacaatggcgtctatcactaatccattgctctcttcttctaacttcttgggcactaaaatcccaactccaaaaaccactaaaccagtaccaacccctttctctcttttctctaaaagaaagtttttcatcaccgaaaacagtctcagcaaagaccccaaatccaagacgttgaattccataccatccaaagctactttggccgcccttctcttctcgtcgctcgctccacaagccttggcgttggacaacgtcaaccctccaccaactcctccacctgtaatcgaagcccaacccagccaatcagaatcttcccccttctctcagaatcttctcctcacagctccaaagccccagtctcgtaacgcttctgatcttccagaaggtgggcaatggcgttacagcgagttcttgaacgctgtcaagaagggtaaggtggagagggtcaggttcagcaaggacggttctgctcttcaactcaccgccgtcgatggccgccgagcttccgtgattgtccctaatgaccctgaccttattgacatcttggccatgaacggggttgatatatcggtctccgagggcgattcgggtaatgggttgtttagtttcattggtaatttgatatttccattcattgcctttgccgggttgttcttccttttccgtcgagctcagggcggtccaggtggccctggagggctcggcggtccaatggattttggaagatcgaaatccaaattccaagaggttcccgagactggtgttactttttctgatgttgctggagcagaccaagcaaaacttgaactgcaagaagtggttgatttcttgaagaacccagataagtacactgcacttggagctaagatcccaaaagggtgtcttcttgttggaccacctggtactggaaagacccttttggctcgagcagtggctggtgaggccggcgtgccgtttttctcatgtgcagcttcagagtttgtggaattgtttgtgggagttggtgcgtccagagtccgggatttgtttgagaaggccaagtcaaaagcaccctgcattgtgtttatagatgaaattgatgcagttgggagacagagaggggctggtcttggaggtgggaatgatgagagagagcagaccattaaccagctattgacagagatggatgggttttcaggcaattccggtgtgatagtattggctgccactaacaggcctgatgttcttgactctgcattgttgaggcccggcaggttcgaccggcaggttactgtggacaggcccgatgttgctggtagagtgaagatcctgcaggttcgctctatgcaaacttcattcgtatgcttagactatagtttagtagtgtttccctgcttttagtgtaatgttatcatttgataggtaacactaggaagaaatctatagataattaagcataaaactggtatagctatttgagtaagaacattttgagaaaagttttaaaggtttatacagaatggaatattgactttctggtgtaatcttgattcaagtttagaagcctcaaatatagtaattcaagtctttatagaataaatagttgtcatcgagttcctgttttctaaatgcactatgctttcaggtgcactcaagaggaaaggcacttggaaaagatgtggactttgagaaaattgctaggagaacaccaggtttcactggagcagatttgcagaacctgatgaatgaagctgccattcttgcggccaggcgtgacctgaaagaaataagcaaagatgagatagccgacgctctggagcggatcattgctggaccggagaagaaaaatgctgttgtctctgatgaaaagaagaaattagttgcctaccatggtatgaatgaaatgttctctgttcttttcattcccaattcatgtgctactcgttatttgtttaggtgattaccatgttttgtgttccatttgcagaggccgggcatgctttagttggtgcattgatgccagagtatgatcccgtggccaagatatctatcattccacgtgggcaagccggtggtcttacattctttgctccaagtgaagagaggcttgagtctggtctttacagtagaagctacctggagaatcagatggcagtcgctcttggtggaaggttggttaacaaaaaactaatactttatatgcatttgtcaaatctttgattgttgaaatgttttggtagtttaggacttctctaatgtaagaatgattccttacacttccattactgatacagagttgctgaggaggtcatttttggccaggagaatgtgacaacaggtgcatcaaatgactttatgcaagtgtctagagtggccaggcagatggttgaaagatttgggttcagcaaaaagattggacaaattgcaataggcgggcctggaggaaatcccttcttgggtcagcaggtaaactaatgattagtcctgggttttttgcacaaattctgtgtttagaatatattttggttagtgctgtacagtccgagaacaagctcatcacgggtgagatggtcttttcttattgtatggtgtgttactcaataaggaaaaatcattggacccgtgaagggctcatcctcgtatcagagagcattttccatctatacggtatgatggcctaatgatcaagttaattaattgtgtgtcaaattcagatgtcatctcaaaaagactactctatggcaactgctgatgttgtagatgcagaggtgagggagttggtagagaaagcatatgaacgggccacgcagatcatcacgacccacattgatattcttcacaagctagctcaacttctcatagaaaaggaatcggttgatggagaagaattcatgagcctcttcattgatggaaaagctgagctatacgtctcctaaatttagttctgtgcaattattgagctagctcaaagtagtgaaatcatgtttgtattatatgaatcatacacatgtacacatcaataaccaatttattatttcgtgaaattcaaagaaaaaaaaatagtgtgaagttgatgttcaagaaacaacctctctctatgatacatcttcgacaaagccacattttttccactgatacatgatataacttcccatgctctatgttactacatgaacctcacttgatttgttacaacaatgacaaccaccacttaagtagaataacaaattgaccaccaattgtgcttttctgaaccaacaaaaaatggaaagaggaaaaaaaaaaatatacaggagcgcggcttctcaagatgctctcccaccacgttgcttcttgtcttccagtgcagcagcctcgtttaacatgtcggctgcatctttgtgcatgtctagctttgcaagggcaactgcctgcatgtaaaatgctgtagaccaatcgggataaacacactgtgcttgcattgcatctctgagggcggcatctggttgatcacaaagaagatgacagaggcttcgtcgggcataaacagttggtgaaaccattgttcccacatctatgaactgcaaataaagaatactagtaaacaaatattgatatatggtgagtttcaatagtttgcaagtcacacacctgagaataacagtctattgctgttttgaaatctttgtcgcgaaatgccaagtccccacgctttcttgcctccaacatatctctcatctgctgggtccattcttggaaagataactgacacaaaacccaaatttgagcatacagcaccgtacaaacctcttaaaacctacatgttaagcaatcaattttgaaatacctcattggttccttcatcgtctttgtagtgcgtcattaccaaaatctgatgaatggctgtgaggtccatccgtgaacaggcatcacccattgcagatagagggtgttgcggtgtagaaggtgcttcctcgtgctttgggatcccaagcatcatataagatggcacctacaagatatattcatcacaacatgctgaatactacaaaatcttgtgattttattatttaagttgtggacagaaacagacacaagctgttggtgtacctcaggcttaactttcagagcgacaagtgttgcaacaagatctttcgtatttggtcgctctctgggttcatactgcaagcaacgcgaggcaagctcaaaaaccacagtagcctcctcagttgaaaagtttccttccaagtgggaatccattaagagaagaatgttttttccccgtatcatatcaagcgcctgcatatatacaattaccaaaaccataaaactacacgtattatgaaaaaaaaaaacagctattaaggtaacaccgtaactgcataggcaagcatcatctatattacgaacaattgtttaatggtgttttctggatacaaaactaaccaccatttcttttctttttctttaaactaagtacctgaccactttgtcattagacaaccataaggtaacagaaaacctagtatccaccacttagtcgattgttaattaacataagaccaattagttaaaaaataaaaatgatcaaaacatcacacatcctcttgtgaccctttaatctttgatcgcaagaagtgttagtgttggtcagaggactattaagtaaaccctagaaagcatatccagagaaataatgttctcacataatactactacaccactcatgtaaattgtaatgatgaattttgagcagaacttaagtttggatggatcagtaaaccaatccaagtataacattattcttaggtccagtgggagattttattttattttaacttatttagtctccagtgaaatatttattacattaaaaagaaataagcttgtaaaactatttgaatgcaagttaatggtgtacaaccttctgtgattcagtatggctaaattgaaataaaaattgcacttatcaaaaaactcacatgacttggaggaatgtgctttccgctgagaaggtccaaaaggacagttccgaagctgaatataacactttctggagtcactcgtcctattatacacattgtatcattttaacaagatgtattaactagtaagcagatcatttttcactttcaaaatcaaatataactatatatcaaaagacaaggacaaagggataacaaaagatacaaactacaccacgccaaaataaggtactaccatattttcagctaaacacaaatatttacatgagcaaagaaataaatagttaccgtttcttaaatactcgggaggcgtatatgcaagattagtactataacttcttccatccctactgtttttcatcaagccaaaacaagaaagccgaggatcaccattctgcgaaaaaccatggacaaagttatcatgttgctcagatataaaaccaaaaccatgcacccaattatattgaactgaactactaaggaatatatcagcttgtccaaccacactgattaagctatgtacgttagcttaaaaaaaccataaatttcacaagcccaaatgaaagttcattggaaattacctcatcaaaaagaactctatatgcatttaaatcatggtacaatggacgaccttcagtactgcaataatctaaagcttctgctatggataaagcaactcttaaacgcatggcccactcaatggtttgattttcccctgtcaagaaagttggaaaactgattcagataaaagctcccgtatatatgggaatcctaaaattggttacttaaatcaggaaacatttaccgttaatggttaattctcactaattgatgaaaaagaagaaaaaaattataactaccacattgggagaatatgcataattatccagtatttaattttaccattaattacaaatgcccatcttttcatgtaattaaaataaataaacaaaattaataactgcaatgacggctagagttggaaccatgacctctccctttttcc

SEQ ID NO: 14716 - DNA, 12142 bp, Cannabis sativa
gtatttaagtttattttgccttttctctgtgttcccgactggttatacagagatgcatcttcttggaggactgggctatgcctcttgacaattaatctgagggggacctctctaagcagttcataggggaggcctacgtaattatcatgaaattcattttgagtttatggtattgaattcttggaacatgtcaggtagtgactttgagctcgagactgtagatctcgttgaagtagatgttgaggctgaactgtgggaaccagctttgaaagaagaaatcatagctcttgaagcgtcttcagaagaagaggtgccagcgcccctaggttaatattttttcaacctaagccaattccgaagagtttttccaaaaaagcttctaggcatattctctgttttcttcaaagattaacactcaactatttttggggagcaaacaaaattgtgcaaaggccttaagctagacccagtgcccaagttgacacctagcattgggcccaacacccaggttgacatattgtcaacctgggctattttcaataagttttctaaaaaagtgttaagggcatttttttcttcatcaaaaataacaaaggtacaagtaaactcgagggaacacaacaaatctaagagcttaaaaactgagcccagtgcccaagctgacttagtgttgggcccatcgtgttggtttcgatcattaaaatgcaaatttttcttcgggcattctcttcgaaatgatcaaaaacaaggtaggagacctcatcctcaagttcaagaaccttggaagtgtcaaaacaacatcccagaagctctaaaataagcccccagcgcccaggttgacatatggcttggtgcgctaggttctatttatccaattataattctgtctcgaccattcgtctagtttttcatagtaattaggagctaaattcagaagtgtcaaattcacaacttcatatttttactttttcagcaaagtgacttattcggaaaattggggagtttcaagtttccgtttctgcaaaacagcaacatctccgagaactagtaaccaaccttaccagaacacataaactagttaagtgatgtccaaatatcacttaggcatcaataaatacatccccatcatgtttttactcactaaatattgcaccgattaatgtgattcaacttgcctttcgaagttatttcaatgctcaatcaagtcatgtctcatactccaattgtaattctgaagttatcgactccaaatttcaccatcaagagagttacgaatctcagctgcaaacttactcgaagcaagccccgcggacgcgactcaagctctaaaaattgacgaccgatctcaagagtcaatttcatcgttagatcatcatcaacggtcaaaaataacctaaatgtactttttttatattttttttattattttaataggaccttcttccctataaaagtagagctccactagcttattttttaagttcagaaaagtgtccataatgtcaaagcatctctctctagaaattagagcatccagacttagtcatttttctgtaatccatctcatgagaaataaaactcgaagtagacgtagctctattactgtcgcgatatagagagtcaactactacaaatcgttgtgtccctcttatttatacttaacttataatatattctcgtcaatctaatcaacgagtgtgaccagatatttgcgtccaaatttctgcgtcaataggtatttagacatataatgagatgtttggatgtgttaagtaagagtgtgataaggtggtaagggattggataagagatgctctccataaactctcacatactcgattaagctaatatttatttatctataattttacctttttaattaataatgaatttatttatttataaatatatgatatgagatgagttaaggactacttactattttttttaagaggttatggctactaatcaagccaacgtggaggatcaaaccaacccttttgggtgggtcttttccacgttttgatggcaaacctatttgatgaaaacaatagttacataattcaaattgacataatttgttgggtagctaaagaaaagaaataagttgatgtaatgtaatatttggttgttacattaaattattgtttgagatccaatatataaataaataaattgaattctatttatcaaaatgccaacacaacacttgtattattacattactattcttctatatcaaactacgtcagcttaatagcgactcaaggcacaattatttacataaatccacccaaaaaaaaagaagacacgaaatgagcgtgatataaattttattttcggtacatttgaagaatttttttatgtgtgaataaaaaaaaaaacaaaagtgcacttttattaaataaaaagaacaagaagctgcagaagaaaaaaaaaggataaagatttagatttttaataaaacgacattgaaatgaaaaaaaaacagaggagggagattaaataacactctttgaacccgtgattctctgaaatcatttctattttccgtgccttattacataaggaaggaagaaaagaactcgtattttgggttctttccatcttcgtatgcgttagtatttgtatgtttgtgtaagataaatcataaatttctaacgaactctttaaaccacagttccatgaccgccaccaccttcatcgaccgcccggttatatgtcggcggtgttgaacactcaagcttcgacaagcatcaatcatcttaggcttgacagcggtcagatttcttattcttggttgtttttaaatttttctgggtttcctccgggatatcaatctgagctgtgtaagaccgtgtcgaacgccatgaatccgtcgaatgctggaaatagaagttctgggttttcgagtacgaatgagaataaatcggatttgaggtttgagaccccgtcagtttcgcgatctgggtctggtcttacgaggccaaggtttgtgaaggttaggaagggattgagctcgcagaattcgaggtctacggagatccctaaaacgcaggttgaccttggatacaatccatttcgacccatttcggagaactcgttctcggcctcatccgggtccgaaaagggatcatcaggttcgggtgagtttgggattggtaagagtggtaatgacgcatttgtgtttggagcggacaagagtgattcgagaatttatgttgcaggctttgaaaaaagtatggtggatgaacttaagaacatgaagattggtagtgagtttattattagaaaagatgatgtttctgattcaagttcaagtgttagagctggttataaacaaagtaacaaagttgatgaaagcattatatctaagcttccggaagatttgaaaaagttggacattggaggttctggggatgaaaggtttggccaggattccagtagtagtatggacatgaggcttcctgaagatatgaggaagttgcacattgaagaccttggccatgagaaacaagctgagaaagttggaagtgaaaggcttaatgtaagtggaaatgagaatgtcaggtttggatatgggagtagtgacagtgctggtggttctgttaacaaaaatatagagtttgaacttcgaaatgagttgaacaagaagttgaatattaaagaagaaactggtaagcctgatggtggtagtgtcagatataatgcagatgatatgaagaagtttgaatttggtagtagaatgggtattgatccattggcttctacactttctgatcagataaataatttgaacttaaaggagtctctgaacaccaatgacacagagaatcctgattttctaagttgtaaagataagggtagtgattatgatggaagaaaaccaacttttttctcagcaaacatggaggaagaaaagggtagcaggactggatattttggtggcatgttatttcataaacttgataagactgaacataatgattcaatcattcataccagaatgcatggtaagagtgtgagtggaagttcgggccaaccaaaaaatgaaatcaaaatgagtggaggtattgcctcatcatcgtcttcattctcatctagcagcagtcctgctcaaacagccacgaacaactttgaagtgccttctatgaatacacctgaaaagaagaatgaatttatctttactagcgcacgggaaggttttgggacaccctcttttgaatttaaaaccccaacaaatctattttctgggatgaatgagaacttggaatttagtgcaaagagggaatccattagagacacagtaatgaagaaaaagagtggcaaatcgaaacgtccaacgaaagtccagctatggctcgggcaggattttgtctctagagaaagcatttcccaggaaattcctgaagcttctgactcctattcgccaatggatgtttctccatatcaggagatattggctgatcatcgatgttctagagagaattctgtgacttctgatgatactttcagtgttgataactctatgggaactgattcagtacaaaaagtgtcaaacgatgccattgacgaagatttggccatggcaacagaacgtatgaatataaatgaagggaatgtaccatctggagaaacaaaagaggaaagctttgataataatgttagtgccgaaggcacccttgaagattgtgtttctggggctgaaactgaaagctttaagtctgcaactgaggaggtagactttattggtgataacacagttactgaaactgaagccagctctagttcaaatattgagggatatgacaatgatggcaggacaaaatttggtattccctctagttctgaaggtttaggtggctctaacttcaccttttccgcagcttctgctgctcaaggtcaatcatcctcttcaaaacgtctccttaaaaaaaaaaactggctcaaagctgatacagacagtacaactccaaatgctaagatttcctatgcaacatcctcttcgcaatatattccattctctgcagcacgaggtacgaaaggagactcaactatcctgcaacggaaaagtagagagagttctgaggtaggtagagctcaggctgtcaaccaagagtctgaatctacctctgctgttaaagctcaggaagcttgcgagaagtggcgactaaggttagagtcatatcttaatgttttcagttggtaaatgttaataatagctgatattttcttgtatttctttcatatttccttttgaagcatctttgatgttggcatgtgggcactaacagatctttaaatgtagcattaggaatggtttatgtatccctgcttttaagagtcttccttttttgtcatatatatgatataaatcagaggaaaccaagcatatacaactggggatctgtctaaagctgaggattgttacacacaaggaatgaattgcatttctagaaatgaggcgtctaggagctgtctcagggcattgatgctctgctatagcaatcgtgcagcaacacgcatatctcttggaagaatgagagatgcacttgtagactgtacgacggctgctgaaatagatccaagctttctcagggtgcaagttagagctgcaaagtgagtttttgaattttgctgtcgtcgatattattttggccattcattattttttatgactttatagtgttttatgtgatttcatcagttacatacatcggtctgtttacatgtttgattatgcattgtttggttgtaattttgtaaattaaatatatcatggcaccaatcttttgctagatagtctttcagtctgttttgttatttatatcttcctttgttgaatttattggtcttctggtgtgatgcatagttcaactttttttcatttcacgaggcaccgaaaaatgagaaataaatatgatgtttccataatctatgattttgatttttgaagttgttatcttgcgcttggggaagttgaaggcgcttcacggcatttcaggatgtgtctgcaagctggaagtgatgtgtgtgtagaccgaaagattgcaatagaagcttctgatggcttacagaaggttcaggtacagtaatttgtttatgtttatacttggtatacagtgatgtacatgtatccattttcatgtagatacctgtatttaatgttatttagtcttatgtaacattatttcagaatgttttagattgttatctttgctgaagtttgttagtctaaattttctggtgtgattgcataagtatgcaaaaaaaataaagtgaagttgtaccagtgttttgtatctttacatgtctgtacgctgtggctattatgagaagcttgatgctatatactctgtcatatgtgttttttcctcttctctctgttctgctcctattaactattgccttaaactaacttgtgtaccgtgattggctgacagaaagtctctcaatgcatggagcaattggctgaacttttgcacaggaaaacatttagtgatgcaaagagcgctttggaattaattgccgaggctctaaaactaagtccatattgtgaaaaatttcttgaaatgaaagccgaatctctttacttggtttgtgcttctctgttttcacacacactcacacataaattattggtttttaagcatttactagttttggaatgatctttgatagttacggggtaacttctgtgtcttattagcagattcgtagatatgaagaagtgattgagctatgtgagcaaaccattgtttctgctgaaaggaactgtcctccagtagatactcttgaccagtctgcggatatggatgtttccaaactttccaagtacttctactttcgtatttggcggtgtcatcttgctttcaaatcctattttcatttgggaaggcttgaggatggtcttgcctcattagaaaaacaagaggaaaagctgtcagctacatacaggtaacttccaacccatgcttgaacttcatttaaatttcattgttgtggtggtcagactcagggttactgtttgtaatttctcatgctaattgtactgtccaggaatgaaagcaaaatattggaatcatcaatacccctcactgccactgtgcgtgagctcctgcgtcataaggtatattatctatatccatgcgtatcatatctctactatatagttacacacgtatgcatttaatagcttaaagcatagcagtaatctcaaagaggtcaaattaattgtcttccatttactgacaatatgttaacttactttggtacagaatgcagggaacgaagcatttcaggctggaaggcatgcagaagctgttgaacgctatactgctgctttgtcatgcaatgtagaatcacgtcctttttcggctgtatgtttctgcaatcgtgctgctgcctacaaagcactgggtcaaattactgatgctattgcagattgcagcttagctatagctcttgacggaaaatatgtgaaggtattcttcttaaccgatttcatcagttcctcttcatgtttcttccatgcgccatgtttaatgagagactgtcagtggagtggtggtatgaataaagtttataggagttttatactagagactgattggacgtttggttggatgcggtttgcacatgctcatgttttcctgacattgcaaggcttgatggcggctccatcttcgaagttgaagttgataatcataagtgaaagtggactttttttatgtcacttggcaaaatagcattcttttgatttataaatttatatatttttatatttatatatatatatatattcatcttttttttttttgtaaaatggcctccagccagggtgttgattctaaaagagcattttgcaaagaattatcaaaactagactactgtacaaaatgactaaaaacgaagttattttgtcagaggaaatggaaaaagaagagttaagtttgcacctgaagattacttgttgctgttgtttaggagatatattataaaatgttctttggtgcagaatcgacatgaaaactcgaaagagagattttataagataaaagtagatcttttcatatgctgctggttgactaggtgttatatacgttgcttaattgggtttatattttataggccatttctagacgagccactttatacgagatgatcagagactatggacaagcagctcgtgatcttcagagacttgtatctcttttaactaagcaaccagaggacaaggcccataacttaggagcatctgatagatcgaaaagcggctcaaatgatttgagacaagctcgtttacgattatctgaaatagaagaagaagctagaaaagatatgccctcggatatgtaccttatcctgtgagtttctttttcccctaaagctttgactattgaaatttattgttggttgagctaattttgtgttgttttaatgatgccaggggaatcgaaccatctgtttccgcttcagaaattaagaaggcttatcgtaaagctgcacttaggcatcatcctgacaaggttagctacatgcattttttatttttacctgttatggcaatctaaaatctaaacaagtcaccttgtcattccaggcaggtcaattcttggcaagaagtgataatggtgatgatgggctctggaaggagatatcagaagaagtttacaaggatgctgataggcttttcaaaatgatcggggaggcatatgctgtgctttcggattctacaaaggtgtgctattattgtgcttgaattgtcatttatgcaacgctaaattgttagactttgtcacagataaatggatgttggaactcttcaaatatggcataaaatataaagtgtttggagtagaaagttgatctaggaggttgattattattttcatatattctcatgtctgaatcttgtatagttatgtgattgtttattggtcaaccactctttgcagcgttcgcggtacgacgctgaagaggagatgaggaatgcacagaagaaaagaaatggcagcagcacatgtagaacccaaacagatacccaaaattacccatttgaaagaagtgggagtaggcgacaatggaaagatgtttggaaacaatatggtggtggaagctcgacatggtcagaagccactcgatcaaataggtattcatgaaaactatatttggacaggactctagtttaaagaagatggacatttttccatagctaccagagaatgtggcttcagtttgaaggtcaaatataaatgagaaaagaagtttagtggcatagaaaaggtgaaaacagccagataatcagaaaggcaagcatcgggatttgtttcgagttgtgaaataattctttttactaattcacaaaagcacagaagaaatttttttttttgtttctttgttttttccttgggaagtttgaaaggtatccagaagcttagattgatgatggtgatggttcggaggataaatccacacggaatgtgtacaaatgagatggagtataacttaacatgcagatgagtaaaagctaagccagaaagtaacttgcttcaggagccaggagccaactaatctggttgaaagaacatagaggagactgcagaaaggattttcctatgggaagaacgatcaattttgtgttgtgtttgtgtgtttaattttttcctttatttttttcacctcattgaatttcaaaatgaaaaaaaaaaatgtttctttagaatatactgtcgataaactgattatacatgagttgatagcttttccactgtatagttgtatttcttttctaattacattaactataattgcagaaaaataaatatttagaggaagtttgaatgaaatatttctcctttcatttccattcaagtttctttatcttagaaatacatttcttgaagtatattatcgatgtatatgtttataaccatctttcaagtcatatatatatatatataaataaatttatatatataatagtgtttgaaaaattgcatatttttctctcctaacaattatggttgtgtaacatggggaaacctctttaaaaaggtttcaaacttccaccacctgtttagcataaaaacaaagaaagcttattaagtggatagccaattgtatgactttttgagtcaaccaaaagacatgtttgtatcacagatgataatataatatatatatatatatttatatataaatgcatacatctcaccatggagaatggtagtggatgagctgaaggagactactagtgattcttttcagaaccttatacgtatatgcctaaaccaagctcctttgggtttgtttccaccatccaagctggtctgttgagcaaacatgttcagttgtcactgtataaaataagtaaaagagatgtaacgtaagatgttaatattttgtgttatagactggaaactatacttgttcataacaaaattgaatgttccttgtgaaccgcgtttgagaagaacttcccttgcctccacagcaattccttcaggctgcaaagtaagataatccaacaaaatattaggagttaagttttggcctacaaatgcctaaaacatgtattttccagcaacctacctcttctggaaaccacaccccaggctttgtacttccctccagaacagcaagagcaaatgcagcagttgcagttccaactgaactgaaacacaaaatgtatatattgaagatgataattcattggagagctttttaaagatagatgataaatgctttggtacttacacagagagacttttgtgactgaataatccaatagtattgcgcccatttggaaactccaaatcaacctgccacggataaaaacagttagaaacaaattgtggaaaagaagagtggggtgttcgttatttttattccagttctcctcttcttactctcattgagactctctctccagcgaacccatcaagcgctcgaactatgggatcgaaaagttgaaccaactgttgaactttgtttttgtctctgaaatattcctgcaaaaatgaacatatgcaaattaaacctggtacatgtcttaatttttgataacaaaatcatgtactactgaaaagaaaaaaaaaacaggaagaattggaccatagtacaataatcaaacagcaagtcatgtatgataaactcctttaagtaatattaaatatgaaaaaatattaatgtgtaaggtaccatagggagaagacttgtcatggcctccatcccccaattccaaaagaatggtgcagttccaaatcgagcactgacagtcggtattcctaggatttcatgagcacttttaacctcgggcagattcctgaaaacaagaacccttttttcaggcatctgtacatgccatcacatgtgcttggaatccaatatcttaacaacacaactggtatattggtaggtgcttacaacagataaacgtctctctttccaatgccccttccaaaatcaatgttgagcattccagtatatggctttagtttgatctcttttcctaacaacccattattggttctattaaatcatacatatgaagatgtgatggaacataaaattcaaataacacttcacaaaaaaagtcttcagaaccaacctttattataagcaacaacctcctctccaagtagcaaaaagctagtggctaatatagttggaccagccccaccagtaccggctgtgtaatagtagaatcttcaaaagaagaagaaaaacttggcagataaattgcccggacaatagtttcccctgtctatgtttgatcagggacttccaaattcaaatctaattaatgttagtaatataaacttgttcgtcaccttagtctttctggttctaatttgttttcacttcttgctagacgaactagttctgctgccattactgtcatattagagcaattgttttttagcattccagataaaactttgcatggtagcagtatgtgccatattgtattacagaagaagaagaagaaaagcttatgagagaccattgctcactccaggataaattccaccggttgtaatagctggtacatttgcagcaacagctctgtccttgaaggttttagcaagttgagcgtaagatgtatcatcacaaacgtctacataggctgtctgtaagt

SEQ ID NO: 14717 - DNA, 3604 bp, Cannabis sativa
atatatatatatataataatgacccatatgaattaaaatatttatacaaaatccatttaataataaagattaaaattcatatcataacatatgataaacttaaatcaacttcataaagtcttattcatgttaattatttttttaattcaattgttaaagtctcttcattcattgtacaaggctagtaattttctttattaaatggtctaagaaaattaagaatcgaaaggaactacagttataaatacaaatggtaaagtaaaaaaaattcaaaactaggaacaaaaaagcaaactataactaaattatttacaaggcataggagttatatattatgtcctaaaacataacaaaataaaaaagaaacatactcattttcatattacaaaagcataaagaaatgccttcaaaagaacatcatcttcgtccatatcaacagagaaaaagtgcaataaacacagaaaataaacgtagctgtgaaatcatattaagtttgaatccaacaccattggagagacatgcaccttaattaacaatgagattgttcaccaaacgattgaaaggtcaaaggctcatatcaatgcatggcattataatgaaaatacttgagcagagcttctcttcgttttcaatctttttccattgaaaacacagtattagctttattctcagacagtaaatatggatgcaggaagaaacataatagccatgccaaatttttttaacaaaaatttcttgctacattaactcaaaaatacaatgagatacctataaaagtttaagcagccacaggagtggtaggagcatctttcttagactttgcggacaaaaatagttccaaaacatcagggtcattacggatgaaaccagggcatttagaaaggaaagtatgtgcttcattgtgccttctggccttgaaaaaggcttcaaataaacgaagcactgcagaggtagatgggaaactttttgaagtcattgccttcagaaaagctatagcatcatctccagttccatgttttgcaacaaactcgataagtggatcaataaaaggtggaaatccgttatttctcatcaactccaaaatattcagagcctccccaaatccatcttggactaatagatttgttatcaatgtttggtaagtggtatgccatggcatcacccgattttcagtgatcagatcattaagaagcttgtaagcctgttttgccttgttccttttgcaatgtgcaaccacaatcacatcaagagtggaaccaatggacatagcatcttcgattacaatcatcttccggaaacaatcagaagctttcttaagatctccgactgcacaaagtccctgaattattgttttccatgtcttctcatctggtttatagctgtcttcaatgttatccaaaaaggcatgtgcttcatcctttttgccaatacaatttagctggaatacaattttactctgcagatgaccactaggtacgtatccacattcctccattgctttcaaaaccttagtatactctccaactctactaacactagctaaagacttgagaacggcatctagagtagaatctgtcagcacattcccattgtctgtaaaaaccttcacaaccctggaaaacaaactcatatccaactgcttagccgagactatcttcctcaacagaaatttttcacaatgtgatgaaggcttatccgaaccagccattgcatattcataaaaggttacagcttcctcaaacatttttctcttacaaaaccgccctagaacagtggcaaacgttatcccctctaattcaaattgaaagctcctcatctcatcaagtactttccaaaacctatcaatgcaatcttcccttccaagaactcttgccatagcattataagtttgttgatcatgcttgaacaattcactctcatcaagccacctaaaaagtataagcgctttcattggctcggtgctaagcttatctagaatcattttaaccatatcactagaaaaggttacattcatatccttcaattgtttttcaacatcgtccccccatacctcatttctgataatcctacaaatcctcacacagatcttttcatccgagttgtccaccgaccctgaagaaaacacctctttcaatttctcaacgtccccatccaatccttccccctcacatttctccaaagctatatcacgtacgccctttgatataccatacccatttttcttcataatctcaaccaagccccagaactcactcacaaacccattcagacccagaatgcgcaacatcgaattataagacttagaactcaatttcttttcttcactctcagatacccaatcaaaaaacctcctggcaacatcaggactagactcaagcttttccaaattccataatatgaagtcatgactaaccacaatgttatttgattctaaatcattcttaatctcctccaaactcttcggtttggagaaaatttctaatacaacagcgtgatccgaatccttaaattcaagcttcggttcggacgagaaattccgaaacgaagagattccagggtttaagtgattgacgaaattagcacaaaaaatggattttgaaggagaaagcgaaccagtgtgaatgagtgaagtgagagatcgaaaggagtcgtggttgggaaaagatggtacctgagagtacgagcggtgtacggagacacgagaccccgggccaacgcgagatcggagaagtaacagacgccatgaaggcctcattgtaagttctcagtaaaggaaggttttttttttttttcctttgatggggctccgagcagggtgttcaagcgagtgagaaagaactagtttagggtttagagagcgaatcggggttttgacccttagaaaaaattgtgtaaagtgaaaacgacatgtcgtttctttaaacaatccctagcatggaacatcactggtttattaagtttttttttttcaattattattattattttacaattgtatggttattaattttctaattctttttttgaaaaaaaaaatgttgctggttgatttttattttttagagtaaatattattgtggattctgtattttgtaaaagttatttttttattttgttaaatgacaaaatgaactttatatttttttaaaatggtacaaataggaccctgaactgatttttaaacaaaataaaatttaataataattcgatctaaatgtgttatgacaaatgttatattaaaaaaaaaattattaaaaattaagctcatgatcctatttttaccattttaaaaaaaaaaatacaggatccattttatcatttaacaaaacagatagtccacaaaatactcttaataacaaatatataataattttgttcaacaaccgaaacattattggattcttttataaaagccttcaagtgctcaaattaaaattaatatgtttctctaagttcagttcaggttgtgctaaagtctcttccgaaatcaaaaagaatgttttattagttatcgggttgtgaaaattatcatctaaaggttgcttgaaaatatctaatttgaattttaaattaagaatttttagaaaataatatttttatgttt

SEQ ID NO: 14718 - DNA, 4776 bp, Cannabis sativa
  modified_base (4709)..(4718): a, c, t, g, unknown or other
  modified_base (4744)..(4749): a, c, t, g, unknown or other
tatataaaaaaaaacttttgaaaatgtcaaatggcacatcctcctctcaccagtacaaagtgagctcccccatccgtcaagtctccattttccaaaaaaagtgatcacctcgtaaaattgtaaataagaaaaaaaaaagaatagaaatgaaaaaaaaaaaggcccatcccaataaaaaagtaaaaaaagtaactttttaattaaattttgtaaatttccctttaattaatgcctttaatttttactctttttttttgatataaaatgctattatattaaatgaattataatacattagtcattagaggaggtgaaaattcctccatccatacacattctatgtccaccgaccctttcttttaaaatttattatgtttactttttttttttcaatcattttaccaattatatctttatcatttcacgatagtttttattttctttaattaaaattttgctccaactttttcacaaacttatacatccatttttaaaaaacatatatctattatgtttaaaattatgtgttagttatgggagggtgtgagaatacccaattaaattttatttgaaggtatatttggctaatgtatatatatatatatatataaaaaagatattcttcaatttttcccaaaaaaattagtgtgattttataaaaaagaaaataaaaaaaatgaatcatctattgagtatgtgtttaacaattaagtaaaagtgtaagaacactccaacaacttttctattctatcttttaaaatatatcacaaaaactctactttctgtattttacaatatacttttatttttttttttgaaaagaaaagtgcaatatatagattaatagcgttagacctagtggtcattacaaaataagttcgaaagtaagtctgcaacattacaacagccatacaaattatggataaacgcccacttagggccacaaacttacaagaccgactgatattagagaaattacaaccaaaaaaagtaaaggggtgcatttcattaaaactttcattaaaactttattttttttaaaaaaaaaaaatattatattctattcatttcaaatttaattttattcattttcattcatataaatgtagagtatgaataatgtattttaaagaaacttaaaaatgaaggaaagtaatttgcggcataaatacgtaagtttaacttctagttgtaaataaatacctaagtttaatttttggcagttataatacctaaattataattctggaacctttgtaggtaccgttaagtgttaagatatgatgaagcaatcgagagccaaggactgaacagtgggaatgggataccattcaagttctccactgtgaccggagaagagagatggcatcctctgggttgatgacccaagtaaccacagttgtaacagaaaatgccgagctttttgaacttgaactggagccattttttccacctgagagtaagtcgaagtaacatcctgagaacagaggtttggtgatgtcaatctctacccaaatcttaagaaaattgctccaagagactggtttatcttccttatgtctaccttcagcactttaccagccaatcctcccaaaaaattaccgttagccgtggagtagtattcatgggggaggttgtgtatttgtacccaagttttcaaactagcaaagtgaagcttcctattctccctcgaggaccaagcttggagaatcagagaataccctcttatgcaccaagggtcgttatccaaagcccaatttctatcctcaacaagttcaaaaccaaactcaaaacagttagagttaatgccctcctcataaatagcagcaacaaccactgctttatgccaagatttactcacaaagtcaatgaatgtggcttcatcaacaaacattggggccaccactttaccataaaaacaaaaggtagataaagccttgagagaagaggcacaaggagtaagagtgacagatgcctcattgcaagaaaaacatttacccatatttttggtcagatatctattatatctatatttttttcagcttccatccacatcaatatattttgtctttagtcttaaaaattgaagtttagttaggtccgaaaccaatccatggggagagcattcgaagttcacttattcataaataaacattgtcagttccttctaccaaccactttccccattctatttgtaatttacatactagggttcatttatagtaaatactattttgaattttgtgttttgtaaaagttataattggaccatccgttttgtttaataacaaaatagaccttgtaatttctaatatgatacaaataggaccatgaattaattttttgtcaaaatcaaacttaataataattcgatctaaaggtgttatgaccaaactaattttttgcatctgttcgtgttaagaattattttaaagttgattatattaaaaaaaatagtcaaaaattgagctcaagatcatatttgtaccatttaaaaaaaaaaacacagggtctattttatcatttaacaaaataaagagtcaaatctataactttatcctattaatatttatcctattaaatataaatattaactaacattatatttagacagaacattatattgtattaattagaatttaccactataaaatttaatacaatgtgaatcgtattatttaatacataataaatactaaatatagtattattttaaatagggatatgagcggcaaaaccacatatacttattctttaacaattaaccacttaaattaattttttggtggcgaaaatacccaaacctctttttctgttagttatttacccttttcgtccaaaagtcgaattaaattgtcacggtgaactacctacgtgtacataagagtacatgtggcaaaattttgatggtccacgtaattttaactttaaatataataaaaataaataaaaaaaaaaaaaaatctttttctttttcttttctttctctttctcttttttctcgaacgagaacccccccaacccaacttcttcttcttcttcttccattaccaccaccacaccacgaccatcccaccacaacaattgtcatacctcaaccaccattatcaccatcagtgtcccaccattaccaccacccttatcaccaccatcattattcccaccataccaccatatccaccaccacattttcactaaatctaaaatattttcaaccaccattatcaccatcacaagcattttctttaaataaaagaaaatatacagatctgaaatactttgcttcaatgcgtatctcacctcctctccatctgctttaaaatacttttcaagcaatatttgaaaaccaaaatactaaactaaactactacacatttctacattctctctcttcctaatcagcacacaatttcccaatatggctttcaacaccaaaccaaaaaagcccaatatctcatccccttccaatttttacttttttaactttcaaaaagtattataattacaaaaatactacattcggtttcttttttttaataatgtgtcttccctctcttcaagtctccataactattttttctttattttcttcccacgatttttctgttgaagctgaactctcaagctctaagccttacctttccaccattgtcgttcaattgatatttgtaagatcatgttcatcatcttcttcttcctcctcttcttattttcttcttctttttctctttttgttaaaattacaagaataaaagtttgaatttgatagtttttattagagtttgttgtttatttgcttattaatcaatgatttttctattttactcatagattttattaattttattgttattctgaatgttgtgtttttgtatatatacatataatagtacacctactaggtgtttggtgaaatgctcaagagaattaagtcttcttgattagcttaaagaaataaggcatattcaaatgtgattttatttaaactttatgttaagtatttttgtgatattattttgatattacttttgttgatctaagttttatctttttataaattagagattttatgtaaatattttaaatgactatgttgatttaacgttctttataacttattttatagttgtttcatcttttaatttattttgttgttgttgtttcaccaggtcatccattgaaaagtttttaaagacaaaagacgagataatgatgtcgatgttgtaacttaaaagattaatgtatagtttttgttgtctgtgtttggtttcaaagacttgttttgttatgtttacatatttttttttatgtatttagtaagaagagttgttcaaccgtaaatagtttaggtctctcactttttctgtctataattagttgtttttagttttaatttagttattatacgattcttattatagggctcttaaaaaaactatatcattgggttaggtcttacatttattagttatatttgagttttataattgaagttgttttagtttcatgattattaagttttaaaattacgttatttttaagttgttatattgttgtttttatgttgttcaatacatgatatacttacagttttgtttaactattaattgtatttttatcggttcattattttattaattttgttatcttaatatttttaggtgcgccataagacctctaatggtgttgatgttggaattattttaccnnnnnnnnnnatttactaacaagtatgttatttaannnnnnaaatatgaacttctaaaatgatatgaa

SEQ ID NO: 14719 - DNA, 4008 bp, Cannabis sativa
tagcgcagagcggttgatctctgggattgaagaaagaaagatcaaagatgagagtagcgctcttcctttcgatttcattttctctgtttcactttctcttagccgaacaagtcttacagtttcacgtcggaggtaacactcagtaaccctattctcagtttgtctttttcatctaaatttgggccatttggggttcaaattctgaaacccatcttcgaattaatcatgcccttttatctctttcaattactatatttatgtatagaataaggttgtgaacgccatatttgatgtttaattaactatattctgattattatctttaaaaaaataggtggctcatttgctcgaagctctcgtgaaccaaaatacaatatcaaatttcattctgaagactcactatatcatcctgtatgtttctattattattattttttcttttcttttctgggatcttctgaatgtatgatttgtagttctatgtgttaattagtttagatactagattgattcaattagtgattttattgatgttatgggaatggagtttgtattttgagattcaagattctcccactttaattatttattaagcttttcaaagttctgggcagtgtaacattgtagtgaaaaggctcgaaactagaaatattgttagcttttcaattttcaaggtttttgatttctcaggggatcttatcaagctatgtgctagaatttcttgtttcctaaagatcttggtgttcaatgggaagattagaattaaatcaattggatagtatacattttttgtaataactttaatatacatgtcaattgataacacgatgcacataaactgcaggaagatgaccaagagtctgtggtgatgcccaataacaatgggcagaattacttatgttacttacctaaggtagaaaaagtcaagagtggaaagacggttacgcagcataatatcagcagcatgatagtagagagtgagaaaaagattaagttgaagacaccagatgagttgcttgaagaactcagggatcgatgctttgttagagtaagtactataagtcgtgaaattactttgaaaattcgtgattcattttagcattgttttaataatgaacttataaacgtagttcttgaatataaaacgcacaaatgcataccacaatgtctttctaaaatctgcaattatgcccttataagtgattgtagctcttagggaatatttggaatgctggataggacatgaatgagactggatgattttatcatgagatttggtagaatatattggaaaaattagcccaaactttaaactaattcatcgactagataattttatttcattaggaaatccgagataatttttcccagcaatatatttcatcttcccacacacacatatatgaacatatgaaaagttgcattaaaaaaatatagcaaattgtacggtaatgattttcaatttatgaattggcatttctagtgatcggataattttttttttcaaatggatcacgattgtggaatatacatctaacatttattcatgggtgaatattgacttacagtaccaatccatgtatacctgacaataaattgcaaacaaacagctcttcttagccctcttatttggtcaaatttcatgtttggaaataggcaactcactcatcttctttttctttttaatcttacttgataattatttcctatgttatcctactttacgcaccaatcgagaccttagttactaattttacctattctccattgcagcaagaaggttggtggtcatacgaattctgctatccaaaaagagtacggcaacttcatttggaggaggaaaaggtatttactatttaggctaccagcctatgtcatgtttattgtcgtcttttacatgtatctattggagggaagggcagggggtattgatgttgacacacacatcttctgatgcatttatccactttagttgcacagctgatcttttgtgttgtaattgttatgccactactagttgtgtgcttatgatgctcttacttcagaaacctacagttgatatgtctaagacgaagtctaaatgccagtagccttgttcatgtttaaaatcggtcagaaccagactatactgataataatggtattggatatttttttcatttcaggtagttcaagagttcattctcggtgagtatgatgcagaggctacagccgcttacaatcagaatctctcagacatatcaacacttaaggaccctcgctcaaaagatgcatcccaaaggcaggatattcttaatattaaaatgaagaattttttttttttttttttttgtggcagagatagatgattattaattacttgtatgtttgtgttcttctaggtatcatgctcatcaatatacaaacggaaccttatgtgatcttacaaatcaaccacgagagactgaggtacaaggatgatgttacattgctgtatactatacaacatcttttctgtctctaatgtcaaaattattcttataatcatttgcaggtaagatttgtatgctcagaaccgagagctatgataagttcccttacagagctatctacttgcaagtatgcacttacagttcgaagcccaatgctctgtcagcatccgtaagtcctgccttcctctctcgctctctttgtatatatatatatggtataactggacatcaataaatgactcatatttgttgatgagaacacgtgatttgcattccctcatcttatttttctgatcatcttgtgataaatgacattaactggctctattttgaaatggcagcttgtttcaagctgagagaccagtgtggtacaccattcactgtaacgagcttcctaaggataaggaaactagagtggccgaagagttccagaagagtaagcagattgttacagttgctgaggacgaagatacatctaacgatttgtcttgaccgacacaaaacaaatgcggatacacacaagatctttgctgatgtcaatcaaaatgaggcctacataatttgtagttgtcttacttttcacctagacagatcccgtatattttcaggatttgtataacctgtctgtgtagtatgtagttgccatttatttgaaagatcattttgaaagaagaaattaagtagaattgtacatgaaagccgatgcttgtcaatctatgttgcccattcggccagaagaatatgtgcttggttttggatatgtagcctgtaattttgtcacctggcctgagcaattggtggaactaaaaaaaaaaggaaatagattacaggatgggtatttatttatttatttatttttattcttaaagaaaaaggatgggttatgctttgggtgctaatataatttataattaaaatcaaatttgtacatattcttaatgcataaaaatatggtgatttcggtctgatttggacaaaagacaattaatttagttgcttcattaatatctagatatatagttgagttattagttatttctttggagggtgtggtttagaataaacaaaatgattcatgaaaaggtaacttatccaagtgacaatataatccacttcgttgccatctgccacttttccaagataactatggatgctgttcttgataatgttaagggacgggcggtttgggtacggtggtcaggaatgaggccagattggcatcggcgatttggcggagtggaaggtttcaggctttttcgagccagaattatggaggctcttgctttgcgacaagcagtgattcaatgtaggcttcttggttttgataaggttccctttgagtgaatgccaaagtattattcttaaacttattaattatgctcccttcatcccttggattcttatcttacttgggatttgtacagttgtacttaaataaattattgtcttgtacatgtattatggttgtggaccttttgtattgctctaaagcaattaatatagtatctcatactttaggctaaatttggaagaaatt

SEQ ID NO: 14720 - DNA, 8985 bp, Cannabis sativa
aaaatatgtcatatttagggtaattaagtttttatgccatatatatcaaaacatatgttcattttcccatatttttgtaaatagccctttctaatttcctcaattacgcattatacatttatgggccatagtgtgggctttaggggtttgggccggctagtccagttcaaagcccagataaagtaattgaatgaagagaagaaacctcaaaagtgaaatctccatattagatagcttcctcctcacagtcctcagtttcccatttcttcattcatataaatatattcttctatcgtccactctctccatttctactgccaaaatcaatgtcttcagaatccgaaaccttatcatcttcggcctctgcgccgccaccaccatcgcaatcggaagaatcatctcacgaagacgattccaaatcagttagcaaaaaggccgctaagaaagaagccgccaagctcgagaagctgcgccgccgtcaagaagccgccgccgcattatccaacgccacctcatcgctttcggtcgaggaagatccgcttgcagcaaactacggcgatgtgccgctcgttgagctacagtcgaaggctccagctgacgtcaacagctggactgaggtcggaaagcttaacgaagccatgaaggaccagcatgttcttgtgcgaggtcgtgctcagacgatccgatccgttagcaagaacatggccttcgttgttgtgagagagcatggttttactgtgcagtgcgtgattacggcgactccagatgttgttagtcgacagatggttaagtttgtttccggtttgaatcgcgagtcgattgtagatgttgaaggaattgtctctgtgccgaaagatcctatcaagggagccacgcaaccggtatttccatctttttaaattttgaagaaagtgtgtaactgtgagcttaattggatttttgttgtttcaggttgaggttcaggtgagaaaattgtattgtgtgagtaaggcattgccgaccttacctattatcgttgaggatgcagctcgaagtgagattgagattgaaaaagctttgcaggtaatgtttaccattctatatgtgtttgatgatcttgttcttaaaaaatatatattttggcagtatttgatgaattataacgtgtatctatcttgaaaattctatttcatcaggctggagaacaacttgttcgcgttaatcaggatacacgtttgaataatagagttattgacattcgaacacctgctaatcaaggaatttttcgcattcagtctcaagttggaactgtaagttgctacattttaatatgacttctctttttgcctttgcttaatactattaaattatacatggtcagtatgtaaaagactaggaatgttaaggttctcattgatacattttattttttaatgtcacttgtgaccacttttcaatgaaaagaaaagtttagttgttatatgagctttgtgtgacctgtgtaaaatcatgactagtccctaaggctgtgtttggaaagccatgatgggattggttttgagtgtagttagaggtaattacactatttgacatgcttgtctgatcatataactacatagtaactgtgtaattgaggggttcagctaaaaaagttgtgtaattgagggatttcaattacactctaattctcatggactccatgagaattggatataactacattgtgtaattattaaaaattttctattttaaatattaacttctatttttcagtgtaattactaactatttagccaaacaagatattagtaattcatatgtaattaccacttcgtatccacacacatcttgtattttaaaatatagtctaattaccagactcacttagtgacttccaaatatgttctttaaattttggttgttgatattgtttagttaatataagtttgaaaaacgttggcttagctgattgtctccctctggattttaaatatatactctatttctataacattttagctctgcactttgacttgacggcattctgttttagaagatttattcctgtaaattttgtgtcatgttaccattgtaggtatttagacagtttttgctttccgaaaactttttcgaaatccatactccaaagctaatagctggctccagtgagggtggtgcttctgtatttagactggactacaaagggcaacctgcttgccttgcccaatctcctcagcttcacaagcaaatggcgatctgtggtgatttcgggcgtgtttttgagattggtcctgtatttagagcagaggactctttcactcacagacatttgtgtgaatttactggtcttgatgtggaaatggagatcaagaatcactactttgaggtactaacatggaatattttaggattggtaatgtgttgctcctaaaatttgctatgttatgattttgagtattctatatgtttgctcaggtaatggatattgtggaccggttatttgttgcaatgttcgatagcttgaaccagaattgtgagaaggagcttgaagctgttgggagacaatatccatttgaacctctaaaggttgagatccatatttataaatgtttttattaatatgtatttgactgtgtagaaatatctgatttgatgtttgaatctgattattgattgtcttcaaaattgcagtacttgaggaagactcttcggcttacatttgaagaaggtgttcaaatgctcaaagtatgttatttgttgttttattacactacagattttaatatttattatatgtataactgtgggagaacgagaaattactctctttacaaaggaacaaaaattattaaattgcttgtggtcattggcaatagattagtttgatgggattgcttaatatggcttttattaggagtcttatatgttataaataaaaccatgcctttggatttctaatacctaatttaatcctaatgttgattttgacttgcctgtataggatgctggtgttgaagttgatcctctaggggacttaaacactgagacagagaggaaattggggaagttggttttagaaaagtaattttctccttagactaccttttattctactttgcattttgaaatcatgttgtcatctgcctaaagtaaatccatgaactaactggtttctactcgatgtaggtacggtactgaattctacatacttcaccgctaccctttggctgttagaccattctatacaatgccttgctacgataatccagcctacagcaattcatttgatgtcttcattagaggtaatgaatatcatttacgtaactgttaaaattcggaactgaaactaaaactagtacaatagataacgtattgaacagaaaactgtgtttagcttgtaaaagatatggcgatcttcaggtgagtcaaagtaactgatctgaaattttctttcctttaggtgaggagatcatttcaggggcacagcgtgtccacgtacccgagctcctggcagaacgtgcacagggatgcggaattgatgtaaaaacaatatcaacatatatcgattctttcaggtatttttctttctagtaccatgtcataattttgttaatgctctttttatcttctacgcattttgagtataagatttaccaatgccttctgggatttgatttcttttgcttgttaaagaaatgttggggttcttttagctttggaagttttattaattgctcactgttctaaaacaaaataaaaaacagatatggtgcgccaccgcacggtggtttcggagtagggctggagcgcgtagtgatgctgttctgcggtttgaataacatccgaaaaacttcattgttccctcgcgacccacttaggattgctccctgataggtctgatgttgaaattcctgacataatttaaggttttgtttttgttttttgctgatgtgaaaattataacttatgccatatggcttcttgtttggcctttcatggtattggtatggtaatatgtatggaaagtcaacttcttaaattgatgatggtgaagatgatgaacatttgatcattcaaatttatttgcttaacatatttataacaaaataattatattagatctatttaataagtactaattgtgttcttttagttgattggattttcgtattctcttatttaatcgaatctttgcactaaattgaagaatctcccctggtttcatacggttttatctaacctacttaattggtattctttatactaaatagtatccaacttaatcttatacggttttaaataaaattgaaatacattagcaaattagacaaaattgaagatatagctcatagagcaaaatcaacaaaaatcacctaagcatcaaagaagtcagataaatgatttttggtatttggagttttggaaggggaaattttcaaataggaaaaattggggcaaatgttttagtataaacaaagatttcatttttcatattttttgctgaggaaattttgagaaggggagaaaactattgagaccatgccttctctaccatgccacctcgatctagatcttcggtccaccacgcatgatcgtcgccagtcggccttcctctggtgttattagcgggagtgattaccgaattgacctcacccacattcatcattgtctttcttactctcaccagcgtcgtcgtgttttaggctcaaaattgttatggaagggaggttagttaatgttcaactcggtttgttgtgttgactaccacaactaattttggtctcttttaatgagtgatgatcgatgaggttcgataccccaaggtgtataggtagaaatatgaggaaattacactacatacatcttttagctttacttttaatttttatcctttttttcaaaatctattatgtttattttttttttaatcattctaccaattttacccctatcacttcacgatagttttcattcttttatatttcaaaattttgtcttaactttcctacaaatctattatgtttgaaattatgttttagttatgtgagtgtgtgaggataatttgggtacaatattcatgaaaaaatgtatatttgaattaaatttcatttgaaggtaaatttagttaatgtataaaaaaaataggtattctttaacttctccgtatatatgaatcctgggtccatagctctaatgggatttacctgctcactacctatgacaaataggtctgggactttgcaatttgggcctcgacagatatgtgatccgtttgttccagtttgggaagctcaatttctttttaagtttagattttttattttttttttattttgtgggtattatatgaatatatagtggaataatttttttaatcttatggtgctgggtataataaataatttgtttaaaaaataaaataaaattaaaagttatgtcaatataaaatcatcaacaaaccaaacaagagaaggaaaaaaagtaaggaaattgagaagttatagttagcacttcacaaatagttcaggctgaaaaaaggtggcaattcgtgttgacgtgtgatgttcgtgttatttaagttgatatgtttaattgattaactttaacttaatccatatatctttcgtgtcaaaaaatttcaattctaacccgacctgtcgtgttttcgtgttgacctgtcgtgttcgcgtacgtcgactatacttatgtttaggattgttcagaaatgatccaatccaataacaaatccaccgttaaaaattagatatccaatcatgattggatttgatcagatgatattttggaaaagagtaatttgcgacataaatacttaagtttaacttccacctgtaaataaatacctaagttttaactttcagttgcaaataaatactaagtttaacttttagttgcgaataaatacctaagtttaatttttagcagtaataatatctaagttatatttctcgaactctgtaggtacgtaaccgttaaatattaagccattaaattcacgtgtcattttttttattggtatatttgaactaatttttttttttaaataataaaaatttaatcacttggaccaatctattaccacgtgacaatttacttaatcaggtacctacagaagttataaaattaaaaaattaaacttccgcaaattactcttttgaaaatccaatattagatcaatcggttactggatgacctggaaatacaatgaatccaaccgactaatctaattcaatacccatccaatattaaaataaaaagatatatatattaaatttataatattaaatatattataatttattatatatttatataaaaaaaacattaaaaaaaaaaaagcaaaccctaaaatctcatcagccaccgctctctctctagtctcttattatatatatgatattgtgaaatttcaattaatttcagaacgaaaccaaacctccgaaaacgaacgcagtaccaaaccagagctcaaactcttctctttggatcatcaatggcgggaggtaaggccaggaaggacaaaccgaagccaaacgctgcggctcacgctccttaccaaggaggcatatcattccacaagtccaaaggccaacatattcttaaaaaccccatgcttgtcgactccattgttcaaaaatcagggattaagaccactgataccattcttgagatcggtcctggtactggaaacttaaccaagaagcttttagaagccggaaagatggttatcgcagttgagcttgaccctcgtatggttctcgagttgcacagacgatttcagggtactcctctttccaatcgtttgaaggtttgtatatactaataatttaatgatagttttgagatcaagttttctcttttcttctaaagttaggatttttgttgaaggttttaagggttaattgattgatttttgtagttatagagttttaacactgggatgagctatatgaatatgtgtatgttatatatgtatatctataaatatatatatatattttaatcagataacgagtgaaaacgattaattgaaacatattaatattgagcccactaaaacaatgtcaaaactgttataatcaaattctgtttgttctatgaattaccaaacaacgtaatgtaatgtaaagccattgcaaagtttttaaagcgaaaccaaacaatgtatcagtgtaatggttggtaataatgattctattataatttccactacattaaaccaaacattgcctaaatatgctaattggcaacataaaagagtaacttttaattatgatctctaaaactatcaatagctatatggttatgttgtatactattttattggaactatgattcatagaccatttctcataaaaatattggctttaagccatgaactaagtgctagttggaaacagaaaagagcaacttctaattatgagctctaacgttatcattagtttttatctgaacaaaggtatagggtaatgggtatgttgtatgcttgtttattggaactatattttatggaccatttctcataaaaatagtgggtttaagccatgaactaaggatgctaatttgctttaaattgtgagttgttgattgaaactgttattgttgaaaatttggcaatttttctatttgatgatccttgtatatgatatttgtaggttattcaaggagatgtgctgaaaactgagctaccttattttgatatatgtgtggccaacattccctaccaaatttcatctccacttactttcaagttactaaaccaccaaccttcattcaggtgtgcaatcatcatgtttcagagggaatttgcaatgagactggttgctcagcctggggacaagctatattgtcgtctcactgtcaacacccaactcttatcacgagtttcacatcttctcaaagttgggaggaacaactttcgtcctcccccaaaagtggattcctccgtggttcgaatcgagccaaggaagccacggattgaagtgaagcaaaaggaatgggatggattcctgcgaatttgtttcaatcgaaagaacaaaacgctcggttcgatctttaggcagaagagtgtcatcaatttgctggagaagaactacaagactgttcaagcactaaagctcccaggacagagtagtaccatggaagaaacgggtgatcatatagacttttcgaaactcggggaggccaatgaagatttaagtatggatttagatgatgatgttgatgacgatgaggattttgatggagctgatgaagaaatggaagtggaagatggtaatgtaggaggggagacatctgagttcaaagccaaagtcttggcagtgttaaaggaaggtgactttgaggagaagagatcatctaagttgacactacaagaattcttatacttgctctctttgtttaacaaagctggcatacacttctcctgattttgattttgattttgagtgtaatttataaccaaaatttcaagattttaagattttgatttctcttatcttataattttgtaaaagcttttcccacacaaggtattactagttaaattattcttgttgctcagtgagttgaatgagcacgagaaaaaaaaaacttgagaccaaaaggattattggttgtttcggctctgttatatgaacttagatctttagtaactagggaactatacataattgctcgtgctttattagatttttgtttaaagatgttgttagggttgtttttcttttgattgttaacgattttagttgcctattgttttcttaacataacataatgaattatgttcgatttaattatcaaaaacacctattttttttaaaaaaatttaattaatcatcatccctaattaccaaatctttattatagtttggctagagtttctatgaggaaaaatggataacagtagccaatcttaaaacacaaatttgttcagtgtgattacattttaatcaattacattgtttaaataagcgtaaagttacacaa

SEQ ID NO: 14721 - DNA, 2444 bp, Cannabis sativa
aaaggatagcaagacaacaattttcgtacaagaaaacgagaacaaaagagaacccaaaaaattaaaatgcacaatacaagagacctaacagaaagaataaaacagcgattaggcgctaagaaacaatgtttaaactccaaaccaataaaaagaagatggaaaatcgtacttgtcccagttaatctcggtctgactaaacgattgggctccagcgttcgatgtagcagccatggactctctcccttaatcgcactggttaccaagaaaaactgaatccagaaatgaagatcaataacgcattcttcccagaagaaactttggaaacacacttccttgttgttgaaatcaatttgttaaatctgaaaccgccaaattatgggtttttgtttcttcacgatttggctcttcaagatttcttggagctaaatccagtctcccctgaaaatattattgattaattatttttattatttttggggaaaataattaataataatttaaaaagaaaataaaacaaaacaaaaactctctattgggttttgactataatttaagtggtgtggacgcggctggttgagaattgtgaatattttggcaatgttgttataaaattaggtcttgtttggcggcggcgaattgtggtaataagaattagagccgcgttttttaattatgtcacacaatttgttacttaaaacttactacaactctaataccaataactaattagtggatatagttatgtgattaagcaaatagccccaaacccaactcaattttgattagttgtccttttctttttcttggagtcgtaagaattttatatgtccaaccctatacactcacacttttacgtaactattatctcaaaaaaaggaaaaaaaaaaacacttttacgtaactgatggtggtgggacttagtacaccatatttattattagtaatttgtgaaataagaaagacaatctctctatttgaatttttgataattatattgtagaactagtgagagttgattgcatgaaataagcctattttcatcataaagaataaataaataaaaaggaggacggagaagaattcaattaccccttcaatgaaaaaaataaataaaaatcattttccaacagttttaaggggtgatatacttgatagttgatacaaaaagtctcttgtttgactgtagacttaatcttgggttttggggaggaaaaaaatactaatagcattgctagtataattagagtgggttctaaaatatattaaattaatttgggggaaaattataatatggagaccataaggggtaggttaagttcagaatcatatcaatgttctctgctataatcaagaaaaaacacgtgttgtagtgaattatgtgtttgaacaatagaggcatgaatttgaagaatagaatgatagacaggttgagtccatgcgcgctcgacaagagaaaatcaatcatcaatcaagggaaactactgacttgatcaaacgattccatcaatagactgagagtgcatgtactagaaaactcacactcagaagagatcctaatcggggaaaagcaccttacatcccgagcgagacacaagaatgcgacccgaaagcatgcccaagtaattatgtgcaatcaccccagcatgacagacctttcaactctaggccccaaggtcagactgttggcaacccaatagatgaccaagtcttacttggtcactatcttggaatgaattatgatcaacccaaatttcgtccctatcctgaaggatgaagagacgatgtaactcaccgaccaactgggcggtcttgaggacatgtgacagcatacaaccaaaatggatgggtccaagtctatgggtagacttagagtacccgccaacaaccttgacaagactaaacgaggtctcatagtagacaatcgtacaaaagtaagaatgatgacaaagctgataatggacagcacaataatggtcatcgtgataatcgacatacccatgaaagaaactaagaaaatcctctgaacggtgataatcctcctcggtctacgagccaaccaaacaaaagagctctaggcaactctatcttcctaaggatggagcccatggctaatctttgagacgatttgaatcgtaggagaggaaactggacagacactttgtccatccacccaacaatcagccaattaatgtggagaattatattccgcaaaacagagataacttcgtaccctttgaagctccagggggtcaataggtaacatagatcagtcaacaggcaggtcgagttgatccaaggataatttatgatattttcttttttttttttttaaaaaaaaagatatatatgtttataattaaaataaaaattaataaattttttcaattttttttgacaaagtgattagaatcactcatgaatttacgatgcagacgtccgccacc

SEQ ID NO: 14722 - DNA, 3857 bp, Cannabis sativa
cagagaaaatattgcagtagtgaactcatttttcgaagaaaggacggttgaaaaaacattttagggtttctggggttttcaacatgccggccgggatcataattccggcgagaaatatgccgtcgataatcggacggaatggaaatattggtgggtttggttcatcttcaggacttactcttagtcaggtcaggacacagtttttgctactatatataaaaagtaagattttttgtagtaaactttcggccatatctctataattttatttttaatgacaaattaatagtccttttttacaataaaaaaaaatatctaaaatacaaatgtttttcatggtaataagattgatgggtccagatcttattcttttttttttttgtctatgatttctatatatatatatataaataatggtataatacagctttattaccttttaaattatccacttctccttctaaacccattgtttatatactcactcttaaacaaacaggtgttacatgtttggcctcagaaatgactaatattcaagtattttaagaaaaatccttctcggtattcaaaaaaaaaaaagaaataaaaaagtcttctactctttctctcttgagtcttgtttttacacagaccaaaagagatctagaccagagaagagagataccaaagttcaaagaacctttaattagtcaaatagtattttaacttgggtgtgtgagtgagttcccctagaaaaacagttttttttttatcttaatataaatgatcaaatataatttctggaaaacttaattaatatgttttattcttcttattttaaatttaattattttgtaattttttttgttagattgaaaacccataaaaggtttggggaatcttaaagatctgtagatatgttccagccaaacatgatggaaggaagtggtcaccagcttcttcatcccctagacatgaccgcacagaataccacctccgaaagcgatctcaacgctcgtctcggccgagacgacgacgttttcgacagcgcaactaaatcgggtagcgaaaaccaagacggtggtgcctccggcgacgaccatgaccagcagcgtcccaagaagaaacgctaccatcgccacactcagcatcagatacaagaaatggaagcgtaagaaacaaatatatatatatgcgttacatatacatatattaattaccctattaattaactttaagtatttactttttttcaattaatagtcctttgtggttgaaatatatttatatttgatttgggttttatcgacttcaattcttagtttattttattttttttgtaacgtatttatgtgtagattcttcaaggagtgtccacatcctgatgataagcaaagaaaggagctgagccgggaattagggttagagccattgcaagtcaaattttggtttcaaaacaagcgcactcaaatgaaggtatatatttatacatatatgttttgttggtgctagctaaacattcagctcccgtgactttcaaccaaacagtaaaatctttattaattatatctattaattaaggattgggtaatatgtatagaatatatattttagaggaggtgaaaattgggctaaatatcctcttgcagacccagcatgaacgccacgaaaacactcaactccgcactgaaaatgataaactaagagctgacaatatgaggtacagagaagctttgagtaacgcctcgtgccctaactgtggtggcccaaccgcaataggagagatgtcctttgatgaacaccatttgaggctcgaaaatgcccgtctaagagaagaggtcaaaattttatttttttttaccaacaacgttatatttaatcattttgattaacttaattttattatatgtgatgttttccagattgatcgtatttctgcaatagctgctaagtacgtagggaagcctgtggttagctacccaatcctttcatccccagctacccctcgtccactggaactcggagttggaaactttgggagtcaggcgaccatgggaggagagatgtatggaggaggtggttcaaccggagatctactgaggacgatgagtgcaccaaatgaggctgataagccaatgataatagagcttgctgttgcagccatggaggaactaataaggatggcccaaatgggagagcccttgtggatgaccagcctggatggagccagtgctgtactgaacgaggatgagtacgttcgtacattccctcgaggaataggacccaagcctgctggtttcaaatgcgaagcttctcgtgagactgccgtcgttatcatgaaccacattaaccttgttgagattctcatggatgtcgtacgtaccctataattgactctacgtagattaattgtcgatattaatatataattcactctaattttactttttgttgttttttatttatgtagaatcaatggtcgactgttttctctggtattgtttcgagagcaatggctttagaagtcctctcaactggagtcgctggaaatttcaatggagctttgcaagtggtatgggttaattttttaagatggctcgttttttttttctttgtttttaggattgaaaatgttttttagccagaggtctcatcctttgcatttctcaaaagtttttttccaaaagtttttttctacacactaaaacattttatataatttactcataattttttaatatatatatatatatccaaaacattttgaaattacaatttttctttttatttataaaaattatctgttcaatattaatcatccaaagtgaaaaaaatatttattttttcctatataaatgccattaattattagcaaaaacagaaattaattttgacaaacatgataattggaacattcaccaccctttccagatttcaacaactttgacttatttcatactattttaacgagaagaacatatatataatatatggaaaacacgaaaattaaagatagtacactttcaagcacgaaagttaaatatattgaatgagatcgagcatgagaataggaagtcccattcaacaaaatttaatttttctttttaattattgattgaaatggattgttcatttgcttgtcattactttaattacttcaatttccgaccaaagaaacaaatgtgcaaaataaaataaaaggtactgttttccattcctattaaagatatatacgtatatatatcttagtaaatcacaaacaataacgctgaattaattgaaatttaattgaaccccttacactcttaattatatacatgacatttgtaagtatataaattgactgaatttgagtttcaaagaattggtaagatatgttaatttgttatcatgatcagatgacagctgaatttcaagtgccttcaccgctggttccaactcgtgagagttactatgtaaggtactgtaaacaacatgcggatgggacttgggcagttgttgatgtttctctcgacaacctacgtcctagtccagctgtcagatgccgaagaaggccttccggttgccttatccaagaaatgcctaatggatactctaaggttcaatttaattcataaatatatttttctcttctctttttgctattttagtaagattatgtatagataaaatggttttcttttttaggtgacatgggttgagcatgtagaagtggatgatagaggtgttcacaatctgtataagcagctagtcaactcgggccatggatttggtgcaaaacgctgggttgccactttggatcgtcaatgtgaaagactagctagtgccatggcaaccaacattccaaccggtgatgttggtggtaataataacataat

SEQ ID NO: 14723 - DNA, 5920 bp, Cannabis sativa
aaaagagtataatcaataaaaagcttaaagcatgaagttattttaattgtaatagttatgattttaaaacttaaatatatacatatatatatatatatagttatatcatatcaggatgggtatctattcccccgcccccgctcttgccccgtttctgacttaggtatgaatctttaaatccatacccgctctcgaaagtcaactgtacctaatgagacgggtacctgcgggtacccgaacccgccgtgggtataattgtcatccctaatataaggttgatttattaaaaaaaaaattaaggttgtcctttttagtcattttggatattggttgggtatttatttagcctgcgtattatttatttattttgaagaacctcttcgtaaacgtagacagctttcacctttgggtatttaaattctgtaatcagacgtaaactcattgagcgaccgacacgtgtcggtgaacttaccagaatctaccgagaatcgtcgggtaaggcaacacagctactagaattcgaatcagcgagcgaactagtgaaggaaattataaagtaacaagttggtattttaacattgtgtgaacgcttccgcctattggaacacgtggcacatgagttgctttcacttgtgttctggattgcattcctgggcttctctcgatagccttttcggagtacttcgtaactgtccagtcagatgatcgctgccgcataaaagatcaagctcatttcacttaaaacggaatacatgtcgtgctaacaagaaacaacgcgtgtaatttacgtatacattagttggttcgtgttttccacgcgttttgaagaagcgtcaccatagtttctgatttaatttattattatttttgttgaaaatttcggctttaatttaaatgagtgaggatttcgtgtgtataaagtgtttaaatgacagatttaatcaccgtagagtatttagaaacattagggtcaccttaaatgaacggtgtagatttcatggtagatatactcgtgaagattcagctgaaaaataattataatttttaacgatttaaacaaaaaaaagaagcttaagtaccggtttgaaatgggaaatttcagtattatattttttgttatttattatttaattaaggtttgattataaaaattattattattaattaattcaatgccataagagaaaccgtcttccactttctctggtttaaccttatgagtttcttcaaaacccatatcttttgagttttttctcctttccttctctctctacaaaatctcagagagaaaaagaagaaaccaaagctaaaatgcaatctgggtataccggagccggtggtttgccggatttctacaccaccggtcgatcaaccatgaataacgttccgtctcagcctccataccaccgacctcaacttccgggcttgttcatcgattcaactacacagcggatcgctcgtcagaacccgacaaccttgatcggaaaaagaaatctcgccgagtttcaatcaaatcatcataatcagcagcagcagcagtacaatccgaaccttgggcttgtacagcctaactatcttcgctcagtcaagcccaggacgtttcagcaatcttcacccatatctcctctatctccgatggaattttcgccaacggcaaccacggtctcggaatcttcctcttgttcatcatcatcaccagcttcttctcagaggtacggcttgcccttaccgcagcagcagtatctgcgtcctcaacaacctaatattcaaggtatgtcgtatgtaaatccggttcagcagaatcgtgttattccggttgtggattctgaaaagaagattatgaacacccgtcttcaagagctggagaaacagcttctcgatgataacgaagacgaagaaggtgaccccgtctctgctattaccaataatagcgagtggtctgagacgatacagaacctgatcagcccaaatcagacacagaaacctgtttcgccatcgccaacttcttcctcttcgtcttcctcctcatcctcggtcgcctctcctgcaattttgactttttcgaagcaatcagttatggaggctgctttagctatctcggacgggaaaactgaatccgcgaatgagatcctcacgcgcctttccactcaagtctcaaacccaagacccacttccgaacagagagttctcgagttcatatcgtcggctcttaaatcgagaatcaaaccggaagagaatccgccgcctgtgacggagctctatagtcaggaacaaggctccgcgattcagtctctctacgatctctcgccttgctttggtctgagtttctcggcagccaatttcgcaatcctcgatgccacattaaccgacgattcggccaagattcacgtaattgacttcgacatcggctatggcggacagtacgtagaccttcttcgaaagctggccggtcgaaaaaacggcatactttcgtccttgaagataactactctggcggataatgtcgttacccaagagagattgaagagcgtggatgagaaactgagtcaactcgcccgtagcctgggtgtagtgttcgaactcactgtcaaaagcctcagaatctcggagctgagtcgcgaatcgctgggttgcgaaccagacgagtcgatcgctgtgaatttcgccttcaaattatatatgatgccggacgagagcgtatcaaccgagaatccaagggaccaactgctacggcgcgtgaagtctatggcgccgcgtgtggttacggtggtggagcaggagctgaacaccaacacggcgccgtttatggcgcgcgtgaacgagacgtgcgcgtattacagtgtgttgttggactcggtggacccagctggtggtagggataactcggaacgagttagggtagaggaagcggtgagtcggaaggtgggtaactcggttgcgtgcgaagggagggaccgctttgaaagatgcgaggtgtttggaaaatggagggcccgattgagtatggccgggttcgagtcgattccactgagtcaagacgccaaaactcggctgagttcgggtaaccgattccataatctttccgttaaagaagaaaatcaaggaatttgctttggttggatgggtcgcactctcaccgtcgcatctgcttggcgttaacttcactcatttttttttttattttaaattttaattttacttttttttttcctttttactaatattattattaatattaattgatattaaagacatagtttattattgacgttttccttcgcaaagaaagaaaaggaaatacccaccaaacgaaaacaaataaaaatataatatatatatttaagtgtttggaatccgagaaaattcccgtgcaaaaaaaaaatagtacttattattgtcatttggggtgtgtgaaaggtggcgtttggtatgtttgtattgtatatatatatgtatttctgctgacttgtcgtttggattggcctttaggattgtattaccaaacccattcaagcctcctccacctttggtttattttccttttttgtacctttcgattgtatttttcccgggaaattttttatttactcagaaaatacgtgtccaattccataagggtcccactacagcactttctttcttttgccccttttctttcttttacttcaaatttttattatattttcacttttgggttacatagaggagggttatataggtcttcacgtgcgcatgtattagactttgattgtgcctaatcaagtttgacaatattgttagtagagatttctgtgttctcataatatgtaacggaactatgatctttgtaatgcaatatctttgtgtattttagttatttggtgcaaataaatttcttattaaatattttctcctctattattccattaccaattatatatataaattatatacacataaaacttaaatcaaacaactcttcaaattattgtactagttttgtctttttggtaccacacacgaatgaatggtgggctctaaagagttcggagggattatatttttattttattttgctcaatttatatatatatatatattttctgctcaaagtatgataataaactatacaggtggaatctttcttttgatagggtttgtgacaccaaacttttataaaagtaggtttgaactcttcgcaatatcatgaatttttgtccttgtaactagaaaacagatattattattttccattcataatttagggattttgtatatatatatatatatatatatatttggaaatgctatctcaattgttatgacttttgtctccctctctaagtctggcctataatgtacatataataactctttatacaatgataattcgataggtttcaaaataaagggtttgaaagattgatgaagatgacccatgcccatgctttatctttttggtatccctcttcttctagcttcagtcactatccacattggtacttggatttaatgtataagagtggtactttcatgcttagttctgtgtggagtattagatattacaatacttctacttttagtctctagctacattaaacacctaaaattacagtatatataaatatatatatatatacacacactcctgtaatgatatttgcataattacccaaaacaacatcatagtgcgtaattgcgtatatgtctaactaatcattttgcttagaattcggtgatttaccagttttagaatagagatcatccttatatgtttttgtttttgtcttaaagtagaaatgagatttgagctctttgctgagagaaattaaacagtaaatatcactaatacatccttcaacattaatttgtatttatgtatacattaaatacggatataaagcgaaatgtgtttgtatttgaagataattttattttttcaaaaaaaaagaaaaaagaaaatgaaggtaagttttttttttttttgctgaaaaaaatgaaggtaagttttgttcaaatactaataggactttatcaaaaaaaaaaaaaaaagcctaataggacaaatttgcataattctcccttccttagaatagtgtccttgtccagttttttctttttaattaaatttttggctaaaattgctgaaaatttaaaaaagagaccgatttttgttaatcgtattccaatcttactcctattttagttagtattcactaaaaaaataaatttacaaattttgaatttattaaatatatcttgatgacttgatctaataaaataatgtaagagtaataatatttttgataaataatatatagaattttttaggaaaaataaagtagggagctctaggaaattttctatctgttttttattatttagatttactatttgtatggttaaatttaatttttttcaaaaaaattttacaccaaaaattttaaaaaaaaaattacaaaaatacatcaaatttttattttattctctggacttttttatttacaaaaatatatttttaataaaaataataaactttttttttaattattttatattttatttatagttgtttttattttttgctaagtaaagtgtattttttaattttaaattttacaagcatatttttgtaattaaaattttaagccgtaaaattataaataaaaaataaaacaaagtatttttgaaaattttcttttttatttaagtgtggtcccttcctattttagctaaaaagtatatttagaaaacatagtcaaagatgatagttaatcatttttcagttgctttcatcttttctatctcattagtcattgcaacttagtattttattgtatttaagggctcttacttccacatttaagggctcgttagtacagcttattgtattttattatattagtattatttaatacaataatatatttgatattgactt

SEQ ID NO: 14724 - DNA, 4234 bp, Cannabis sativa
ggtgatgcattagaaggaatggctaaagctgatcacagaattatgtctgctaaggtatggttcatctaattagaagaaatcgaatgtaatacagcattgtgaaaaaaagaaggggagagagagaaagttgcatgaacactgatttggcatatctgtgcagtatttaacttatagtttcattcttaccagatcaagcttccttcacagtaccatttctacatggagacgcaaactgcccttgctataccagatgaagacaactgcatggttgtttatagctcaattcagcatcctgaatttgcacacgatgttattgcaaaatgtttaagtgcaccgggacataatgttcgtgttatcacaagaagggttggaggtggctttggtggaaaggccagtagagcaatggctgtaagtattataaatcagtttcatatctctcttttcttcctaagataacataatatttaaagcatgattgacattttcaagtttacactatgattgacttagattccctgtaaagctaactaaaaaaaaaaattctacagaaaacaaatcgctagaaaagctgtaatcttacttgacataatattttgagttggttttaaacaattttgttatttttgtcagtggaatataaccccacatgtttattcttgtcttggctcatatccttgcaaaattttcttattccatttcaatctgtttgaccatcatacagctgttacctatcataaggttcaacccctcttactgaagagggaatcacgacctgaaatcggtaataaaacaaagaaagagaatactacagaggaaaaacaaatggccttctgccaaaagatatctacctatttttttagcttgcgattgttataggaaaggaaaaaactaaagtaaatggagagaatcaatctgtttttttagcttgcgattgttattagtattatccaataatcggtttgaccaagttatctgaatagaaggatggactttctgttttatactgctggtgatatccttcatttgaagaaactagaaagtttacattttcctcatacgcatcagctgttgtttttcctactttgtcttgatttcaatttttgctatcgttaatcaaacaaaagggaaggacatagtaccttaattgcaagacataggatgtaaatctattctgtctctagtcttcttttggaccattaaaagctacataatcttcaagttcatttcagttattttccccatcacaaatatgcattccgaatagctgctttagaatagtttgaagctgttagaatgacaatgtactgagacgtatttcataatcatgataattctatcctgtatggtgtcatgagcttgcttactctgcccttttatatcttttattataagttaacattccttacattatgataattcaggttgcagcagcatgtgcacttgcagcgcaaaaattacgccgccctgtcaggatatatatgaataggaaaactgatacaatattggcaggaggaaggcatcccatgaaaataacctacaatgttggatttaagtcagatgggaagattacggctttggaactagaaatattaatagatgcaggcatgtctatagatatgagccctatcatgccatcaaattttatgggtgcatttaagaagtatgattggggtgctctggcttttgacataaagttatgcaaaacaaatcattcaagtaagacggcaatgcgaggtcctggagaggtacaaggatcatttgtagctgaagctataattgagcatgttgcatcttttctttcaatggaagttgattctgtcagacaaaaaaatcttcacacatacaagagtcttcgtttattttatggagatagtgctggtgaagctcaagagtatactttaccttcaatgtgggataaggtagctttgtcttcaaaatttagtcaaagggctctaaagatagaagagtttaatatgtgtaatagatggaaaaaacggggaatatctagattaccaattataggtgggatgacggtcagaccaactccagcgaaagtaagtattttatcagatggatctgttgctgttgaagtagggggaatagagctgggccaggggctttggacaaaggtgaaacagatggctgcttttgctctcggttcaatcattgctgatggaactgaacacttattggataatgtgcgagtcatacaggctgatactctgagcttgatccaagggggattaacggcaggaagcactacatctgaggcaagctgtgcagcagtcagaatgtgctgtgatgtcttgattgacaaattaactcctattaaaaagaagttacaggaatcgcttggctcggattctatcaaatgggagatgctgattgctcaggtatctagttagatttcattgtttctttccatattgatgattagaacataagtctttttcttgactatgaacttactaatcatggaactgctatatatgtattttttggtcgattgggtgtagctttctaatggttctggcattctatttaatgtgtttgcattattgtcaaattaaatcataatataatttttcctcggtctttgtgcaatgtagggttattcacaatctatacaattatcatcaatttcctactatgtccctgataagtcttccctaaaatacttgaactttggtgcagcagtaagtgaggtgagtctcttgcaaaaatattcatatttagttgaagacttgcttacataaaataatttctcaactaaagttataattggttttaacttaaacatgaaacagtttattaatcttactaacaatcagattaacagcatgatagagttggtgtttagccgatgatatataattaatatgcattgctgaatctatccaccataggttgagataaatcttttgactggagaaacctcgattttgcaatcggatattatctatgactgtggacaaagtctcaaccctgcagtagatcttggacaggtaaccttgattgcttttgttatcttacaaagtttctgatttgttgttcattccatagatttatattggtatgttaagtcctattggttgaaaatgattcatttatgctatgatagaaaaaagcaaaacagttccttctgtttgtatggggtgacatcagaatgttacactggcattttaggctgtaaatctgattatctgtgtcatctttgttcttaaaaagaaaaacaaagagggaaaatgttaattctgaaggggaaaagaaaaaggtgcttcttaaaccttgtttggaacctggattttggtaggaaatagctaccctaaagatttaacctttggtggagtactcggtttccactaattcctgatagaagagttggatggggaagtagtagctacaacagaatatgctgtgtgatatcctgatttagtgtagtctccagaagaagtaagattcccaataagtttatcttctcccaaaaccccaaacagaggaatagagagtacagcatcaacaacctcaggggagaaataagattatagtttaacaatattccaattgtgttcctcagttaagaatatatttatatataactatactttatatatgagtatgactgaggaatagagtatagcatcaacaaccttaggggagaaataagattgtaagtttagcaatatcccagttgccttcctctgttaaatatatatttatttataactttatgagctgaaaaattgaacagaggcaagttacttcgattgatccttcttttcgattcgattttatacaatcatcgaacttctcctctgatgagttctcatcgtgcaaagtttctggtggttttctgtaacaagacactctgatgctcaagtcagtgattaatctcaagaattttaatggagatttaaggaaaaaaataagcgttaagtgtgggagatcgattcttcttcttacttttttttaatcgtatttatgcttcaaagaaatggggagaagtaaatgaaattagttagcctaactgaatggttaccaaatccattttcaaaatgtgagcagaagcggacaacgtcatcagggttcgataggcctctgagtgtcttcccaaattgactggtgtggtgctcttttgcttatcttttcaatgattgttgaacaaaactgggtaccccttggggtccaaacccaaatgccaaagttactctttatacccttgtaaatgagggtt

SEQ ID NO: 14725 - DNA, 7836 bp, Cannabis sativa
  modified_base (7626)..(7628): a, c, t, g, unknown or other
aatataaccattgaaacctcctccatatatatagatattgattaatcatattttataagtcacctatttatttttttttcttttctttaattatagtaaattttcataatttgacatcattatttttttgttccctttaatgtttaataatattaatagttttcttttcttctttggaccaagaattatatagagttttgtatgtatttgtcaattattttgtttagttcattattttgggtataggattattcaattttatgttgaacaacatgctttctttcttttcttcttttcttctttagatcatgaattatatggtaatttttttttttatttattttttttagatcgaaatcatatggtaaattttttataaatttattaattttaacatcataaactcaaacatatatatattgattaatcatattttataatttataagtcacctatttattttttttctttcctttctttaattatggtgagtttttcataatttgacatgattatttttttgttccctttaatgttcaataatactaatagttttcttttcttctttggatcaagaattataaagggagttttatatgtatttgtcaattatattgtttagttcattattttagatatagattattcaattttatgttgacaagatgctttctttttcttcttcttcttttttctttagatcgtgatttatatggtaaattttttattatttatttttttaggtaaaaaatcatatggtaaattttctataaatttattgatttttttgaaatctctatttagtatatagatttgatcgtatgattgacaacatcttttcttactctttcttctttggatcaaaaataatataataagttgttttgaagattttttttttaatttatctttatcttgctctctattttaagtataaattattcaattttatattgacaacaagtttttttatcaggaattatatgttaagtttttaattatttgttttttcgatcaagattcatatgatgaattttcgttagatttgttattttttttttaatttctatttggcatagatatagttaattgtatgtttgactcttttttcttttattcaataattatatgatgagttgtcctgctctggaatcctctaggtttctttggtccttccagtccctcttgttcatccttcgtgatgctatcctccaatttccctcttctccgttctattcatcttccccaattaatcattacctctcatttgttacttcctgcaccactatcaggccaaaatccccatttaatgttgtatcagagaacccttagttctcctcctccctggcttctaccccttcatttattaactgtcactttcctcaggaggtgattcgatataggctacaagaataagctaggatctctgtagcatctctccatctttcagggtcgatcttctccaggtactatctctgcccctttgtctatttaaggataatttatgaggttgctattttttccctgttctttctagccctaagtctgcccagatattacccatctcccatgcactcaaccatgtctaacaacccagaaaaccccacccaatctatccaactcactgtggacaaagctttggtccatgaatttgaccatgtttccatacactcaaagacctaacctgagtccttctaccttgtcatcaaaatcccgtctcctaaaacgatcaaacctgactggatttgcaaagctatgaaagatgcctgaatcgctcgccttcccttcaccttcttggaataccattctggcttatttctggtgacctttggatgcaaaggggatcgacgctgtgttgtcgaaggccaatcttggcacttcgaccgttctctgatgctgtttgccattcccaatggttttgataccatcattcctaaatagctttgttatatcccccttcgaatgtaggttcatttcattccttttggcaataggtcccatggacttgctcatttcattgctgacactataagggaactcattgaggttcaccttccatccctatatgattctatcacccctttcatccaaatccgtgtacttctcgacaccacaaagcctccgtttcggggaatgaatgttcattttaggaaactctcactcaccaaatggatgaaatttcactatgaaggaatccaaaactattgttatcactatgggaagcttgatcatactttcaataaatttgattctttcctccattactgcgatgctcatgcccatcccccatctctcagctacaaggatgtcttaaggggcccctgctaagtccttttacaaaaaaaaggattttttaactctctaactcaatcccttttgaagagatttcatccctcaacatcctgtccagtcaaagcctccaagatgttgttgaccaattcctggttccaaatattgctaatacttctttggttaatacttctgatgctgagaaccccactaccctgcctccttccagtgtttctgttgaagataaccttcccccacatgttcctacttctctcacttttggaaacctcacttactccattgactccgcacctattatgacttccactgtgattacttcctcctccaagggcaaagctcccatgtatcctgaggctccaagggacatccctgctcctcccatttgtcccaaggctcatgttgaaactgtcaccatttctgccactaagcgatcttacacgagacaaagctgtcaagtgggctcatctgtcaggagcatgttgaaaagaacccgatcttcaaactgtgactttgctattgttcctactctctctgatgttgatgaagaggcggatgttgctctgcaacccctcttggaaaaatgagtgtcatcagttggaatgctcgtggattagggagttcccgagcattccaaaacctctcccgtctggtgactcaacgtcgtcctcaaatccttttgtgatggagactaagcagcttgctgataatagtattttgtttaaggctaaattgtcttttgataatgcttttgaggtccctagagaaggtttaggggggtttgtttcttttttggaatgatgtggtcaatgtcaatattatgtcctactctttaaatcatatcgattataatatctcccttgttaataataatagttatcatttatcgtgatctatggctccccttatgttcatagcaaagattctacttaggttctcttgaaccgattacatgatgttgctcctcttgctccttggcgattttaacgattctttgggctataatgatactaataattctaatactcccccttcacatgccattgtcaacttccagaactttataagtaaatacgaagatcttcatctccttcctgttgtgggtagccgtttcacttggaaacacgggataccttggagtgactcgattggggcattgtcaacaaattttgggataacatgtttccccatgccaatctcatccatctccccttttatggttctgaccatagagctataaagcttgactacaactctcaccctcatcttggcaaacgtcacaatagattcttttttgaaaactgttggctcatggaaatagattttttccctctcatcaagagtatttggcataactcccacgatcctagtagttccaccaactctcttttggattttctcactaatcaacatatatgtgttaacaatatgtttgattggagtaagtctaagaataatatctcttccaacatcaagaagcttcagtcggatattgatagtatttacaataagttttccatttcctcccatgatatcagtagtgctaatcgcctctaatcctcgctaaattcccttttgctgaaggaggaaattttgtggaagcaacgatccagagtcagctggcttaaagctggtgataagaatactaggtttttccactctcgtgccaattccagaagaaagaataataccatcaaatccattacatgtgagaataatattattgtttcggattttgaaggtatctgctctgcctttgttgagttttataccaatctttttcaatcccaaggtacccatggggattccattaacatttgtctcagtggcatcgctcatcgcatttctgaccaacattatagttttcttaacaagccctttgactactttgatgttaaggctgctctttttcagcttgctggggataaagctctggggctagatggccttaatcctctattctatcaaaaaagttggcctatcattggccctaatttcagtagggctatcttggaggttttaaatggggatgcggacattactcctctcaaaaaaacttacattttccttattcctaaaaggagtaatgctaccaaggttcgcgactttagacctatcagcttgtgctccacaatctacaaggttgttgctaaggctatcactaatagccttaaagttgtccttagtggtctcgtttcccataatcaaggtgctttcctcaataatagagtcatatttgacaacatcctcattgctaatgaggtcatcaatactattaacagtcgtaagaagggcaaaattggttgggcttcccttaagcttgatatggagaaagcttttgataaagtggtttccctcatcatttaatgtatatctactgtttcttttaaactttgtattaatactggcctttcatccactattaccccaccagaggaatcaggcaaggggaccccatatccccttacttattcctccttgttgctgaaggcttgtctgcaatcattcattctaaagagcaacttaacttggttaatggcatttccatctgtcgctctgccctttctatatctttctttcttttcgcggatgatagcctcctctttactcatgtgacccccagaactctcaaaccattaaagatatcttgcttacttatcatagagccacgggtcagtctattaacttaaccaattcttccgttctgttttcccctaacactgcttcccttaataaacactcttttctttcctgtctggggatggaggacaaacctttcattgaccattacttaggggtcccccaatgtcttttgcactcaaagaagtcctccttccacttcatccttcaaagggctaactcaaagctaaactcttggaactacaagtgtttttctaaagctggcaaagaggttcttctgaaagctgtgatccaagctatacctttctacgtcatgtctacaaaattcctatatccatctgcaaacaactggagaaattgatagctaatttctggtggacctccaaagggaataacaactctaaaattcattggaacacctgcacaagctttgcaaatccaagatttttaggggtcgggtttagatctatcatccatcaaaatcaagccatgttggctaagcaagcatggagaattcacaacaacactgactctatcttaaaagccaaatattttcagaataataccttcctcgatgcttccctgggtcacagcccctccttctcctgaaaaagcatactttggggcagaaatttgctcaccactagtttaatttagaagattggggatggttctgctattcctacccttagccctaattggttgcctgatcatagacacattacttataagaatggttctcaacctcctgttagtattctatctttctttatcaagaatggtagttgggatatccctaaactcaacttctactttgacactgaaattgtccaatccattcttgctgtgcccactaatcctcagaacaagggtagcctcatttaggggcatcgtccttctggcatgctcacagtaagctctgcttatcaccttgcgaactctaaccattcttcacccacatcctccaatcctacctccttcaagggctggtggaagactgtttggtcatctaccattcctcccaagataaagcactttatttggaaggctttcaaccatctcctcccatcaaaccttaatctttttacccaaaaggtttttcctagtcccatttgctccatctgtcataacaagattgactccaactcttattcccttttagagtgttccagagcaggtaagttttggaaacataccaatttttttgacttctttaaaaccaatagatattgtgatattaaggaatttattttgcatggttttgagaagttttccaaaaaggatctccacattttatttggcatattatgggctgtttggaatttccgcaacaaatctctttttgcagctaaagatcctgtcttccaagacatatagccgtttgttgtttcttacttgcaggaatactctgaagctcaacaccaggtgctccctattccagatcaaattgtcattggcagcgactcaacggaccacaaccccactaccccacccttgccccctcatggaaagtttaaactgagtgtggatgctgctgtgcaaatgcagataaaattacatggttatggtgcaatagttcaagattactctggccgtgttattgttggtttttcctcctcagcagcctctggtttatctacattatttgctgaagctgaagccatgctcagagccttaaactggtgcaaagaggttcagtttcccatcgatttgatagtctccgatatccaagttctcacttccaagattttaaaaaggatttttcagctatctgagataagatttggcaaatcatcacctctctatctcattttcctaaagttacagtccaattctgccccagaagatataatactcttgctcatgacgctgcgcagaaggctatgggaagtgggaactgataaggaggttttgtggaacaattgtgtttcactctcttagcagttttgtaactgtgtttcctttccttttgttgttaaagtccctgtttccctgtttctcaaaaaaaaaaaaaaatatatgatgagttttcttgaaggttgtcatttcttttatctctatcttcacttttgggtgaggattaaaaaaaacctgttatttagtattttttattgaatcaatattaaattagttaattaatttgaatcattaaatgtaatttttttttgaaaaaatcattcgtacaatgttcaaatcaaatactatataatatatatatattttattttatatgtgattcggtttttctttcaaaagatatatgattatttaaaaataaaaagattacatattgagacttatttttttctttcttgaaagaattcttgctatgggagtaggatctcaaaaaaatcatatatattatatttaagaattattacatagaaaatataaattgacactttatttataaaaatactttcataaggtgtggacaacatttatacctttcatctgattttaattacgaaaataccacttacactaccacttacacaattagacgatagttgcagggtggttgttgcgtggttgcatcaaacaaatgtttcaatcagacgatggttgcagggtggttgctggatggttggccgaaggttgcattagacgaaagtttcaatcagacgaaagtttgtgggtggttgctgggtgattggccgaaggttgcatcagacgaannnttcaatcagacgaaataattgttaacaaaatgtttatgcaactataatgcaattgttgtgaaacattaaaaatcaaaatagtatttccacgtacgtaactctatctacatgtctctttattatttaatatgaacaaattaagaaattcagaaaataacaaaaatacaccaggataaatattttacaatagtattgatgtaattttttt

SEQ ID NO: 14726 - DNA, 6590 bp, Cannabis sativa
gccaatgaaaactattaatgtaaaagttgtaggtaaaataaaataaataaaaataataatattttttagtgaaatatttttaaaatagagtaaagtggcgggttagaaagaaaaaaaaaaaaaaagttcaaatataaacacatctacgtttaaatttgtacacatatatatacaaatactttaacagcaatgcagaaaaaaaaaaaaaaaaaaatcccataattaatgttgaaaatttgtaagtagatatcatgtattgtcaatcttaggtgaatataactaatttcctattgatgtctaaatgagatgacaagtaccttaacttcatatgaatgtatgtattaaattattattcggacaattagtaatataagaacgtactatattataaatagacacatatttgagatattgatttaagaatatagttagtcaaatatatatgcatgaatggaaagaaaattacaattatttaaagctccatatatagtactagtagttaagtagtactagctagcgttgaaaatgaaaagtgctacaaaagaaaacaaacaaacaattcaaaaaagaaaaagagttttaataataaaaagtgataaagaatgagattcatcaacttcaccacaaaaatcagatgaaagaagtttgatgatcactagagccaaattagccagggtgttcagaaccaatctgtctcatctttagctgcaccatgacgaggactttgaggccattgatttagaaaactcaatggaatttatatcccaactacatggggtccctttggtttcatatcacctttggtcctttactaagcataaaattttatagtaggacttaatatgatgttagcttaaataattaagtttgaaagattattaattttaacatatattatggaattacaaaatgtgtgtagaatgatcacaaaataggagttgcgaatcttttaatttgatgatcacttgaatatgttactcttaccttttttttacttttaaattagtaaaatatgttactaattctttatgaatgtaaatgtacgatagctattgaaaatatagttgttgaagacttgatttattcatttataggatgtataaatgattcaaaatcaagtaagagtggtttggaacactttggagaagaattggtcaaagctgaaaaaatagtgacttagttacttttttttcagcatacaagtggatacgtttttaaaagtttgggagtctttctaatagtttaaaactcctccaaatcactcaattaataccataaatacccaattaataattggtaacttccaaaggttttagagtggtcattcatgttcatatggaagtgaaactctataaatagatatcatattgttcacttatgagaatatgctcatctttagatactagactgaacatataagacttgatatatctgtaagaacatttttagaatttttctaagcgtccgtatgagaggagaaatgacttttaagacaaaggtccttgaattttgatcaaatttattgtgtgttattcttctttttctctagttttcttgtaatcttcatgtaattcttttatttgaattttgagtattttaattgtaatcctcctattttatctttagaacattttccaacataccctacactaaaatatgcttaagtctcttcacatttggcttccctatccctacaactagtaatcatgctacaaatgaacaagcaagtatagcaaaaatagtggacttcataaaggagtgagctttggttaattggttccccttccccccactgagagagccaggcccactaagcccactgcttttttatccattttagaataatgctcattacacggttcaatgacctctctcatcttcaacccaagttcatgaactactgaatattttgaaggttccaacctgtacttgttaatgataacatgtgactagtttgttatatgttttcctagacgttgtcatttgacagagcctgagtttttcaaataatgttgtgcccagccagcccagccccactcaccactagtcttttcagctttagcattttagtagaagaacaacattgctattgccaaatcatgctaaagatattctgatgctcatatgatatttactaagatattttgatactagttcaagcttaacttcacatgaagacaagttgatcttcctttcctcgaccttaaaattgaattgactttaatttatatatttagatcaagacttgagctggcttgagtcctaaaacaacagctggtgcttggttatgatattagtgaaaatataaaaatatatacatagatagggagtgagtggcctatctattgctcttccctttgttatcagtaactccaataatcttaaggaagcaactcctgaatccagagtaagaaaactagaatatctcaggttcccacatatgttaatatttagatgcaattgactataaatgtttgaaacaatgtcccgtgctaatacaatgtaagtttgacatattcctattcccaagcacaattgatcaatacaaaaagggaccaagtttgccaccaatgataacattttttttaacaaaaaaaaaaaaaaaaaaaaccgcttaggagagttaaacacgtttaataagagagtttatggacagaatattttaagagacgcagtctcaaaaaggcttgtgcatagaggttgatcaatcagccactttaccaccccagggaataaaactatcctgtgatccaaaatcctgcaaacaccaatcaagaaatgcattaccttcttgagaatgttaaatagaaagaagcaaatgaattattatttaacttggaaaagaagacaacgtacaagctggcttaggcggaactcaggaggtgtatcaaggtaaatgtttgctggatcaaggacaagattctggcattcctctatatccttcttgagatggtctggtcctaagcgagcataatcagcaagcttgggtttgtccttctgttgtttatcaatctcatgtgcatcgccatacctgtttggagactggctttgaagaagatcatcacacagagatagtccttccacaagttgttgggaatccagcaaattttgggactcactatcccaccattttgagtcttcgggattacactgtaaaatgttgtcagtattctcctcaatttcctcattgttattaacttcttcagcttgatgttcttcctcaggttgataatgatggccagtcctttcacattcaattagaatgccatccattaagtgttcattgttattaactttctcagcttgattttcttcctcaggttgatcacgatggccagtcatttcacattcaattagaatgtcatcatcctccaagtatccaatatcagcatacttcaaagtaacaaagcagaagggaagaaaaaacatagtattagtatcccgtgtaccagcagccatgtttgaatggaacgaaagaaagaattgacagtgcctatttgatatctaataaatccatgtgagtgttaagtcttaagaagtacctttatacaattttactagttactggagtgtagcagaaaatatgctttcaaatgtattagcttaaaatctaagacatttatgagtaagacatggaatggaaagcatgtttcatacttcttaataaaatacaaaagtgtaggatagaaagagatcaacctttgcaaagggatctgtacaagtaacagtggtatctggtcctggctcaatatcagattgtagccgttcaccgcgaggggggtcaggagtcactgatttgggagtgactggatctactttgggaataatgacatcattagtttcagaaatttcttggtcaattttatcacatggcttcacctggtgctgctgataaaatattttagaaattacatactctccatccttctcatcctcccctgttcctaggtgatactgatgcatgacccaattagttttctcagccttgccacctctggctacactcatgtagagaaccataatcttcttacaccctcgttgaaccccatctaaattcactggtttggtacggccagtcttatgccagcggacatcacaatccccatcgcttatctttcgacgctttcgagtcccagtattgtacgccttaatggctctatgaaaaaaatgggctacacttccatctttcttaaccccttaagaaatttttaagttcaaaaaattaacttgaagactagaagtaaggataaaacatgcaaccaaggttaaataaattatttcaaacctggtagtttctgaggatggacataacagattccatcttctttatcaactgttgggataaactcggtaataaagggatggggtttcagattatcttcgccagctttagcaagcaagtgccatataatctcttgatcagatggatcgaatttcacacctctgggtaatcctggccactcttgagcaacctggatgtagatattataatagacgcaggcatttaatcattaaaatccaagaaggaagtattcatggcaatctgataatttgaaggaccaaaaaagaacaagatcaatttaagttaatcaaatcatgtagcagtgaagaagtttcccaatccaaagcatgaaagaaagaaccaaacttattcagcagtaaccaaacatttaaaatctaaattgacttcaaatttttgctaaaaaagttacaatcaatatgtgcagatgtttatcattttgaacatagggatacagataagcagatgaacaagaacacaggccatgtcacagaatttgaaatatggaacaaaatgtgtgaattccaaaagcagtgatgtgtaaaagaaaccctgcaaaagaattttctgtagtttgtaattattgctcatacaacatgtatgctcttatcgtctgagccaacttgatttagcatcattcaaatcattattagaacattagcaatataacatatccaactaatgtttcaaacaatacaaacaattaagtagaaaaaagaaattgcaatcactataattgacggcactgtaaagtcatatgtatagttattatttaatatgttttttttattcattacttaccattgtacaatctgtactcatagaggataaagaaaatgtacaaatcttacttcagtgttgtcaatcacatattggcaattaggacaggctctggtcgggttgcttttccatttgattatttcaagatcatggttgctcgatgcactcttaatctttgtagcgattctgttactatctactaaccatgatggtctgcacaaattacacaaacaaaattgcagttggaataaaaaaaagtatcaaagtccatctttaaaaatgaagaaaacttttatagtttaattacagaaaatggtgaacgaacctatgtaatgtgattataagcagacaattaaagtacatgacttatagttcaatctatagaaaattcctaaaactgtcatagacacagaagacagagcaatcattatcaccacaaatggagtgatccattagagaccttgcaaacacaaaactgtctatcttagtgcaatcttctagtgaaaggaagaatgcaattgtatgatcaagacattaaggagagccaaataaacatgcaattacattaaaagaaaaggtgatttttcaatataaaatagtagcttcattgattaggcatgagcctttcaagtagccatttgaatgtagtgttacacatgatcatgtgattttaattgtcatatccaactgaaaaatagcattaagaatctgaatatcttaagacaaagttgataccttaccccccctacccccctaattctgtcgtttaagtcagaaaagcacaaaagtcataaatatttctttgcattgctcatagtgcaaatcagtaaacccaaacagtaatgctaggattagtgaaataaaaaaacagttattggtaccaaagattcttaccaaaataagaaatacccaactcaagtgagtacaccacattaaaatggtaagatcaaaaaattacaattttttttttttttaaaaaaaaaaaaaagcattgttttttaaagaaaacccagaaatgaaacgcctttattccgtttttttcttaaaaaaaaaaaaaaatacctaagttgtcggccattgactagttcataagagagcttaaacagaaaggtgcagcaaaaagaaaaaagaaaaaaattaccccagccatttgaatggagactgaagaatcgagagagaagtttagtctctccggcttcggcgctgcgatccttctgcagtatgaaactccgttgacgaagactctgtaagatcgtatttcataaaaataaaacaaaacaaaaagaaacactgctattcttttgactagtttatgttcattttgaattccattttactgtttgttctacttctaatatggatataaactaaaggaaggagggaaggaaaataccatgtaattttcttaaaatagcaatttaaagatttttttccttttttccttttttaattggaatgtcaataaagttgaaagagaatgacataaattatcaccgagtatgcgccaact

SEQ ID NO: 14727 - DNA, 4262 bp, Cannabis sativa
aactgaatccattcgcgcctaccccgatcaatacttaagtagaatcctgccggcagttgcatgtcgattcgtatatccactttcagtttgaggaagcctctcctggcaataactctattgttgaccccatcagcttcaataaattctccaaccttggcccctatcaccgcagaattctgggcagcaaggaaaggtgttggtaatccatgaatctccacccagaaaaccgccttgttcatagagcttccctgccaatggccatccacgggccaatcccttaaattaaggagttgacccgccactatccatggccttcgattcagtatttcttccttatctgacatattgtcaaagaaaaaaccccacagtccagactccatcgttttgattctccaagttcctttcaacgtccatatgccagataaaatttgtttcatccgcccttttgataagcttctggatcccacgagggtagccaaaacggctgttttagataactcttcgttaatctcaacatcagcttctaattccagtgaagcatcttcaataaactgtagacgtaaagcttcgacattgtcatccaccggattcgacgtctcaccttcatccctcgaaaccggaactgttccattaccctccatctatagcacagaccaaacaagacctgggaccgaaaaagagctaaaaaataactcacagttggaaaaccaacatctcactcctgggagaaaaccaattatggataattaaggcacatgcaaaactatattttatgtcaaatatagctcaattttttcatcaaaccatagaatatgtggtcatgcactgccatgtacttttctatgtgcaagccacaactttctttctctttttttttttcctcaggttaacattaattaattaatcttcatgtcagcttgtgcataaaagtcaccccaattaaccaaccaaacagtttttatgccatgtgttgaagagagtaggttggtttttgagctgtgtaacaatatactttcccttttcattatacctactaactaccaaactatcaatttcttcttgatttttttttaaaaaaaaaaaaaaaaaaaatatatttatttaacaccaaaggactacaagtattatttggtataacgtaatgaaggatttgccttctgatattgtttgttaaaataataataaaaaaaaatgatacagtaccacaaatgcatagaaggaaaagaaaatgagacataaaaagaggctctcgagcatatattagatctcttcactatttaacgaagtgtcccaattttcaacaccacaatctccagagaaagaatcaagatatacataatagaggcagtgtcttaccatccaacaaattcaacaaaaataattttctttgagataaggaaggggaaaagaaaaggagagaaaaatgaaaatggggtattataaaaaataaaaataaaaataaaaattggttgcttttatccctgaacctttctttctttcattctttttttttttctttaccaaacattacagttacactatcctgtgagaagctgtgatgatttgcttattcacttgccccgaatagcctgctgccactcccaaagtttatatcagcagacagcagagaggcacccaacagaccaatgcaatgattttgattgtatgcagtgtgaaagtctaagccacactcctctttcctttaactcgagcatcttcgtgtctatctctatgggaagactgagattttgaagtatctcgtccatcacctgcagcatgcttcttcctccttgtagcaccagccccggttgagtctaccaatggacctgaccaagtttgcgttggtcctttctggtaagtgaatgaggttgaactgaaaggtacgtcagtaggaacagcagagggatcaatatgatgtgaagatcccacgggaaagccaactgccccatcttggtgtggtggaggaaatttctcacttttgctctttgcatttgcatgtgtgattagacgtcgtcgctgttgagattaaaaccaaacatatgttatgtatatcattgatgtaaaactgagatttgtattttgtatgaatcctgagctgtcagagagcaaatgctatatcataaaatctttcgtaaaaatgcaagacggaattaaaagacatacatcaatattagcttgaagctcagcattggcttctggagcaggcatagctctaacagaacgctcccgaatgcgtggtttctttgcaatttcaggctggtttttactagcagctctttgtctgcacacaaaaaattgtcaatgagactatttataagtattactattgctgtcgtcgagatcatccataacaatttaaaaaattaagcacatccaagttatttgatatcctaataaatgaaaggattgagctaattgcgcaatgtctatgtaaaccaataaatacataggtaaacttttcttatacaaaagcagagttcaaatcatttatacctccgagcttcatcatctcgacgcttagcatctatctccttggttggaggatactttgggaggctagaaggttcacaagcatatggttctgtcatgaagaactacaaaaacggaaagcaagagcaaagttaagaatatacttacatacttcaaaaggcatttcaactttcattttctccacaaaaaagctaatttttgttaaacaagcaacctttcatgacaagcaaaatgatcatacagcaccataattgaactactggagaaacttaagaccaacttaaagcaagtgcagcaggaaatggctaggaatcatactgttaattaaaacataattaactacaacaaacaagcaagaattatcattctaaaatggaaaactcaataatgcctatgtccaaaatgaataaggcttagttgcatgattgaaaagaaattgctttaactatttacgagagacggttgctccaatggagaacgaatcacaaataatttctgttacagttgtttcaactatttgtacaacgggaccagcaaaggttaacatagtcatagcgcatatttgaacataattttttctcatccagcattttccaagacattaaaattcactttaagttgcaaaagagtatcaatatagacatattgatactgattatagcagcgggaaaacactcacctcactacgtaaagcatctgtagctgtcttacgttcagctggatcaattgcaagaagagaatcaataaggggcagtgaagatggtgggaaatctttgaatgtttcttttatacatctccggtaaggctctcgaggcttaaacaaggtagcatttggcaaccttgcttttctccaataatcatcagatggtgagccgcatagtttgtatatcttatgtagttgctccacctaaacagccagtaaagcaattacacttaataaacagttgcacaatattgtaaaactgaagctaaaaagaactaactaaatcctagatcttcttcaaaatgcccaagacataaaaaaaaaggtcgtgtggtcataagcatagcctaggggttccacacttctcctcaccaagaggaggtcccaagtttgaatcccccctcccccaaagtcaaaaaaaaaaggtcgtaattaattttttcctaataatttgaaagattctaaagtctcactcttcacatgccacatgcactcattcttctacatccacctactgactatataacgctcttgcataaccatatttgactacacaatggaggaacaaagagtgattatttctcctctagttgacataccatactgcaaatgaaaagggaaaaaccttacaaatctaagcagaaaagtcaagtacctctgtacgaccaggcattatgggcttcccagccaataattcagccaaaatgcagcctgcactccacaggtccacacccacgccataatcagtagccccaagaagaagttctggaggtcgataccatagagtcactactcgactagtcatgggatgcttgtggtttggatcgaagaaagatgccaatccaaaatcagcaatcctaagtactccttcattgtcaataagaagatttgatccttttatgtcacgatgaagaacaccacggttgtgacagtgctcaagcccagatagtagttgatgcatgtagcatttgacctaataacatatcaaataatgagatatcactatacacatgagtaactaatagcatattatatataccaacagttagtagaacttgatgttagaatc

SEQ ID NO: 14728 - DNA, 11601 bp, Cannabis sativa
  modified_base (7419)..(7419): a, c, t, g, unknown or other
aaattataacttaaatatttatattgctaattactataaataaaattattgtgcaaaattgttaaaaaaaaaagtattgtgcaaaataaaagaaaatatgtcttttttttgttgctctaatattaaagaaaatgttaacacccctaattctcttcaaatttgcagttatgtcatggaataagctgtcctgtaaattctgtaattaataattttctgaccaccaaaaaatgaagaaaaacaaaacattctctccaccttgaagcactacatctatatttcacattacataatttatttggtcaacggtcataacatgttacataacatgttacatagcttgaatcagctgtttccaaccttaaattgatacattgaatcccctttttctcttttgtcctttttgactgccaccacatttgaaattcttgtcataatgtataacaaatatctataatgtttttcttcacttatccccaaatggaacattaatccacaaaatcaaaacattatacttacaagttacaacaaataaacagatatgtttatttatttcattagtggagaaaatatcttcaacaatgataataataacacttattccctttttcttattttttcttaataatcatcagaaatgtttaaacaattatagatttaatagaggcagatgtataataacaacaataatagttagtacatacaagtagtggggcagcacacataatacatatttacaagccagctttgccatatctaccatttgtaatactagtaaagaacaaatgggttttgtttttcttgcatttctgcaatgctgaaaaaggaaaaggagtaacctttactcagttctctcccaaatccaaacccagaaaaaagactacatttttttcagttggtaactatttacatcttgtatctactttgaatctacagtctttctttcaaaagttgcatcttttcttcttctttctttatattgggtaccttttgctgccttcttaagttttatctttagatatgtttatggctttttttcttttttgcttttgtgtttggtcatgatcctttcaattcctttttgacccacattttagtattagtatcaaatctactgttccctttcttccccttgtgacccacattgccatcagcatcaaatccacagtttctcttctcaaaactttcctggcttattttggagtcttcccatttaaccctccctacatatttttcatttaatacaagaaaacagcaaaaaataatttctttttgaatacttcctagtacttgtccttgtaaagttttagcttgggatgccttgtatgtgtcttctgtgactagttagtacactgttattgggattttagatttttggattctgggttgtgattgatttgcataaatctgagtatatctgaactagtttgaataaatgttcttggttgacttggctaaatctatgcaattttcatttagatttacttgtcattccatctgtgtttagctcaccaccttggcactagagggattgcttcaaggcttcttcttttcccatcaattttttgttatttcactcaatcatcatgcaagagcaagaaaccatggatgagatgtttgttccatttagaggaatcaagaatgatcttagaggtcggttgatgtgttacaaacaagactggactagtggtctcagggcaggtttcaggtaaacatattctgcttcccaagaaattttcaactctagttttcaatcaactggttgaaagtattgcactttttttagtagtgttttgttgttaacatgtttggttttctcaggattttggccccaactacatatatcttttttgcatcagcaattccagtcatttcatttggagaacaactagacagaaacactggtagtaaaagttcaaatgttgtagaaattaatctgtatacagttcaaatgtagtaaaaattaataaaagttttgttctttctcttgtagagggtgttctcacagcagttcaaacattagcatcaactgctatatgtggaattatccactccataattggtggacagcctttgttgattcttggagttgctgagccaactgtgattatgtacacatttatgttcaatttcgcgaaaaacataccagatttgggaccagaactctttttagcttggtcaggatggtatgtcttttcattaatttctcagcttgtttacattgttgtgtgttttgttggaaacttctttgatgaattgttttatctttatgtgtagggtatgtgtgtggacagcttcattgctgttccttttggctgcactaggggcttgttccctaataaataggttcactcgtctcgcgggcgaattgtttggctttcttattgcattactctttatgcaggaagcaatcaaggtaatgaacagatttctccttttagtttatcatttatttatgcttctagtcttttcattgtttgttactagtactactactgccttgtgatttgtgttttgaaccatgaatgttagggagttgttggcgagttttacatccccgaaagggaaaacccgaattctatcgagtatcaaccttcatggagatttgcaaatgggatgtttgctttggttttatcatttggccttctactcactgcactaaagagcagaaaagcaaggtcttggcggtatggatctggtaagtatgattaacatttaaatgtgatgttatgtatggaaatttttagagacaaggcaataaattaagtacatgagcatcatgtaatatgaaactcattaaagttaacagtcaagtaagtggtcttttgaaggcattgctaatgaacaattctgctaataaggttcatgaaaatcatgcaaacatataggactcatgttcaaatttttcgtcaggttggatgcgaggcttcatagcagattatggtgtgcctttcatggttttggtgtggacagctgtgtcttatgcaccaggcaaaagcgttccaaaggaaatccctaggcgcctctttagtccaaatccatggtcgcctggtgcttatcagaattggactgtcatgacggtatggctatgtgattgttgttatacctgttgaattttttacctttagaaaggaagtggttcccaatattttcctctctaaaactacaggaaatgctacaagtgccgattctttatataattggagcaattattccagcaacaatgattgcagtgctgtattattttgatcacagtgtagcttcacaacttgctcaacagaaagaattcaatttgagaaaaccaccttcataccattatgatttacttctattgggtttcatggtatgcaaactcagaactttttcccttctctttgacataatttctcatttatattatcatggaaattatgtttaattttatggggtttcccttatgtgataggtcataatatgtggtctccttggtattcctccttccaatggagtaattccacaatctcctatgcacacgaaaagtctagccacacttaagcaacaggtagattcttcaaccgagagacgaaattcttgttgtgcatagatgcattcttcaactatgatcatctgaataactagtgagtcttgttgcagttgcttcgcagtcgattagtagctgcggccaagaaatgtatgagtaaagatgtaagcttggggcaagtgtatggaagcatgcaagaagcatatcagcagatgcagagcccacttcaccacgaagcttcagctacggtataatattttgttttcgaacatagcttaacaacaggccaagatgatttattagtacacacttttgattttacaagcctaaacatacttataattacagggattaaaagaatttaaagacacaacaattcaagcagcttcaagcacgggcactgtagatgctccagtcgatgagacaatgtttgatattgaaaaggaaattgatgatttattgccagtcgaggtgaaagaacagcgtgtgagtaacttgcttcaatcgacaatggtagcagggtgtgttgcagcaatgcctttcttgaaaatgatcccaacctcagttctctggggctattttgcctatatggccatagaaagcttaccgggtaaccaattctgggaaaggattttattgctcttcatagctccaagcagaagacacaagtaagtaactatttcagtctttgttttctttcaataactcatccatttagtgtcatattcccattttattggtgattggattaatttacttgcattgatgctcttgttcagagtgcttgaggaatgtcatgccacctttgttgagactgtaccttacaaaacaatcgcagcgtttacaatcttccaagcctcttacttgcttgtctgtttcgggattacatgggttcctatggctggagttcttttcccattaatgatcatgcttctggttcctgtgagacagtacattttgcccaagtttttcaaaagtgttcatcttcaagatttagatgctgccgagtatgaggaagcacctgctttatcattcagccaagctgctgtaagctactactcatatctttcggttttttggtgttgaataatgcaatgtaatatttctttattttctcatacaaggatggggacataggaagaacagcttcgtttgctgacaatggagaggtgtttgatggcatgattactcgaggcaggggtgagttcaggcgtatgtgcagtttcagggtgtcaagttccggttcaacaccatcaaaggaattcagacgtgtgcagagtctggtgacaagctccacagcaacagcgtcaaaggatttcaaacgtttgcaaagtctacagattccacggcaatcagactcggtgcatagcccccgttcaagtgagctgagtcctcggcttggtggaagagggtctccaagaaccggagaactaagacaatcaaatctagggaaaggtggttagcattggaaaaaactcatttgtcaaatgaaatttcaatcaccactagcaagccttcgaaagcgaaaaaaatatacatagccaatgttttctgacttaatgagcccttattattaggatgaaagttgtctgaaaatgcagcaagtctgctggccatttttctagtcttcatttttctgagcatgatgtttcatattttccaaatgcattcaaaggatgctattattttgtaccacaacttatatcaaaggatgattctaagtaacatttaatgattggtttttattctttcccttgtctcatggcttgtttatcattattactttcataaaattcaagactaacaagttaagtaatgcttaagcatgcaacaacaacttatagtttttatccaaaaaaaccacttcaacaaaatagccttcaaagaaagctacatttatgattatgactctgttctcataccaaatctcaaatgttaaaaaattaaacaagaaaaatatctcatcgatacaaactcgaacaacatcaagaagtcttgctgaatttacgaccagacatcttctcggactcgtacaatatgtgatttataagcccccttgctgcactgcatatcagaacacaaaaaaaaaataaactttctaacaaattgttgtgatcaagaactatctctaacgagctttacagctacttcaagctgcagatgcataggaactaagaactaggcaaagcaaacttactcatccttgagcttttgaattttctctggatctgtctcatgcatgttttttttgaactgctgccttatcattccaacgagaagtggagtattattttgctgcattcatgagttcaatgaaagacttcgatttctcagttacaaataaaaagaagaaaagtatatcaatttataattaaaactgataaatgcaagtacccaaaaggacatttttttttaacagaaagagcttagcctcaaatactcaacattcttgtactagtaatagatctgcattgttcagctaatcagatccacataccttaaaaaatccaatcaaacatatcttagtctaaagttgttatttttacagccatttgaatattaccctttctccagttttgtttttcaataacgaaaatcaattagtttacaccacaagctgaatgcttacagaataagaataaaaataagaatggaacaaaatttaaaatgcataaaaagatttgataaaagttttatcatagtggaaaggtcatctattgatatgacattacaatactttaaaattcaaccaagggaatgaaaattctgttccattttattacttctaaccaaacgcgatcttagttttctctaatgaagatctacattagctaatttcaacatgaataaatactagaaagctatctggttagcatgattgttctgcattttcttagtaatttatgaatgaatcattaataaactagtgagagatcattaacaaaggataccaaacttactcaatacagaattagacatacatatgtaaatattattaaccaattttgaagaaagaaattaccctgtgaccaatatacttagctcttcgaagacactcccggtaaagctacaagcaataaagatagaattcaagcttatgcattttcaagaacaatattccaatataaaaaaacaagagaaattaatgggactaactctaatggcattgttggcaagttcagggggcaacgcagtttgcaaagatggcatcttttctttctgggtttctgctaaattcacacacagatttaaaacatgaactgttgagcaacaaattcatgataaatgaaaaacataatacagtgaatcaatcaaaacactaaaagggcaaactgatcgaaacccagaacaagagaaaacataaagaagatgggaaaaggggaaatcggtgtaagaaagatagatcataccttaaagtggagaggtttagcagaaaactatgatatagtctgtgaagtgtgaagggcaacgactccaactccgagcaaaatttttttttttctattttttcttttattaaatttatgtccttgttcttaatattggttttttaaaaataaatacagggctgggccgggccgtgtcagatttcaagatggaaggaatgagaaactcacaaaaatattgaatttttagtaaagatttacatttatactgtcacacggcaaaaattagatttatactgtatttaccttttttttttcttttatactttagatgccaaaaatcacatattgagcctctgtcttctacatccacagagagaactactctagcaatacgagaacacctgaaaacaactattaatttcggcaagatggaacaaaaatagagaaatcgacatcaaataaataatcatagcaaaacaactgtaaaaaaatactaaaaaaaataaaaaaaanaagaaaagaaaagaaaaaaatgattaaaaaaagctaactatcttctgcatagcctcaatactagatataatagagaccatatttgcaagcccagtcttgaaaaatcagaataaaaaaaactactaaaataacataaaaacaaatgtaaaataatgaagccaaatataacaaccacttaaaaaaaataaaagaaccacacccctttttttgccaatgaacttgtcaagtgtatttataggagaatcagaaatcagaataaacagaataaaaaaacacaaaaacagccatagagaaggaagaagaaatatatttatagccctcattttccacacacgtatagaactaccgcatcaacacgagaatacttggaaaataaccattaattcggcgagatggagcaagaacacgtatagaaccaccacatcttcctcatttacgttgatgatattatagttgctactaaaaatattacaacattgaacaaattcatctctacccttgatgcacaattcaaactaaaggatcttggcagtctacatttcttccttggtctcgagatagccagatgttccaaaggaatattagtcagtcaaagacccttcacactccaactgctaaaagactcatgttgcctcgactctaaaccagtctcaacaatgatgatggcacgctcttacaaaattcaactcaatacagaagcttaatagggaaactactttatctcaccatcacaagacctgacatcagttttacagtaataaactcagccaattcctccaatctccaaggcaacctcacttacatgctgcaactcgggtcttacaatacctcaaaagctcccctaggactcttcttttatgcatcatgttcagctccccaattttaggcctttgccagtgctgattagggagcttgtcttgacactagaagatttatcttagggtattgcgttttccttaaacaatcactcatctcatggaaattcaagaaataaccaactgtttctcgctcttcaggtgaagcaaagtatagggtcatgtcaaatgctacttgtgaacttacatggctacgtacactccatcattaaggatttcaacatacaaatacagctgccatctatactctttttgtgataattcagcagcaatccacatcacaaaaaacccgtctaccatgaaagaactaaacgtgtagaaattgactgtcacattgttagagaaaaagtcaccaatgacaccgtaaagataaactatgtttcttcagaaaccaactaagccgacatcttaacaaaactacttttcccaaaccatttcaatgacattgtatccaagatgggttgtcaaaattttttacattctatcttgaatgggcctattaaatttagttggttagttaagtttgttaggagctaagttagttagttggttagtccttacttctatttgtactagttcaactattgcctatatataaggcatcctttcattaacgtataaacacaattttacaaacaaataaagattacattctttgttctaataattaggtgattttttatttatacatatatgtaaaccataataaattaagaaactaacaaaaatgaatagtaattacaattatcaggatttgttggtatatcataacaaaggaaagtgggttggagatgccgagaagccccatgacaaaaccttatataccaaatacatacataattttggacatatatatttaggatcgatcttgattcaatgtacgtatcacataatattaattaatattagtaccaccatatacaatacaactgaactgaccacaaatcaaaaggaaaagggtagtggtcgctgtggactttccaaatatattagtgtcagcttttggaagattaaagaaatatttatgatttgctagctgtgatttatataatttgatacgtaactacataaaattttatattatgggaaacgtacaaccatattatgtataattaagtgatgagttgtgccacttttcatcagatcaaatggttcttatgctcacagtttgttgtgttataatcatatattgaaatctttaaaaataaaactcaaataattaattatcattttaaacaattattaattatatatgattatgagtagatgccatttttatgcttttgtggattatatatatcaatatatataaatatactttgaccaacaacagagcatgaatggattaattagcatacaattaatgtcatagctagcctagcatgacatgaaaattaattaattaattattgaatattgttataagacattaataatacttagtacaagggccgggttgaaatgacctataagtaaaaaaaaatatttaggctcttactatataataataaatagtattttaaaaaattattaaaaaaatatatatatttttttaagacatttttttgatttgaatttctaaaatgaataggctttaagtgcgggcctaactcacctatatttagagtcagtactgcttaattagtatgtaacactttgtattatttgtgatacttaatattattattatattaattagctgttttataaataataaataacacttggtattaaattatattaataattatattatattttataaagatattaagtataatattttttaaaaattattatatattaaattatataaaatttaataagtaattgtatggacaacaatataataagtaaaagtagaatttgttttaagatttgtattaatatatgatggatggacaatacatatataaggtttttagttgtgcacccgtgacacacagaaactataacccgtgaattatttgatatgccacgtgccactctctctatccacgtatccccatacaatatttttaatttttataataaatttaaagagagagaggagaggctatcttgattcttgaccagactgatgagcagaatcaaactttactgctgcatgtgaagtgtgaactactctatatatgtttctgttttggaaatctaatatttgaggaagactctgctagctcttacatatatctaatcaccaatccattttcacaccatgccaatcatcaacactctttcctacctttattatttatagagttattattatgcattagtagtgtgcaggccaaatacttatataggtggtgttacacgattaacatacttataataatttttttttaagaatatacgagtctaagatgaattagattttaaaacccttaaaaatatatataaaaaaatattaaaaaagagtgtgttataggatttaaactcataacattaggttaatatgtaatacaccttaattaactaagctatgaatatttattatattttacaatacttaattttgcttaaataaaaacttaataatttttttatttttttattttgggccatcgaaaagtgcagactttaagcacgggcctagcccgcttatacttaagattggccctgtatgagactcgatatttaattacactaataacagtatactacaaacaaagctacttttagtaacaacataattttttgtgactaaatgtgacatttaatcacaataaaaagttactcaattatgattaaaacataatatttatatgcaagttgtcactaatttaattagttttaatcacaatattattataactaaaaacacacttagtcacaataaattatgattttggtgactaatacttttaaacacagatgttttaatcacaacttataattagtcacaataaattgtgatttttgtgactaatacttttaaacacagatgttttaataacaatttataattagtcacacattttttacttttaatcacaaattttgttgtgactaaaaattaaattttttagtggtatgacacttataaagaaaatactaagcaccacccttaccttttaacaattcttttattatataatatatattattttacacataaccaatatttatttatgaaaacataaaaaatagatacatggaataataattaaactcagtaacaatgcatgcatactttgcaaaatcatgagggaaatttgacttgaaaaatttgaaaaaatatgcataaaataccttattattttatgcctaaactaatacttttcaacattgaaaacatatgaccact

SEQ ID NO: 14729 - DNA, 9250 bp, Cannabis sativa
  modified_base (7342)..(7342): a, c, t, g, unknown or other
  modified_base (9215)..(9220): a, c, t, g, unknown or other
agtcgggttattcgggttgggcggtttacgaaaatttatgtacagccctacccgattgtacaccagtttggcttatttctgggttttgaaaatcgagtccgatctgggcccgatgcccgtctgatggtgtgcccaattttatgttttatttgggttttctaggttttaaaggtcgggcctgatgtggacccgatgtgtggagggttgggagcggtcggtcggtaagtcggtcggggttgcgtggagggttggggcggtcggttggtgggttggtgatgatggttgagggttgggatcagttttctgcgatgggatttttggcgaagaggcaaagaggcagagagagtttgagggaaggagagagaaagggtttgagtttttgagaggggtatttttggggttttcaaaaaatggtcatatattttcaatatagaaaagtattagtttaggaaaaaaattatcccctaatgcatgcatagaaattcaaatttccttttatgagtgggtaagactgagagatgagagaagagagaagagagaagggagaagtgatgcgtgaaaagaaagaaagaaagagaggaaaatgttattttttttgactgtagggtattatggagattagaatcaatatagattaagggaataattttttcctaatgcatggaaagtcaatttttccttatattgattaattaattcaaaatatttatagtttgatattaattaatttattcataaaaaagtaaatattaagtaattaattttagaataaataatatttaaattatttattatctatatatcggtggttacgtttattctctcataaattttgtcattcttataataaaatttaatctactttaaattctctcatttattctatcttttttctgttttttattctatttatttatttatttttttgacaaattattctattttatttaattagagatcattaattaattaactttttatcctattttatttaattaaaaatcattatttttgtcaaaaaaaaaatagagttaacaatgtctgatacctatattcattgtctttttaatttttttcatttttattctactttaaattctcaaattctcttttttttttttttctttttttattttactttatttaattagagattattaattttatcaaaaaaaaaaggtatattcaatgacaagcttttttttagatgaaataagtgacaagcttttagtcataatataaattttttgtgactaaatataacttttagtcacaacaaaaaattagttatgactaaaacacagtatgtaaatacaagttgtcactaatttagctttagtcacaacaaatattgtgactaaaaatatatttagtcataacaaattgttatttttgtgactaatacctttatccatgaacttttcagtcacaacataagaatgacgatttataattagtcataacatttttatttttaatcacaacttttgttggagctaaaaataaaattttttgtagtgttaattaaaaatttaaaaatatataaactaaataaccgtatatgataactagattcacttaattaatttataacaaaatgattaattagcttatgtataaaagtgagtacatatcgatcatcgtttaatttattttatgtacaaaaaaacctactaggaagaatattaataatgactacaagtgaaatacggcaatgatttacttaattaatttataacaaaataattcacttatgtgtaaaagtgagtacttaccgataattgtttgatttattttatgtataaatcaaatttactggcctgatcatgggaatcatattaatgatgactataaatgagatagtgtatgatatcaactttatgtaatagtaattataagtgaactacactgatgacaattattttaaaaatatttctttgcgtgttttttttttaatatctatataaaaaattgtacgatgaatatatttttttaaaatttttttgtatttttatatagatttattatttttttaataaatatatattttaaattatacataaaaatatatttgaaattatttgatatgattttattattacattatacaatcgtaaataaaacgtaatctatttactagtttgaaataaaataaaataaataaaattttaataaaataaaattaataaaattgatacgagagctctaatatgcatatcattagttatgattggaagtttctatgggtagtgaagaaagtattttttttatgacaataaaaatgaaaattaattgcaattatttaagattttttactatttttcataatattttaaataatttactctgataaaaataaatcttcaaacaacttattgaaacaagttgagtatagtaaaatatttataattttctaaaattttgtaaataactacaatctacaaaaacaaaaagttatgttgaaggtaagggtggccttggccccatcaattttttttatatatattttaaaattatattgacttttgtatatttcttttttctaatagtaattaagcaaaaaaaaaaaagaattatattagtgagttctatgtggggaagtggatttgatgtatttagtcgaccacatgggtgttccgataagtgccaaaagaaagcaagaaggcttcattcaaacttacccagcagcacagcatggtccacacacactctaaatctaaatagctatatttatatgcgcatagacgtaaatagataaacagtaacatctctatcaaaatgctaaaagcgtgcacaatcttacactcactctttttgtgtcatatgattcatcttttttacattcttcaaccaaattcaaatagcaattaaaaacaagacgttaaaaattgaattattacacactgtttctattcatactaataaatatccaactaattattaagaagaagagcaagagtgtaacggcacgcaaaacaccaacaccccaccttaaagtcgacgccgttaacacacgggtttcttgaggttcacattaattaatatttttgaatcattatatatatatatatatatgcatgattaggatcaggatgtgtgcctatatatatttatatcaatcaataaataataggggggtttgtcacgctctttatgatggcctaattttgaaaaagggtagtgtcaagtgagttacttttaagccttataaaagggtacacatgcaccacatgatttccccatataggtttcttcattggctgaaaaaagaggtgcccagcaaaacatgaaaacgtctcttaaaacattaaatgtgcccaacgcgtatacaatttggaccacaacaagtatcacacactcaacttaataatatttattcttcttcaacacacacatgccttcttttactcccaaattattctatttctcttcccttattggtaactattccggttcctaacactcgttttcttttctttttcctttttcttggtttgagatgcctgtaatcactttatggaatatattatggcctagaatttaagaacaaggtctcttcttttcatgtgtccatgtcttaattcaaaaaccttcccttaataaccagaaaatatttagaatatttattcaaattttgtagaagaaaaaaaaaagtggccaagaatgtttccgacaagaacaaatattatttagaaacatatatgtactactttatagatttcttttactattattattattatttataattattgttatgaaaaagttgacaaaattgtttaattattttttatgtgagagcagtttgtattagtgctccaaaaactggcagcccacttgaaaaacatgtgatgtaggaattgaaaggaaaaatattgattcaaagaaaaataagtaaaacgttttagttgggttacatttacttaatggaactgagctagtactagaaaaggactagattactctgaagtccattatgaattgaacaatgtcactaaaggaagagctgacacaacaccaaattacatcaattatattaaataaaaaagagaaagagaataaaaaagcttatttagcacaagtttatgtggcttcccaacatcatgacatggatgaaaacttgtaaaggttcaaacttcaaaaaaacacgttttcatgaagactttgagtcgttttcagctacagcggatgatatactcattctaaccaacaacatgcaaagaaccaaccataaaaaaaagtagaataagatgattaacacaagactttcctagaaatatatatatttaaaagtaagaaaaaaaagacaaaaaagaaatgttatgatgatcaaaatatggacagaccagccaagaacagaatagacaaccttctccatatatgaactttgtttatagttttttcaggtaataatacaataaacaaaggggaattgttgtgaagttgatatccaacgtaaagaatatactaaaggaacagtaataacaattaataagtacgctaatgatgcaatgaactagagaaaaagaaaaaaaggttagtactttggggaaagaagaaatgaaaataagaataagaaaatatcagcttcgtcttcataccatcgatggaagagtaggttaaacttacaaacttaatcccatccaccttgcaagaatacttaatgacaaaatatgtatgctataaaagtattaacaaatcacataaaatttgctgcactacttagtcaacagatagttatttttttttttcttttctaattctagctgacactgcttgtcccttataggatctgctgctgtatatcaaaaactcttgaagaatcatctctcctaaacaagttcttcaatataatccctatgcactactttagtaacaagtcttgttctactatccaactgatgacaacgtctgtaaggaattggcttcaatggaaaatgctgcaattaacttttcctttgtcagttgctcagatccttgagacttgattacaaagtcatgaaacactgtgtcattcacagtggtaaattttgaatcaacaacagagatttgtgcttcattgaatgcttggataactcttgatgcaggatgagactccaaatggcagcttactctaactataacctcattattaacaaccttaacatcaacatcaggaactctagactgaatttccatatccgggttattagcttccatagctgctgctgttgaacagctcccaactttctccctctccgtttccatgaccttaagcttggcctgaagctcgttaatataagctatggcatctcccaacaaggaggctttgtccatcttagatatgttaggcacaactgctctcaaagcataaaatcgctggttcagcttctcacgccgctgtctctccgcctcaacatgattgaggggctcttctcgcccgttcgcaggctttctcccacgcttcctcggcctcctttcatcagcagcagtgctcggccgttcttccttgcacgaagcttcaacatccgaatgctcggattcagcactagccggccggtgattacttgaccttgaagtggccccggagaagtcaatttgcatttggacctgctgcttttgaggctggtaattgttcaaccgaaaatcttccctaaccccattaacaatctcctgaatattagtactcttggggcactgagaagcatagatttcagttgggttcccctgttgcttcacaccctggacctggagactatgtggccaagttgaaccatgaaccccattccggggaccagagaaagcaatccgattcccgttcccgttaggatacaaatcccatggcctctcttccaactttctaatagcaagtttttccctgtaatgaggccgggcaacggtaccggcattcaaatcctgcccaaaaatcttgtgtacacctacactttcatttctctccaaaatcccagaattagtcaaattaacattctcatctctcttatcaaccatcaaaggcaacacggctatgggcttaccaacccttgtgagcgaagattgcgtggaaaacaaggacctgagtgactgcaaaagctctaagctttcacccacagatctcactgaacccaattcaaccacaccaacctcagttgggactaaaacaatggtctgaattccagcagatttagcaagaaaagaccgaacacagtaatcagaagaagatttcaaagcgtccaggagccataaatgcttcccagaagcgtaacacttaccagggccaccttccccacgagggaaggagaaatacatggatgcaagaaagaaaatctcggtatcggtaactcggtcgagcccaagagcatagttgtcctcatcggagccaccaaacaaattatggagcttctgaagaaccctcttcctcattctctgctgagtctcgtcctcgtgccgaaggttgaggattctcgtggcttctgactcttctccttctctgggttctctacacgacccgtccccccaacccaagacccaatctccagatttcgaccgcgatatttgccagaaaatcgcatagttccagctgaaattcgacgcgtttggacgctcaactagatccgagagcttgttctgcaaattctcgtcgctccctatcgccattaacagattctcgttcgtcacggaacttgatatcaagtaatcgaaagctcgagtacccaaaacagcctcaaccatggccttgtcttcatcgttccaaactccactaccaccaaaacccacctcactcttcatccctaaaagcctaatatagaagctagctacccacccaagaaaatatataaacaatattttatattaatatttgggtcgtcaacaccagatcaaatctcaccccccaaacccactaacctctaaaaaaacctactttttcgatttttttcagatctcagaaattccattccctacgagacaaagaaaacccagaaaaaaaatcccaaaatcaacccagaaacaccagacgatgagaaatctttcggaccagtttcataaaccgaaatgggatcatgaaataagggttggataaggaagaaaacgaagagccccaggttaattaaacattcccgggaaactgacaattcagttaagcgaaaaatcttttcttggatattattttcagtttcaccaaaccaaaatcaaataactgaaaattttaaaacaaaaaaacctttaccttcccttccaacccaaatttgttcatgtatttatttatataacaatatataacacacaaaaacaaaaacaaaattttttatatatattgtatgaagctttatttgtttactattactactctctctctctctctctntctctctctctctctctcgtgagtttttggtttgggcttttctaaatccaaactgattaagctaagtagctacctcttggtgtggtgtgatggtagttaaataataaccagggttaaagaataataaataaaagggcgtttgtttaggttaagatttagagaattaagaattagtcggcaaagattttggtgtgtttgtttgtgtacaccacctgaaatagttctctatttacttgccagtaatttaattcatgtgattaatcacaagtaaagcaatattattattaataataaaaatacacagctgctctgctttgataatttaattttttttttgtttatattttttaatttattttactgtaagtgtagacacaacacaaggatattgtgaatctcgtgggaaataacataagcagtaattaatattaatggaaaggcacatgtacaacctgtgactccgtttattacttcttcccagagacaacttttattgtatctgtgttgtgttgtgttgtgtgggtgtgagagaccatgtgagtttattttgttttgttatattgaaagcaaaatctgtgttaggtttcagaatcaaacttcaaaaaagtggccattcatgtcatattctttttttacttggaaaataattaagcttaggatatactatttgttttttttttcttttgagaagtgaaaaagttgcattcattcgaagagttgaattaaacgtgagaaaaaaaagatataaaaacttgagtcgaagtaaagggagatttaaataatacacttaaaagcaaattttttatatataattttttccatttttttttatatttttatgaattttttatatatatttttacacattttttcttcacaaattttcacttatttttgtttaaccaaaaatattactttcaaaatgtcaaaacaatattattatgaaataataatgaaaaaaataacataaagatagcattccatatatttatataaaaatacatcaaattcgtaaaaatataaaataaaataaatttgtaaaaaagtaattttttttttcatttttatgaaataatcccaaaagtaaatatttttatactaattttatttagaaataaaatgttactttgctcctgattctctcactttaattactacaacaggtctaccaagttttaactctataataaaattttggtaattagataaatcttataaattacatcgacaagcataaagtcaaattggacactaaaaattcaaatttaatattatttttcactcaaattaattcaaccgaatactaacacatgaaattgtctaatactaacacatgaaattgtctacattaccctactattatattaggaggaattgcattatgttgtcttgtacctactttactttatttattttaatttttacatttatttttaaattctttaagatatcattacttttataaatgatattcctattataacatttaaattgatgtaaattatgtgttaaacttaagtagagattaaaaatatattaggaaatttattcacaaaagtaagtactttttaataaaatataatataagagcatttcttattaatgaatacaaaaaaatcaactaattgcctattattagtgggataatttaaactacactattttttttttttagggtttaataattaaataatgaatttttcttaatatatatgtataatttatacataaaaatgataaagaatatatttttttttgtgtaatttttagttttgtagttgtaataaagcaaaaatttagtgttaaaattgtacaatatattggtttactattaaatttagtgattatttcacaaaaacataaaaacaacaannnnnnttacaaaaatacggtttcacagaattttaa

SEQ ID NO: 14730 - DNA, 6963 bp, Cannabis sativa
tactttaatttctgttatgtttgaccttgtttgcaaatgccctgaaaattcatttgtgtgcaggcctgctattttcccaaccctttagccgttgagctcatgcctgttgatactatttttggtgacttgcaaagttggatgcatatctcagttgtcaccgattacccaattaagaccctcctacttgagagcagtcacaagtttaaaataatgatggaggttcttgtcaatatttgctcttgtcttcaggatttgagcatttcttacagtcttctgatatctgattgtggcaaaaagatctttttatttcttcaggtaaatgagctttagtcttatgtttatgtgccacctctttattctcatctcatgctaaagaaactagaaaaggctttaatgagagagttaggaggtaagaaaggattgccaaggataactagatcaaacaaaatcaattctcattaatgtcatggactaaatggaaaccaaactttttatttatactatctttactggaaaattatattgttttcattgtattttgtcaagatttattggtttgttaattctgacctaatctttcttttacggtttcagaagtcgaaagactcttccttcctttctgcttgggagtgtggaggttacttcttgtataaatcaaggtcagaattcgacgagtgtactgaaaagactatgctgaaacagctcagctctgtatcaattgatgacgacggttttaaagctgtgaagcttctctgttgcagcatagcaagtaaatttggtttttgaatttcgaacctacaataataaggagtttcatggccaaaaataacttctaaataaaagtccatactacttctaaagttgacatatattcaagtttccaacttgcttaagactgacaatctgtgttgaacaaagaaaaagcactaatatagctgtgattgaaagaatgattcaaacaagattctcacatcttaagtgagattgcttagtttagcaaaagaaaaaagaaaaagtgagattgcttttcttcttacctttaaagcactttttgctgattcatgacagattgatgtagagacataagaattgatatactagattgcaaaagtggtggaataatgtgattttcaatttacacatgggatataaattttttatcactccaaatttgagtttctttttcactttttgttctttttctcttttcaagtactaaaattacaaaaagttcttttttttttctttttttttctattgtaccccaagtctcagggcattcacgagagcttcctatatcatgtgtcaaagtaatgacagttgttgctttatttgaatttttgagcttcatgatctggcaatggagttaatactacacagctcactaataaacgacaaaagtttgttgtcgttttttgtttcgggggtctgttctgcacacaataaaagaacatttttaggtatataccaagataggctgctctggacatcatttagcaagggtcaccatcttctagcaaaacagccaaaattttcacctttttcttttagtggtaaaagctatgtaatataacgatatacaaaaatgtcaaattgaatctacttaataaataattaaaactattatctctattgatatgctataccattttatctggaaatgtaatagaaatatttaaatggggaacttcctttctttcgtatctcatcatcttttctcacatttttattttagtaaacatgcaaatgaaaattattacaatagaaataacttttattcacctgcagtaaaacatgccaatctttagtattagcacgaccttaaatttataacaagcttttttacttctaaaaaaattaccacgaattctttaattttttaattaatttttgacaatttaatctctttattttgttcgtagatttaaaatatattcttaatgatcaattacacggttttcttcttaaaaaatacattaatttaattgctgatatttttacgtctctctctttgcaagtataatatactaaactgtcttaaaatattaccataatttttttgaagaaaataattataataataataataacaaacaaaaaatcctagattattttgcacgttccttcctcttatacattagttgaaattttcagtcaaacatttgattaaaaagggaaagagatgtccatattataccatttatatatatatatgtttttaagctaaaagcttaaaagaattaaaatactgaatacacacaaatgacagatccataccttaaaaagacaaaaagtataaggatactatactaggttcccttttctcatgaacaaccaagtttatatgtttagttagctggaaaaaacaatgcagtaaaatgaatagagaatatatttgtataaatgcatacatacacacacaaaagaaaatgaaatccaacaattttttcatttaataaccttccaactaccaaacaaaatcttcagaaatataggaagaattctattttgaaatttaaaaaaaatgaaaaaatcaagatgtaataaaaagaatcaagcttgtgaagctatataagataatacaacagaaaactaacattttgacattgaatttaatttaacaaatttaaaagaatttgtaagacaagtcataagatttcaatctctaagtcctcattggtttttgatgcaaatctgctatgagagctgagttgcagcctccatatcatcaattccccttgatgttgtagacttttctatggagctgccatctccatcgaaaccgggtccttcttgtttctcctctgctgcagctgctgctccttcatctggccccaatgcctgactacttgagaaggaattatcggatgcattgttacgcatccaagcttcgtggagttgcaatacatactcgaggtgccatagaacttcccccattgttggccgagtcttcccttcgtcggctagacatttctctgctatctccccaaacttcttcaatgattcgggacaatagcttcctttgagacgagggtcgatgatggtttcgagggacttctgtctttgccatctcattgcccattctgcaagattgatttgatctttgggcaatgttgggtttataacagctctagcacagacaacttcaaacaacaccaccccgaatgagtaaacatcggatttctcagttagctgctggcgtcggaaatattcaggatctagataaccaaagcttccttttactgcagtgctgacatgagtgtgatccaaagaagggccatttttagacagtccaaaatctgacatttttgctacaaagttttcatctaacagtatgttagttgtcttaacatctctgtggattattccttgctcagctccagtatgaaggtaatggagtcctcttgcagcaccaatgcatgcttctattctctgtttccaggttatgggagggagatcactcccgaatagatgacttctaagtgtcccatttgccatgtactcgtaaaccaagatcatttcgcgctgttcttcacaatagccaatcatggagaccagatgcctatgcctgagcttagaaagcatctcaatctcagtttcaaactctctaaggccttggtttgattgcggattagcccgtttgattgctgcaagggtggcatcttcaatctcccctttgtacaccttaccaaagccaccaactccaatcatcaatgtttcatcaaagttatttgttgcagcacgaatctcggctaatgtaaaccgcttcccacctctaatagtagccatagatccataaggattctgaattcctcccttggcatttcctgtgctgttcccaatggatccatgaagaaataaaggccgccaaacagaagcattgtgtttggtgtcactcgatttggctcctccccggcctctgcagaagcatagtacgaaaacaactacagcagccaagataacaacagaagccaaacctgctccaattcctacccaaaggataaaacttttcgattttcctgaagatttcccagctgaatcatatctctccacataagcaagattcccatttcgactcagcttgaaaatctctagcccatttaagagagcatcggttactgcagcagcagcagacgaatcaggccctaactgaatccacagtgtgtcgaatttcgaagacaccgtgtcaacaaagtcctgatggtatgccttgttcttccctcctgctcgagagaaaacatcgaaattatcagctgcagttctgttgttgatgtagattctaaaggttctttcttttgcctgagcataaactagctcacagaaatgtaaccgaactaagtaatcgaaatcaggatgcacttcaaatttccatgacatgttgaaccttttctccaagacttcattgttggacatagatctagcactttcataaacaagaagaggagccactgaagaatcattcatggaagcataggtaatattagaactattatgaatttcagaccctgcattggctgtgatcatatagctggaatcaacttcccatgtcctccaaagatctgagttctcagaaggtttaatctcatcccccccaacattcaacctatacataatctcaacccctcgcccattcaaattcagattcactgcatttccacccactttaccaacagaccctggaaagaagttatcaacaactggaataacctctataccattaacaaatccaaatgaccctttagttgggataaattcaataacaagaacactaggattaacatccaaaatatactctttaaccagagaaaaagtagtgttgcctccagaactttgcaacaccatgttcttgtgtgaaagctcaccagaaacactgaattctgaaaccagtttcagaccatttgccacaacactaaatgaagaatcatttacattgaaattcttaaatgggaaaggacaaaaatgaagccttaccacacagtaaccctgaattattggaaatgtgtagttcataccatcagtgaatacccgggcagtgttatacactgaagccaactccaacttgttacttgataatggagttgattcagcaactccatgagagctgagagtgagattgttattaggagctaaatcaccaacccatttcctaccctccaattcaacactggaattagctccacagttaatgaaaaaggagtttgattgagcttctccaatttccacaaacacaaagaaaaccactaaaagaagcagacccaatacactgccttgtaccttcttccccatatcacccaatattcttctattatttcaatgaaaacaaagattacccaatactcaaaagacccactaatacaaacaacaaacccagaaaatcccaactctttgctcacaaaactacttccattccccaaatgatttgacaagaactattttttttttcttttttaagtttgggaccaatccaatcacatcagaataggttttctaagctattttcatgacaaccaatctgttcttctgacttctcaccgatttagaaccaagcaagaagggctatgaaaagcccacctgtaacttcttctaaaagtagcttctcttcacttccagagaccaggataggtcacagatctagaggaaaaagataaaatgaacaaaaaggggggaaatttcttgcttagctgaggaaaaaagagaacaccaactgaggagatgaagatgataatgatgattatgatgatgatgatgaaatggggttgcttttaaatttgaaaaaaattatataaagaagaacatgggttgttgggaacagattggaaaagaagatcagttcatatctttggggtggtttttgttttgtttttgtacctcttttactcttttctttacagaagagagttgagaatctgacaacattgaatttgtactttactaccaccctctttttttttattatttaattcttaactgttgcaacaggtgctttcttttttatttttctattttattttagtccccaaataaaataacacctaatacggtgcccactttttttatttttattttagagaactgttttaaaatagaaatttaaaaaaaaaaattgaagaaaatattctaaaacctttctttattttaaaacttttttagaattactatttatatttaggatattggcgaaaaaattacttatactttaaattttttaacaattaatcatctgaattgattttttaatagtaaaactactcaaattctcttcctgttagctatttactctttctatccaaaatattatattaagtgtcacggtggatatgccacactgtacacaagtgtacacttgataaatttttagtggtatatgcaatatatattttttataattaatttttttcttatttttaaaatttttaaatattgaaattattttttgataattaatattacgtggactaataaaaatttgtcatgctcaccgtggcacttaacatagtcttttagatgaaaagagtatatagctaatagaaaggaaattcgagtagttttgtcacaaaaaaatcaattcaagtagttaattgttaaaaaataaaaagtaaagaaatggggcgggagtttatttatttttgcattacatagtttatgttgtactatccagcaatgagagataaaaaaaagtttagttcaagttagattgaaagaaaaataatgctaaatataaacatatattttaatataatataaaaagagaataaattgtttaattaaatagtaaaattaaaaaaaaaaattatcttatatattattttttaacttttttttttcaaatttacagtttgagtttctcaggtgatttctccgatgatttctatgtgggttgctatacggattttggttgcgatttaagttcatccgttagttgcaatatgagtttctatgtggaattttgtaaaaatacaaaaa

SEQ ID NO: 14731 - DNA, 2886 bp, Cannabis sativa
attattattatgaaaaaggtggtgaaaataatcatatttattcatttgaaaacaaatcaaacagattgtgttatttatctcaaactacatgaaaacagcaggaaagctgatgcaagatctttgttacaacttacaatggttgctatagtcattattaagagtaatgatctttgttatgtaattatctacaaaatgggcgggtgctaatgatttaactgggaagcgactcaaaagaaaactttttctcatcaaaggcttccttccatttcagtattgcaagcttactgtgctaaacatagttatacatcactccagctccttgagaaaatcaacattatctacaaaaacctgcaaagtcacaaaagattgggaataagattaaggtattaagcaaattgaacccaaatgtagtttgtcagacttggagaatagatcgacagaagcttattggtttccattatttgctcgatcctaaatgagccagtgagacagtcttgccaaaatttacatttttatattgatgtatatttgtttaatagttccctgagttactgttatagctaatatatgcaaatatttttattctagaatgcaaagcaatagatcttcaatagaatcatgaaccataccgatttccaaccatcaggatcaaggcaagcagtaattttggtgttaataccaggcaaaggtccaggttcacgtgtaaccttccccccaacaagtttaactgcttctgcagttttatagacgtcatccgtgcctattgctatctgtcatcatttatgggggaaactacatcagtaaaggacttcaaaagttgtgactgatgagaaaaaattagaagacaatcggtataaaaaatcccaacattttttttaagaaacacagttatgaaagtaccaagatagtacaaacaaacaatgcagtgtaattgtaatgtaccccaatcgaacagaacttatgttaaacacacatcttagaggaaggacttccgtgaaaaggggtgaaatgaagagggatgaagattgtacctgagcataagcatttcctttatcatattcagtgacaccataattgtatgtcaactccagcacagcacttttgtcttcaggaccatagcctagcattgctattgtatactagaatgagtcaccgaaataaaatatattagcaaggcgaaacaaaacaaaatgttcaattcagaacattgatgcttcagtttatcaatcagatattgtcattccgtcccctcatttttacatgaaagtggtactatagtgtcccactaccaaaagatgttttaaatgtacaattataaaaacaaacttctaaaaattaaataaacaggagttaccttgtactcgggattatctcttttccgtagaagctccatgccgaaagcctacacacgatataaacgatactgagaagtgagaacagaacacaggactcgtaacagtaaataaaagtttcaacatgggaccactcaccttctcataaaagtttatggaacgatcaagatctcccacacgaagcattacttgacaaaagggttcaggtgtaggccctctttccaaaagttcaaatttgtagccatcaggatcttccacaaatgcaataacagtacttccacctttgactggaccaggttctcgggttactttgcctcccttggcttttataagttccacagtcttggcaacctaaccagagaagtacaaatgaaatctcagctcttcaagaaacaaaccatccaaaatagaatgtaaaaataagaaaccagaggtacagtctaaggtcagcatgcttaaatgaaaacagaggcaacagaacttgctgaagaaaaaaaatttagtctttaacttacatcctcaactgccacaccaaaatgaccaaacccagatccaatatcatacttgtcaacaccataatctggaaatatcaacatataagtccaaaattccaaatatcaataagatgtacctttcgtgcacagaaaggactagcaccttagagagagaacagacggtaatagtatctcacttccacaaaagaaacataacatagtccaaattgtttacattctattaggctatgtttggaagttaaattttggtaagaaaagaatgagataaagaaaatgtgtagaaaggaaaaagaaaaaatcaatttttcatgtttggtatggaaagaattgtatagaaataaagttgattcaacaaaatttttcatatcgaacaaaaaatgaatttcttgtttattttccacacttttctttttcctacattctccttacatttttcttttctcatcaaaatccagtcaacatccaacttccaaacatagccttaaagatttgttaaacaagaattgttttcttcaaaaaaaaaaaaagacaagcgttgttagacagcttactgtaagtgagttcaataacgaagtgtgaatcttccggtccgtatccaagaaaagcatttgtgtatctttcctccggtatgtcacgtttcctcagtaatttcattcccaaacactctgtgtagaatctaaattcaccagaaatttgtattagatcactgagtatccaatcagccaaactattccatacataacagtacacacaaaactgagcaacaattcgtataatagtacaaaaacatacttaatggtcctatccaaatccccgacgcggtaaacaacatgaagcaagcgccttttgtcacttttaacccactccagtacatcttctggggcagcagcggtgcttgcttgaaccacattaccagcggcggccatggccaagctgttgcattctcctctaagcggcatagaggacttgacaccaaataaatgagactgtggaacagctgaattttccaaattgcaacc

SEQ ID NO: 14732 - DNA, 13993 bp, Cannabis sativa
  modified_base (7992)..(7995): a, c, t, g, unknown or other
cccaagcccacggcaattccaactaaggatactcatgtccctaggtgggcctggaccccaggacccaccttttgcccattttttgacagcccacttgacacgtccacattcatgttttcatcatcctcatttaattcgacaatctcatcagcatcagtgttggttcttcttcttttagaatcagagacaattaatgtgtgatctccattatggccttcgatttcggttgcttgcttgccgtgatgatggagtatatttgtagtgtcaactgtatgattcagcaataaatgctggtttgctccttgaaatcctctccttcccgcattgttggcattgtcaatcttagcattaatgttgttgatattgtgatcgtgggaatcaaccgcattgaatgcttccttgttcacaccttggtctgttgtgtcatcgaaaaactgagaatctgcctccgttccagtgcgtagccaccgtgagccagcctgattgtgtcttctccttggttcagctttcatccatatgccatatggtttctctatttcctccaaggatttatcaaacaatcgagaacaaaacctctcggaatgtcctataaatccacatatgaaacagaatgtagggatgaattcatatttaaaattacaccatatccattctccatttgtcttcttcagtttcatccttctctttaatggtttctcgatattaatcgcaactctaacacgtagatagtcacgccaaatgcccatgaaattcttagggtctgtcttaacaaaagtaccaatgtaattggccacattcttgactactgtatctgtcatgaaccctgtcctgagattgtgtaattgaacccataagtcaagacgatttaaggtaatactcctagggtcttctcctttcttgaggcgctcaaagatcaattggttcctattaaaggtccagggactgccatccatcaccctctgaatatcaatttcgtggtaaaactgaaagatgtagagattaggctctagctctttgacgaataccccttttcctggctgccagagtgaggccagtgtgtgtttcatcgcatcaacatcaatcgatctcctcgtcaagaatttccccacaagacaccacttatcatctataggctgacccacatcttctatgaaatcgcacagtagttctccttcttcttcttcctccagttgcactgagttatacctttcatttagtgaattaacttgttgactagtagaagccataggacaagaacaaacaaaaaaacaagcagaatactctaaaattctcacaactttttactcatgtcaaaagacaagacaacattatttttttcttaaaaatagcatacacagattatttacatacttattttattaggtgtttgttaacttgatgaggtgtattaattaatgaaatctacggaataaaacaagaacataaaataaaagtacatttgtagtgccaaaaatggaaaattaactgaaaataaagatcatattaaactccagaaagagatttgtgatgaaagcatgcctagtcatccattttctttttttctttgcaattagatcactttaagaattaactccaatattaaattaatgactatgtcatatgttatttataaatatatatttttttaaaataagttaattaggatagctcacatcaaaagaaaaacttcatcaaaaaaaaatatataattataataatgaaaagaaaaatttatttaatttgcagcataaatatttaagtttaactttcagttataaataaatacttaaatttattttttgacattaataatatctaagttatatttttataactatataagtagctcaccgttaaatgtgaagttattatccacgtgttatttttttattgatatatttaaactaattttttttaaaaaaaaaaaaattaatgacttgaacaatcagggtcacgtggtaatttacttcacttaatagtgaagtacccacagaagtttcagtattataacttaggtattattaccgccagaaattaaacttaagtatttatttacaattgaaagttaaatttaaatatttatatcacaaattagtgtaaaaaatataacttgagagtctatgtttaaatgaaagtatggatgaagaaaaagaagaatgaagagtacaataaattgagagacaaataattctcttttattattggttttcaaacattcaaaaccaacaaaccttttttttcatgtttttggaataaggttttataagtttttttttattgagttttggttcgatctcttaatttttgtaattatttatttaagaataccgaaatgacataggtaagaccaaattggtgaatgttgtaagaaatatgaagtattggcaccaatggttaaagtaatacaattagatacgtggagtaattgccacaattgatacacatgaataaactagatgagtgtgcaaagagatatctaacactaacactttatattttggcgtgtgtaacaccaaatatgaaataaaatatgctaaataatatgaagtacttttggttggaatggaacacaaaggaatatgcgggtgtttcaagaacattacgtaatcggacaagcattttataaaacaaggagcgattggatgaacataatgagaaacattaagtaatttgatttgaggctacggtacatatagcaacccaattgttatatatggtgtaagatcaatacatggggattggcaataacgtgacttatactgagagaaaaatggaatgaatattcaaatgagtaaccatattacctgtgattaacccaataaatgtattaggtgatatggagtaaccttcatactgaataatatggattaactttgttggaagtaagaccatctccaatgaagcatcgacaaatgacatcggcagaaagtgccgaaggccaacaaagccctacttaattctacccattttcagtaaggtgatccaattggataaaacatagaatccatacccaattacatttccaaccaatatcatccacgttttaattctgacaaaacataaaatagcaatcacctaaaatttccctttcttctattatcaacaaaatacaaagaatatttccgatgttgatgtacaaattttaacaagtaacactaattcattcatcagttagctgcaaccagatagaccatttacatctttcttggttctaaaaagaatcaatacacacgctagcaactaattgtcaaacccgccactagcttctacaaacccgataaatcttcttagtctataagtgcagcatctctcctcacggagcagtatctgtacaatatcaccacggaaaattcattgtgcacctttgtcatttcacaaaaactgtgaactcaaaaattaagcttatcttgcattgaagccaacaaaaccatgcaagcagagtatataaatgcccttcacctagggacaagtatttcttgtgtgcacaacatacgagaggtatggcagctatgattctttcaacctacatcttcttggggtagcatacagtatcaggcacttctaaaacataataattatttcacacgaaattcatgcctgaatacagtcaaattctgggtaaacttgtccctgttctttgaatccaagcttcgagtaacatcagtcattagcttatcaaagcacaagaaaagccgttgatgctgatccgctgcctgtaagccaataaaattaaagggttactcgtgccaagaatgacaacatacaagcagacaagaaacatatacaggaacaaaatagcagaatctttggagattaagaaaagatagccattgtgggagagagcaatgtccttggtatggctttatggtattagcaatagcaagaaatttatattttctgctttcattagtgactgaagttttctttgttctttagtgtgggatttgttgttgtgaataaaaagacaactaggcttcatttctaagtattgttttcttaacatgatagtgtctgtctcttatcctcaaaacaatataaaatgaaacaggaactaaaattttgtgaaaagtcatcctcgaatattcaaatttgttttacataatgtccaaacaactagagtaatcttatcattaacgtcaaagcgtattctaagaaaattcaatcatgcacccaaatataaattaaaaaagaaattaaaatacaaaaccttcaaagacacaagaatgaagtcattaggttggtctaatggtgtgagagaggggttgggaaatgagggagagagaccaaagttcaaactttggatcactagatattgaggttcttagggcctcaattaagcaccaagtgtgccaattatgaagaatgaaaagcacaatatgaaagtaaatattgtcgtaattgaacattctatcaacccaatcaacaactttagtatataatatccttttaggaggatgaattaaaagagttgaagaaacttgcctgtgaagccaaaatctgaatcttcaaatcagagaacatctgcaaaaacaaagtgattctttccatcaaagacaaattaaaaattgttatagttgcatcaaatagtaagaaaatcagggagttggaaagaggtgattgagttcagatctcacaagggtttgtttaaaaaagaaacactgttaacaaaaatatctatatcttaaatttggccacaaaataaaaacatatgttcaatttatagttttccgtgacatcaggatatcaatttgtaatgactacactaaggttgcgtttggttgcattttaaagtattgaaatgtcattccaatagaatgacttttccaccattttggtggaatgaatgactattccattttgaaaaaaaaaaaaaaaagaacattccatgcaagatgagaaaaaactaataacaatttttttgtcaaattttttaaacattttaaagtttattctattccattcttattctcattactatgttttcatacctcccaaccaaacgtaacctaaatttaagcacttgaatcctttgattgccacatcacaacattcacttccagttaaaaaactgttcagagtaaaatcatttcagaaaatctctgcacaattgacttccttatccagtcacaaaaatgctaaaagattaaacataataaaaattctttgcgacttaaaaggtttctcaagtaaaaaatcacattaagagcatctccaatgggggttgcccatggagttgtttttgccacatgtgcaatgcgatcatcattttcaatgcaattttatcaacatcattgtctatatttagcaacatccatgtggcattactttatctttttcttttttaaaaaagaaaaaatactttatggtattattttacagtatttaataaaatttaaccatttaaaatagtggcatgtgagaccatggtgtgcaacttttggagttgtcaactattggagtgatttttgtatgaaaagtagtcaaatcttatgtggatgagaaagaaaataaaaaaaatatatattttaagatgatgtgtgcacttttgacgactataagtgttgcccccattagagatgctctaatggaacaaacaaggtttgcactgcatacgtcagaatctttaaaacatgcacatgaaagacttttttttttggccaagtatgcatatgaaagacttggaccaagggataacactttttttcactgttaaaacaaaatcgtctccaatacagattacaaaatgctggagaataacatacatgacatctaaagattgaaaatacctgctcgctaataaggatcaagctaagcattggtctgctcagactccactggttaccacaatcctcaaacaaaacaatttcaaacagggtcttcaatatctgaacacatgaaagagaaacattgtcgctcagaaaactaaagatgaaaataaagcaacaaatgaaaataatatatatgagatattatagtaggttgtaatcaaagttgaaataatactaggttgtagtaattaacaaatatatgataaatgttttaagctagcaacacaaaaaaaatcactctaaaaacaaaaaggcataataatcactcaatttaagaaatggcatcttctttcagaagaaagcaaaacatagaatattcaataatatagtaagcgttggtgtagcatgcagtttctttttctcttttccaaaaaaaaaaaatgatgtagatgcagtctttcttacttctggaaacaaattggggcaatctgcaatgtgacgagcaagattaattgcggtgggagatgtgggtgcttctcccatcgttacattgttaaagtagaaagcagccagagtatcaacagcggatgcacactgaagcataagataatgttgcacttgaatgagtatactgaataaatgctcaattacatacttatacagaagcaggaatgaaggaggccgagagtttagaattgatatcataagataattggcaaacctgtgatgagatatttgtatccagacctttaaggccagattcaagggacccaactatgtgcatgaaggtgcttgtatccaaattcaaaacaaaagttatatggcaattgaacaaaacctccaggaatgcaaagtatgccttggttagctgcaggaaaaagaaaaaaaacgtacatattttaggtcaaagcaaaaacttcaactaataaaaacaatatgaagtaaatcaaaatcataatcatgtcaacaaaaatatctttgaaagaactaatcaaacaatgatgatatattttagacatgatttagtaaaggagaaacttaatttcttttccctccactctcaattgtatgctattaataattcttagaactctgtccctccctccctccccaaaggtttgttgcataaagtaattctaccaaatagacaagcaagatttttgactcgtcaatattcaaaaaaactattagtaactatcaatgggtattgcccatttagaagtgttccatatatagaaaattcattaagatagctgaaactgttccaaagaagcttacaatagtaaattttgctaacctttcggaatgccagtacatcagccaatggaattgacaatgtcatctttagtgcaatatctagtacatcagccagtgctctatcaccatagagttcaaagacaccaaagttgacatagtttccagcaagggctaccaaataacaggtaatagatcagtcagttttaagcatatttgcaaaaagttagttatttcacaatagtaatatgccagatctgacattctgccgcaagtcaaacttaacccccatgtatttgtatcaaagaaatatcagagaagttaaataataactttttcacaaaatgtgtttagttggtagtttagaaccacttgagcaccattctttcataagctactattatactcaaatgggtgcaacaaatggtatcaaagcctacacatgcgacccacattgtagaagggttgatactagaaactagaaagagtaggttggcatagattgaacaaccatagaggacataggttccaaaaatgggtgtattgttaagatttcatctcaattaagtatgccactggttggtgatttatcacctgggcacccacttctcatatgcactagttttttagtagtgatttctacacaagtggttgtaacagttgacaccaacaaaaactagtaaaactgatatacggtagaattcacataaaataagaatggaccttagttaatatattattgttcactaatctacaatgttcaaattgaaaaggttacataactcctttgagtcaagttagttacaaaaaaaatgctagtgataaatgaacttgtaaaaaatcaaccaaaaggaaatccaaatttgttttttctactacaatttaagtttcttagatgaacttaaaaatgtgatatgatgctatatgtactcctcaactttgttatgtgtaattgttttttttttttttnnnnggaggaaaagtgatgtgtaacggtgatatgatgctatatgtactcctcaactttgttatatgtaattgtctttttttcctggaggaaatgttatgtgtaatggttgatttggactgattgacaagatctgtctcgttttctaaaaaatacacaaattaaaattaaaatggttctcacctcttgtaagaatcgttaaggaaatccatattcccttgtatttgaaggcatatatatcagcaacatttggaagtgctaaaatccttgagccataagctacgattaatttactcacttctcggaaaagaagaatgccattgggtgaggatgagtcaaaggtcaaacgttgggccttgttcaaaacaaactctgacatgaatttcaacaatggggtggtaacctgcgcaatcaaataataatattacttgcaactaatgaaactgcaacctttattcaagtctgtcaataaagtttagcattatcccttacatctggtgtgtcagaccactgtgaaatccctttcaaaagaagtggcatgtgtgcaggatagagccaatcaaataaaagcccgtaagttctgcgactgaaaaacattaaacaaagaattaaatcttaagaaaattgctcgagacctctcaaatccatttaatatatattcaatagtacttgcctgtttgtggccatggcaattcctctaaggtctctcatcaacccaatcaatgcatacttcactgtctcagtacgaaacattgaatcgggagttgactccaaagtgatgaaaacctaagaaaccataagcacttctttacttataaaattaaacagtgaaccagcagcctttttattataccaaggcacatcaaatgattataactatgctctcacataaaatggtttttaaaaataaaatgaaataaatattctcctcacataggaaagatcattgtgccaataacttttaaagatttcattccaagtacaaacatagtctgtcatctgatctatgtcctaataccagtgagctaaatagaatgaatttctcacaaaacatcaaatccaatagattttttgtatcagtctttgaagaaaaaaacaacaatcaattaaataataacaataaggaaaaagtgattatcagtataaatagcaactgcattgataactttaagaggtgccttggcatgaaaatcatacaaatttaacctaggtataacaagaaaaaaaattgcaataagcaaaagcattgagttaagatgctgcttaaaaacgagttctgacatacaacacttagatgtgccagagagagagagagagagagagagtacttgcaaaagaggatccatagaagatttaaatttcacagtgctgtcctccataaatactagccaaccaattatgtaatagaaagttgtcctgctgcgagaacatctatactcttctagaaatggaaagtgctccctctggattaagaaaaagatggagaaatcttaaagtaatgataacacataattccaaaaatcatgggactataaacgaaagcagatataattcatatttagattggacttacagtatgatttgcaactataaatttaactgtgtccaatttcaaaagaagcttgccagtcatgtacctgtcaagtcaattttgcacaacaaatttagcatgagaacaaaaaaaagtgtcgggggctgcaaaccaaggtacataagaatactaattcaaattttaaataaattaattaattaattaaataaggccccaaggctctcatcaaaatcaactgtgtaaacattactaacccagatgcaagctccaggaacaaacttaaagtgtgatcaatgacctcctcactctgaaagaaaaagttcatagaagagtttataaaaaaaaaacataaaacaaatacacagcactacagtgtgcatgtaatagtttttcacctccgtgtaacacttgaggtttgtagcaatctttccaacaataacatttaacatgagcagatgatcgttaagtccaagaagatcagacagccgggcatatagctgctgcaacagaaagaatagactcaaaagaaatgttcgccataacaacatagacagatcttactgccagcggggggcaaagaattacctttgaggaatgcatagcctgatcacccacataagacttcctaaaatgctgaaagaagataagaattgctcgatcgagcctttgtttgctcacttcacgatatctctgtcaaatccagaatacacgacccaatgattcaagagtaattaataatgtcatagaagaatgagaatatctattaaatagtaactaaattacagatgcgcaacttaaaactcaactaagcaacaatctcaaccatacaaaatgcaaattcaattgacaaataacacaatgtgcaatacatgtgcaacttacaagatatgtctataattgtctttgtatgttagtgtatttattagctagtatctaatacttcctcagtaaattttgaatggcaagacaaaaagagaaaataaaaattatattaacaactgcataatagcagtgcatatacttttttgacaaaacacaatcatatgcaggaacagcccaaaaaaaaacagcaaacttctctaaccagtaatgaatatctcaagtaattgatatattctggatgcaaaaccaattgtagacttgcagtcatttgaagactttgttacacaggattattcctcataaggaccacaattaaaagctttcctatagaatccactatatggtaactaatgtgatgcaaaacaaacactagctctttttttttcaccagatcatagggtcctcccggccaggctacatactggagggtcaactaggtggcccaacaccatgacccgggagacaccaaagggtggaattttaagctcaccagaaggatcaaactcattaaacaaaaaaaaaataaggatcaattgatcaaacttgaaacctgaggaagccaagcatcatatcccaagccttcaaccaatcaagttgcctcttgaggaaacaaacaaacgctagttctttgttctttgctattatattttttactaataattccaccctttggtgcgatttatttatgtatttgtctactgttgactttattcttttgacagtgtttccgatgggccttactactttgggaacaacatttatcataatgctccaccaacagttatggagggtagtatgatttgagaagaataggtttctgaatcttaaggagaggttgaaaaaatcaaaaaaaaaaaaaaggagagattttacaaagcaaaaaagggagaggttcttttttcttttcttgttttttttttttttttgaaaaggggcaaggacacatgtcaatgacatgccaccacccaaaattttgttaaaacctcaaaaagtagaggagcactatgaatacaaagctttgattgcccaaaggagacaactcccaaggacagatctgaaatgcaaaagaaaaacaagaacaaatcataatatcacttccgctgcttacataatgataatttggaaaagttcttattaatgagaccatcctagttaacttacataatgacaatattacttccgttgtttctactattgacctagtaaaaggaagggtcaacaaatcttcgtcaaatactaattaaaccctaacaagataatggtataatgacactaactgaaaaggagatatagttgctccaggaataaatatcaccccactcaagtttaaaatggctgaagacataaaactaaagtatttactgaggaatcaatgggaccaattactatactgagggacagtaacaataaacaaggtctagtaagttagaatacagtattggttaggagaaaataaaaagagaagccttttaccacactgaacaataaacaaggtctagtaagttagaaaacagtattgcctaggagaaaataaaaggagaagccttttaccacactgaactaatgcttagaaaagggttatacttcacattcaaaagtaaatcacagtgtccgtttaaaataaaaaaccatagtaaatgttattcctgcagctttacctggatatgtagtccactgtcagtaacatttattaattgcagaacacgagctgaaagttctgcatcaagcacttcctgtgactcagaactgcaaaagatagggaagccagctcaaggatggtaaacgaacaaaaaaaatcaatttttaagacattaaaaagcaatgaaataaatagagagagtgaacttagtaaatgtagatttttacctacaaccagtacattgttttatcttgacaatagcagcaacaatatgaacaatccaagcaagtttagcctcaataactgatatgtcacttttatcagttgtctgcagtcgagctctttcctgttttattcaatcaaaaatattaatcacagcaaaaagaataccactaaacttttgcatttttaagatatatgtcagtcaaaatgtactagcataccgagtatgtttgcagaataggctccactatgtttatgatatacatactactactttcatactgcaacaagcaaagtaacagtaacacaaacagaagttgagaatcaaaagtatttatatctcaaggcttaaagtcaataacaaaatataagtgaactaactgaacctggaatctacacaagtagggaaagcaatctaattgatcctgaagaagttcaacattgtctaaaggattctctgacagatcctcagataatccagcctacaaaatacaaagaacaacaattagaaagaagaagaaaaaaacaaagaatttcctcaaaacttcataaaaaaacaaattatgagagtccacagagaagcatataatgtatacctgcacagagttaaatctggacgtaataaaaccttcagtaatcttaggaacaaactcatccagtaagctgggtgcatcaccttttaaatatggtacagatgtcactaatctagaccatagccccagaagataatatacactgctgctggcccactgtcagaatatgaaaaacttgtcatgacttcaagtagaatctttttatatgtatacctacaaatcctccaaactcactagtgcgcccaagtatcaaactggggctccccacctaaccctatatatggtaatcataaaactactgcaattatttgtaggttttaagctacccctcttagatgaaccttttcttgagctttgtttattaaatataattttattttattttaaagataaaggaacaaaaagaaaagagactttaatctgtcaaagaaatattctgtgcgggcttgatctgaaatattatgtgaggatgtgtgcaatacttgtctctactttttccttctttatgcggtactcttttggctgcaacattcgtgtaatagttagcactgataaatgataatacgaacctgccaagattgcaaggacttcaaagtgaattctgccactaaacgaatccaatcactatacccttcaacattcacaagctctgacaactgcaacaaagttaaaatataaacaaaagatgtggcttcaaaatcacatttaatgcatgtaaaatgtgcaaccattgcatgtttatgtatagatgtacatagacatataaaccacaacaagctatattgcactagtagccaaaaaagggacacgcgacattgaagaattgataatagtacctgataattcactcggaagcgaccaagaagacggcaatactcatggtaattatcatgatctgcaagacctgattgcaagtgcccccaaataattccgaataatcaggaaaacacaaaggaccaatgaaataaataaagatcaacagttcaataggaactcacagcaatgcaactctacagatagcatacttttatgtctcattttcttatcaataatgtttactctctggtgtttgaacaataccattatcaaatccaatacttattaagtttcctttaa

SEQ ID NO: 14733 - DNA, 14863 bp, Cannabis sativa
  modified_base (10761)..(10764): a, c, t, g, unknown or other
tttttttttttttggtgagaaaagtctactatattaaaattgagagttaaaataccatagataatagtgaaggcggaacttcctcaaccatagacaatcagtatctaccgaaatagcatacttagcaagagtatgggcaacagtattcgcacccctcttaacatgagtgataattactccaaaaaaaaattggacaatattacacaaaccgcaaagacaatattcatgtggttcaaaaaaaaaaaaaatattcatgtggacagaactgccatagttgacgtccatggttacagagaaccgtcacaaacaataactttcaacttataattactattgacatgtatatattgttcaaaatgaccaaaaataatattttcataattattgtaaacaatgatcattatataagactgaaacaccataaatgaggttgattatcacatatagcaggtacatttcattttttttccttcataccaatgccaatacaattgcaaattcttaatgttgtatggtataatcaaagaaattgaaaaataagtagataaggatgaatttatcagatcagggttatttacaaaataacgttttacatttatcaaaatgggggttggtggtcaaacatgagagtactcaaaaagaaagaaaaaggagtaattgggttgaatggtcaaaagtagaagactgtttaaagtgaaagagcaagaaaaaaggtatattttaatataaaattataaataatttacattataataatactatcacacaaccagaggaggggccttcttcttcctctcctcctttcggtgtgtggttttgactgactgtctcctctctttttctttctatctatctctctatctttactttaaccacaatctctctctccaagacccaaactttgccgatctattctctactccggatccatcttcttctgggttatgaattttactttcggtttgatcaagtttctactacaaccttggtaattgttctattatttttcttaaaaatgttctttttatgtaattagtgtttggatcaggttttattctctttgtatttcattgttcttctcccaacttgagttgatctgcctatatggatccttctagggtttgtaaatgaaaaatctttgtcttttatctcctctgattttcgttttgttgtgcttgccgttacccagtaatcgtagccatttgatttttatttacaagtttctatttttcttcttgtgggatctatttaatgggaaccatgcacgattgtttgttctctaaagaaaaaatgggtttttttttttttttttgagaaatagtttgtttggatggtgggcacattttatgtttgtgttagattatatcaatatttatttggagaaaataagatgggtagctgaatcagagttatgtaacttacttcatctttgttttttctcaaattagcttttttgtttcaactgttaagcctcaatttccttataatcgattattttgagctgagttattggcagcaggatagtttacacttcacataggatgtttagttacgtgggtggggtatggttcacttatcgatgtggttgtgtttgttgttctttgtacatttaattccttttctcttgttatttttgtttctttcgcattgttttgttcaaaacttctaatgaatttgcaataagtgtgggcaattaattatctttcattatgctatcatattcccctgtgtgatatcatttgtttgttcttacttccgttgttaatgatgtcctgcttttgccaggtaatttagtgaactggtatattgaattctaaggagggttattgaggacatctttgtatttttgagccaatggcttctgtaagtgtagctcctgcatctgggggagtaagagaatctagcggtaatgtagctggtgttgataagttgcctgaagaaatgaatgacatgaaacttagagatgataaggtaaatgttaaatctttgaatcccctttaatccttaatatagaaatctttcattgttgatttctcacacctgtatctttttgttttgcgtacaggaaatggaagcaaccattgttgatggcaatgggacagagacaggtcatataattgttactactattggtggaaagaatggccagccaaagcaggtaatttgtctaacacatcttttctacccttgcaacattattgttcctaaagctcttgattgtaagtgtactgacataacctggctatcaattattgtagactataagctatatggcagagcgtgttgttggtcatggatcttttggagtagttttccaggtgcgtagctaatctaccgggtagttttatttcatggttttgtttaacattctaatgtgatgttttattgtggtttttcaggcaaggtgcttagaaactggggagacagttgccatcaaaaaagttctccaagacaagaggtacaagaatcgggagctgcaaaccatgcgacttcttgaccaccccaatgttgtgtccttgaagcattgtttcttctcaaccactgagaaagatgagctctatcttaatcttgtacttgagtatgtccctgagacagtccatcgcgtgatcaaacactacaacaagatgacccaaaggatgcccttgatatatgttaaactctattcttatcaggtatatatgagatatgcttccgttgcttgtttgaatatctaatattgttattgagacacaataggtgttttactgtcttgacattttacattgtcccactgcagatatgtagagctcttcattacattcacaacagcattggagtttgtcacagggacataaagcctcaaaatcttttggtatgtattataatatgctgttagcttcatcttgtttgttatatttgtgtgtgtgtgcgactgtgcatgtattggtttctaaatcttttctagtggtgtttgtttaaccttcatcaattcttaaaaaatgattttacacgtgtcctctatatagctggtacaggggacagagttggcacaactggtttttaatcatcatttatctcttccttacaggtcaatccacatactcaccaacttaaactctgtgactttggaagtgctaaagtcttggtttgtttccactccacattacttgttttagtgtattttggacaaataataatctatgttactgaatcatatatgtaaaattgcaggtgaaaggggaaccaaatatttcatacatctgttctagatactatcgtgcgccagagcttatatttggggcaacggagtacagcacagctattgatatctggtctgctggatgtgtgctagctgaacttatgcttggacaggtaggtgctggggtttcttatggttgttttgattatgattttatcttgattagaaagatcctaactgtgactttttgactttacagcctctattccctggggaaagtggagttgaccagcttgttgagataattaaggtgaataacaagcccaaatggcttattatctttaatttgacgtattactttatttctttgtacttctatttcttacctattctattctattttatttcttgcgcaggttttaggtaccccaacaagggaggaaatcaagtgcatgaatcctaactacacagagttcaagtttccccaaattaaagcccacccatggcacaaggtataagaaagattatgtaaagctgttgtcccaaaaaaaagtactaaccaacatacgttgtctcttttgcttaatattttaaacttattaatctttgactatccagatattccataagcgcatgcctcctgaagctgtggatcttgtttcaaggctactacagtattctccaaaccttcgaagcactgctgtgagtattttgattctgttcgatacttacatgtgtttcatctctactttgtgttgatggtgttttacacctttgtccttatgcagttggaggctttagttcatccattttttgacgagcttcgtgatcccaacacccgcttgccgaatggacgtttccttcctccactattcaactttaagacacatggtaaggactaacaggcttcatttatttatttttcacttttaatctcatatgtggtggatgtgaactaatgattgtcaatggttttgctactaaccagaactgaagggtgttccggcagagatgttggtaaggctgattccagaccatgctaaaaagtagtgtggctttcttggatcgccatcataataatagggtgtcgttgtagttggtatccgctctgctctgctcctcgcagtagcgttcttgtagagaaaagtagttcgagtgttcttatctaatttcatcaaatcaaaaaaagtaaatctagctctggggtatctctgttttcttttatctgttcatttgttggtacacacatctctattatattacattcatacttctatttatataatatggtagaaggcagattaagaaagggtctctgctccctgcttcgaaaacagtcacttgggttcgtcacatttgttttgtgtcgttctttttacggtagattgtatcatatcaaagtaatggaattataattttacaagtttctccatttcaaacggcaatatgttttttgtgataatggtagtaacaagacgtgctaccttcccatcggaaaagaagggacaagtattagacataactgtccaggaattagtctatgagcacaaatataagcaactctagaaagccaagacacggcaaactcaggaaaatgatccaacaagcgaaaaatataaagaagctgtacaagtcaagtttggaatccttttagagtatgctccagattggagtaccttcatgaaaatccatgtttctggtcgtccaaagagaaagtatagtcgtgctgcaaaattgggtaaatttaagagcatgtatgacattattttttattttttattttcaaaaaagtattttcagaaatgataataaaaaccagtttttgaagttttcaaattagaagtcgtgtgtgcttggttaatgttattctaaaaataattttttatttttacattattttcttttttgaaaaatacttcaatatgagattctaatatgaacaagagcagacctgaccctagtcttggccttggactcggatcccgactctagacctggcctcggtgttggtcccagcctcgtaccccaactttggacctagccccgttcctggtcttagacctcggcttggaccccggcctcagatccgggacctcgacccagtcccggaccctgaactcggactcggtcacagacttggctagacttggacctgaacttgggccccgacctcagactcggactcgacccgaaaatgaggagagagaaagtgatgagagagaaaataatatgtgaaaataatgtgagaaaatgatgagagagaaagtgatgagagagaaaataatgtgagaaaatgatgaaagaaaataatgtgagaaaatagtgagagagaaagcaatgagagagaaaacgatgagtgagaaagtgatgagagaaaataatgtgagaaaacgaggaaagagaaagtgatgagaaagaaaataatataagaaaatgataagtataatgatgtgagataaagtagagaaaaatattgaccaaaagtgaactattttttaaaacagaaaataacattttgctgttatcaaaattctttttttttgtaactttgttttctgaaaactgttttcaataaacaaggccaaacatgctttactgttttcaaaaaataattttctatttttaaaaacaaaaaataattttttagttatgatgccaaacatgtattaaccttttcttttgttccaaccactcaggtggcttagatatccaccacaatatgaagaggggaaccaaaactaagtctgacactacaaatgttctaaggactatagaaccgaatttgcctagccaaagggcattggaagaacaaatgaagcagggaatcttcaaatcaagactactacaaataatgcagtttacaccattgccaaagacagcttggaggcattgacctagatatttcttcgcaccttccataagaaaagtttagttcatttatgaataggagccttccagagggcctttcaaatcccatcgtagagaccaaaggttgataggctgatgggatttatgttcaaaaaagcaagcaagcaattaattattaatatattatagaatatatgaaatataattataatataaatgatacattaattaattattaaatattttaaaattccttattcatatggagaaagtataattttgtaaaaatgtacaagagaattaagattatacgatatgaataaaataagtcagtagtgtattaaagtaatgagaatttttaatatagaactgctaagtatggtttactatacattatacttctagtgtgtgtgattttgattcagatcacatatgtagatagacatatagtaaatgtattgtgtataatttgattatacatgactggaccgatatgtaataacatctttcatcaacatgtcgtttatcatgaaagagttattcatatcacaacgatgattattagtagatcattctgaatcctgagtatacatgaactcctatttgtgttcattgagttctttgattcatttgttaaagtttctcagagaagatgattcttacaacttctaagttttggaagatcatcacactccgtttgtgatagaaaataaagtctgaagcttcaagccaaatttttacgatgatccgttaactttcaagaaaaaagatgcaaataaactttcttgatcattttttaagatttccaaaacatcttaaattataaaattctgagatatatcaagagagttatgtccaaaataccatcaataaatacagtaaaaaatttcaagagctgcgactctctctatagaaagttgtgattcttgactataaatggcaactttctgatttctatcaaatgacaattgggggcctaggtcatggaattccattaaattttgtgactctagggggtaagagaggcggctagaaggagaaaaataccattggaggcttcaattcaatttctacatctatctttaaactttgatgtttgtaattcattctttgaatatttagtatgaattctatgaataaatttcagttttagagtttttatgtgagtcacttgaaactcttttatgaattaatatagttttttaatttcttcttcatcttctattcaattccacaaaatctatgttaatttagcaattatttgttggccatttatatttattgtttatgatttcaaatctatttgaatatgctatgttgttgatacaatttaatttagaatgatagtatcgaggttgattgtataatttttatgagttgttatattcattgctttctttctgattaaattttgctatacaaatatagaaagtttccacatagattgagtttataagtcttaagacgattatggactatttttgtcaacttgttttttttttttttttttgaatagaaggtgaacttcattaacttataatagccaaatcagccattatagaggaatgtacagtactagggacattgctgacattaaagatgcaatcagaccaataataaaaaccacgagcaagacaatgagcggttttgttagcagatcgcgatacaaaagaaacagacacatcacacaaacaatttaacaaacgtttacaatcagaaattaacaaatcaaaaactgaaggcataaaaactaaacttgaaagtgcttggactgacacaagggaatcggtttcaacaataacattaagtagtagaaaagaagatagttgatgatcataattatcttaattaatttctcattgtttatttattgatttttactcctatttttattgtatttttttttttctataaaaatctaaggtttttttttttttttttctttctcttttttcttttttcttttctcttttctctcttttttctttttgtttttcttttgtttttttctttctttcttctaccttctacccaggaactctaaacacctatcctaatcattgtttgtaaaaaatatattaaagccatcgatttggtaataaaactaaccatgcatgcatgataggatcttgccaagatcactatggagtcaccaaaacacgaacctcttttccagccattgtgagaactcccactaaaacatacatttgctcaaaaatatctaatcggaacacacaacaaaagaaagcaactattctgtaaagatttcattttgttcccattgaacaatcgaaaacaaacaaagatttcaaattttcattatgtcgaagcctttcttagatctctgtcggaggtgctccctctggctttgagcagaaagagagagagtgagggacaccgtggggagagagaaagggtgaggaagatttagatttaggggtcttcaagggtagggagcatcatatgaagtctgttttggccatagagagcagagttgctgcgtttggctccgagcagagagaagtcgagaaagaaaggaagagaaagtggagaactcgagggaagaaccaaatattggggttctcggaggctcgcgagtcttgcggtgtggtcctcgtccgtcgattgtggtcgggacggttcaccaagcatgggcaaggtgtcgcaccagaaaagaaagaagaagaagaaaaaaaagaaaaaaataattttaaattattttttttattttttaaatattttatgtttttttaattattaaaaataggtagaccaataaaattttgcgaaggagttagagcaaaacgattgtaaaaattgagaagtataaacataatttttccaataaggagttagatcataccaaagtcaaaatttctaagaagttttaaccgcaaattaacctatacgacatatgcatacatacaaaaaagaaaaaaaaagaaaaacaaagaaaatactgtttaaattctgattcatgttgtcctaaaaatttcagaatttacatatatgacgtatgctcatcatataaatcattagagtttttttttttttttttttttttttttgaaaataaatcattagagttaatatctccaggtactaacaaaaaggatttatctgtacctaaacaaaaaattaagggaccatgagcttctaaactgtcgaatattatcatgaggattcgaaacctaatgctgttaattcatatgtcgtagtggattagatagtgctctttaattccaacaaaagatttcgtataatttagtctgcgtgactggaataatgttgtggtctacttatgcgttcattttgccatgtgatatatcaatatcatatataatgtacttgatttggtggattctaatcctttaattgtttcacaatttcaattagtaaacgaccacgtttcttaaataataataataataaactccaaatgcaagtataatttgtaatcgaagttcaccaaccaatttcaggtccaaaaaagaaagaagagaagcaataaagtggaacgtggtcattattgaaggtgagagtgaagtggaagtatagtatcaacctatagaaccccagaagagaggcatgcattgcagaggtattaatatatatatatataattctatgtatatatatatatatatctataaatatagacacacacacaaatggtggccgaaagaaaagtttcgagtggtaggtggtggtagtggtggtggtggtggtggactacccaacccaacataaaccaaaaaagataactcaaaatatacttttgggcaaagctatacagtttggtttcatggggtaaaaaatcaaagcacacaacatgacgctcaatatattcatatatatatatatatattatatatatatattatatatcatcctttggcaatattggtcggttttgagataaattaaagttgatgtcatgcatgcttgtattttacaaaagtgtttgcatgctgcaagggccacaattccaccaccacgcgacaaccaaatatgtgtggataactctctcaactctcaagtctcaacctcttattgcaccaatatccatttttaaaaatcactcacaacaaaaacacctagcttacctatatatatgcctatagatgcctatccaaataaagagcagctattaattataccttctaactgccttttcaaaaaagttgggcctccattttgacttgaatcccattcattcaactgtctacttgatcgttttatattttcactcaaacatctaaaatgaactaataacctggttgcattaatatatgcaacattttatacttttcctttcatcctcatccgattagattaatatgagtactaatcatttctattattgccaaccattccgatcaataaatactttgtaatagtagaggaagaaaacttggaattgtttctcaatgaagaaaataggagaaaagaaagaaagaaaaatataggtgattcgcacaaaaaaatagaacaaaactaaaatgaagaaaagttttataaaagagtgaaaatttaccaaaacaatcttcacttaaaacaaataaaagcctaaataccattttgaaccttgtattttgcaaaagttaccaattgaactctctattttgttaaatgataaaatagaccctatattttctataataataaaaaaagaaccctgtacacaatcttcaacaattttattttttaatatnnnnaactttaagacaatttctaacatgaaaaaatgtaaccagttttgtcataacatctctagatcagattattattaagttttattttgacaaaaaatcattacatagggtcctatttgtacaattttaaaaaatataagatctattttgtcacttaattatataattaaaatagttaaaattccaattatgtaattttctatcctctatcatagaacaaaactatcaatcaattataacataagagaaatatatatttttttaatctcaattttgctcatatattgtcactcttctctaacaaattaacaaaacaaaatgtaattgtaggtgaacaatttatagcggattttttagtatttaaaataatcttaaaattttttaaaatttgtaaaatatcttaaattattataataaacacaacgtcttataaaaaattgaacttataagttttctcatgtcaaaacaagaaaaacaaagaaaagaaagcacacgtacatcttttctaagtgtggtaatgaagaagtttctcctaaattaaaaaatatatatattaacatagcattagtgattgaactgaaatgtactacaatacaacaaggatgctatttagtttcatacgcaattaataaataaaatatcagcaattgttgaatcacgacttctcatatggactactaaatcatgcatcaacaaatgcatccactacaccaaattccaaccattggtaattactaatattagaaatagaattgtacttgattacagcttgtttttatgtaaatgttctttgttttttgtggtaaagactaggacataataccgttaaaacttgagttaacaaaaaaccatatttgggaccaaagaaaatgacagttatgggaagaacatgggtggctaatcgactgcccttccatcacatttcctgttattccgtttacctttttcctgaggctgtcatatgcagactccacattcttcaaaagaagaaaaagttggttcaaaatatatattaataaagtgaaggcctatatggaattggtcggttcactctcccaaaatatttatattttatataaaaaacaaccaaaacaaaacaaaataaatgtaaggtgtagataaaaagtttgaagtagcttccactaacagtgcctattatatatactgattcagcctttgagaaattgcatgcattccaaagctaaacttagttaaaaaaacttcagcaacttctactaatactcactctcacactcacacacatactaaccttagctacttcccaaatatttggtcgtttgacacttaagaaactcttttccagttggcatagttttctgaaaatttcagtgacttgcagcacgctttagttttggtcccttttttgttgtctgtcttgaagttatagtatgaagtatactcgtttgtctttgtttctagtcttcatttttttcctttgcatagtcctttcgacacaggcaaggcggcaccataccaaacacaaacacactcaccaccaccacaaaggctcctacatttcacagcctccctcatgctcacctgcacctgtgcctgagcctgagcctgaacctgcacccgagcctgagcctgagcctgcgcctgcgcctgagcctgctgagccaccatatgaagatggtcatccaacaaattcaagtgatgtttttgatgtgcgaaaattcggtgctgtcggggatggaataacagatgatacagatgcattcaagatggcatgggacactgcctgtcagagtgactctgccactgttatccttgttcccaatggattatctttcatgatacaatccagtattttcactggtccttgtaaaactagcctagtatttcaggtaaatttatcttggtttttcatttaagtcaattttacggaaaaatgacttagtaattaactaactagattaatggaaaaggttgatggaactctaatgcctcctgatggacctgaatcctggccaaagaagcagagtaggcaccaatggcttgtattttacagaataaatggaatgtcatttgtgggaggtggtgtaattgatggaagaggtcagaaatggtgggatctcccctgcaaaccccacagggtaatatagctatgtttgttcataaatattgtcaaaatgttcttgtaatataaacaatatttgctgaatttcatagggagcaaacggaactacattgtcaggaccatgtgatagccccattgtaagttgcatgattttgtattgtacttgtagtagttcatgatgctaagtgaaatcaattaaactaagcatcagatttaaattctgattgtctgtaggcaatcaggttcttcatgagctcaaacttgactgtacaaggacttaaaatcaagaacagtccacagttcaacttcagattcgatagttgtcaaaatgttcatatagattccatttcaattacagctcctgccctgagtcctaacactgatgggattcacattgaaaactctaatgacgttggaatatacaactcggtgatttcaaatggttagattaaactagctaattaagttctatatttcactttttcttttcttcattttcccttgaatgttttagcattgtactttataaaaaggctcagaagaattccaactgttggaaagcacggaagggtgaataattggagataaaaagaagatatttgggcataattttatcttggaaatatgttaaattagtgagttgttgctgtactacaggggatgactgtgtatcaattggatcagggtgccataatgtagacataagaaacatcacatgtggaccaggccatggcatcaggtactactagtactcttttttaaatttatccgaaactaggctcctctttattcttactatatttggagataagaaaaaaagtcacgaatctcagaatttgacatgactgatcatttgagctaatattaagttttatttttattgtgcttccatctctagcatcgggagtctaggtaatcacaactcgaaagcatgcgtttcgaacatcacagtgaaagactcagtgatcaaagtgtcaaataatggagttaggattaagacatggcaaggtggatcaggagcagtgtttggaataagattcatcaacattcacatggacaatgtaaggaatccaattataatagaccaattttactgccttagcaaaggttgcaacaaccaaacctcagctgtgtttgtatcagacatattatatgaaaatataaaaggaacctatgatataaggagtccacctatgcattttggctgcagtgattcagtaccatgcactaatttgactctctctgaggttgagcttcttcctgcttttggtgacatagtttctgaccctttttgttggaatgcatatggagagctacaaactctcactattccaccagtttcttgcttaattgagggccttccttctcgatccacattgggcagtaatgacagcccttattgctgacattatatatataaatataataccagctttattagcttagcttcttttcaaaaagaaatatgcatttatgtatataattctaaaaaagggtcatggtaataagtccaattataagattatatttatgcagatgtttggtctttttttcttttttttttcttatatatgtatgtataagaagttatatcatttgaacgtaattgacttcaagatatgttcttgattctcttttctacttttaagtacattcttactgtaaagtaaaccagctaaaattacacttgacatagaataatggaattaaaatcctattataaatataaatatattattaagtcatgcatcaaagacaagttgatgagaatcataaaaaagtagattatatataacagaaaaaaaagtacaatattccaaacttttatataagtagtaatgtttgttgtatctgtatgggagaaggagacaagaagttcacattaaaaagcaataatgcaaagaataattagcttttttagtccctgtacttatgacactatactatgatgccccttaatttataagtgtagttaaaaataccccctaaaatatatcagtt

SEQ ID NO: 14734 - DNA, 13631 bp, Cannabis sativa
  modified_base (4714)..(4720): a, c, t, g, unknown or other
aaccactttagaaacccaaacagtaaatttaaaaaaaaaaaaaaaacagtatatagttagttataacctctcaattagaatataatttacttagtcttaagttctagtgtatatattttattgtttagttataggaaaaaaaaaagaagaacgaagaaaaattgacataaaataaaattcatggcttaaaatagaaagttgttgacacttaacaatgaacaagagaatacccgacatttggaggtgggagagggaaattccggatcgaatgcctgcttagctcgaggccctctctttgtcttctccttttttatcacagtccctacgatttcaatttctccttttttttttctatctttcccctcttttaatatgtaaccactaaccaaaaaaataaaataaaaaagtaatggcaaaattccacttttttaataaaatattaactttgtctagcttttctgtttttaaggccaaacctacttaaaacaaagttcctataaaggctattattttctcgatagactgttgatgatatagcaatgacaagcatcactacatacaaaacttctaacccattattacacacatgattcaatttgaatatctccaagtacattataaattaaccaattatgccaaaatgattttatagcaaataaactaccaaattatctttggaagtaaattggaacatcattttatgaagcgtgatttttcttttcattttgttttctcatctctcatccaccatatgattggtatgacgcactgtgggacacaatgccccccaacttttgtttacactctatctcacattaccacacaagccacttaagatattggattaaaataatgatgggacaaaaactcatcctacagacccagaaaaggaagcacgagcaaagcatagccagaatattgatccacccaaacgacccactacccagaaaatcaggaattatttactttttttaagcatctccaggtctacatgttcaaattggaaagtggggacataactttgctggccatcctaccagcaccagccaaatgtgaaatgcaaagtagctaaacagttccaggcgacaatgctctatagtcacttttgaaaattggccttcgaagagattttgggtggaagagtacacatcccactatcttatgtgcccttatgctaataaacataagaggtcaagctcatgcataatgatgatgctgttcaaaaggtgagacaaaattgaacttaccatgtatggaaaacatagagaaatctcgaaccccacattctccccaagcttccctcatttcctagtgtgttagaattatgggtccttttatatggcgccaggtggggatcccccattaacagtaagagaagcaattgaggccacattttcaccccacaattgcactatcaaccaataggcgtttcgaaacaagtggtccaagaaactggccaagttcaacatttgcattcagacaatacttggatatcttacattacaacatattcgtatttgagataatttacagaagaataaacaaattgaagatccaaattgttacaagttacacataagcttgtgacactggcttcaaagaggtaagatacagtctcaacattatcataaatatatgttgttttgtttattaaatgtgaacaagggttgacatgttagaaccatgcttaatctccagaccttaattccctttcaagctcatcaaactcccagccaccaatctcctcggtcgtgtagtcttgatccacctttccgaactctgattcgagctttgctaattctgcctcagggtctaacctctgctctgcctttgctgcaggtgatttgcattgctcatcttgctcagttttatgtgttcctgcatccgtttttggagactgaggctgactacctttgataatttcagaagtagatgaagtttctgctttctgagtaggattttccatttctagatctggtctctcaatagattcaaactcccctcttaacttctcaatttcatcaaagagctccttaatctttgggtcgtctttcctagaatatatgcaaatcatgtatttgtctttaggaattgctaaaagaaaaaaaagagatgaaaacaattcaccaatatttgtctccatgtcattacctggagattttatcttgttgagcataaaattgctccctcatgttatccacaacactaaaagttgtaatgatctgaaaaaagcaaaaatggagattaatgtgtggtgattgagaatagaatcatttttcttcagttcagactacatgcataaataataaaatctaggaagttgccaaatttggcattccagcagcatcaggaccagcaaagatttaacagtcccaatttattataaaaaatttaagtcccaattttgactaattataattaagaataatctttgaattgtaattagtaatattttttataaattcttgtattaagaaagtgtacctctatataaaaataattatatctcagtatatatccatacatgtataacacatttgtttatgtagagtcaagaattttattccacatctgaattacatgtaatgcacgtataatattatgtgtatttttatttactcaaaataattttattatacgttacttctttttctttttcaactataatctaatatgtataagtaataggcatattaagaatttccacaatataaatattcatatgatattttatcgtgttttaatttttttactagtaactctatttaattataatctcttaattataatataattagtttagtgttaagaaaaatttacataatagaccaaaaatattgaaaaaaattacaaaattacgtcaacacggaaaaatttcatttactctttgaacttttttattacaaaacgacctctttagtaaaaataataaattatttttttggttgttttataatttatgtataattgtattacaattatcatggagttattttttattgtttcataatttatttatagttgtcatgagtttgatgtctcatcgtcttttagttgtgtttttactttttgatgaataaaatatatttttataatttcaaaacttgacaagcatatttttataaataaaaattttacgccgcataattataattaaaacataaaaaaaaagaatatctttgaaaattcacttagatagaggttttactatctatgcaagttacatcccatacaaaaactagaaacttaaaaacaagcattaactcataattaaaattgtttcttttccaaaagaaactgaactacattaaacaataaaccataggagggggtacatgaaaggacctctaaaagatgttttgaaggtctctataatccatcatagaattgtgtggagagtggggaaacttattttactagctgttttgttctagctttctagtaggctttgagcttctgcattatgttgtatttacagagtttcactgatttctgtttctgggattcccatgttcatgttaccaaggttttccagggttttattaaacttgggcagaggtcagtcaaggacatgtggcctgtctcttgttcagaagaaaaaaaaagaccgggcactgcaactaattctgcactaaaaataagggatacaacctacagaaatatggttcaaagggaaaagaaaagtacttttggaaaaaaaactttggaatgcctacatcagtaaatatgtgtccagctggcataataaaacaataatcaaagtgacaagaactgtgatttgtgattaccatttgaagcaaagttgtaacacaaagggcttgtttggcattttagaacagttttggggtgtaaagttgacttttagatgtgtggatgaaatattaaaagaccaataaaagtttagaagagcttttcagagaagcaatgacaccagtttttctagggaactaaaaaggatcacgggaaggagctattttctcattttaatgaatcttttagaatacttactttacctttctttttgaaaacaaaaatttaaattacattcttctcctaattggtatattataatattagggtatattacatttttctacaagtagtggatataccatttgtcttattaggagtacaaactgacacctgatcacccctcctccactacccatttgacgtgttgatcttcatggtacaaacagaatttttcccccttaattttgggaccacttgtatctcaaagccattaaagctcaagaataaaagcctcatttaaatatttgtaagggaggttggaaaatcaccatttgtatgaaagttctagtattcaatacaacagtattttctccattggtggctgagtattcttaatttttcttaagccttctttgtatttgattttctaactaaagttcagtttgtgagttctcaccatcgaatagttgttattagatttttttttttttgttagaatcttacttgttacataaattttagatttttatttttagaatttgaaataataggtagatcaataaatgcatatttatatatataagtaaaacctaatatattttgaaccaaataaattatattctaatttagaagttataactaaatagaggtactagaaaaaaataataactaaaacaccaaaaagtatcaaatgtaacaacaacaacaataaaaaatccttaatactatatcataataaaannnnnnntgagtaaatataatatttatatacatgtattattaggggtgttcatctaattcaatccgcactattttgctcataatgcatctgatccgcattaagtgtgtatttcatattttgaattcaatccaattcgcacaataagctaaaatccaattaattctacataaataaatttataaactatacatattttattaagatacaattattcttatatagagatatatatttttaatatgggacctagaaaatgtataactaattacaatttagaggttatttttatttatagctgaccaaatggagacttatttttttataataagttaaaggttattcttaaataaagtattcttaaatagaggttttactatattatatattctattgtctacttcagtttcttttttagatgtcacacacatacatagtatttattcaattaccaaaactgggttaaggcttggtaactcagggtgtattttatttatgtatttttattttatcttttatgattgaaaaaaacaattattagtattattatttaacatttagttctgggcaaatttgaaatacatattattttttaagagttattatattttttattttttttaaatcccgtaagagtatttatattgtacataccaaacacttcaaaaatctcttcaaatgaaaaaagtgctttaaaaataaaaatccaaacactaattaaaaaactcaaacttttacttctcttcttctaatgtgtaaagaaaaagtaaaaactatgccaaacaagctcaaaagtaatgtacctttgcttcatattccaaatattcctcctcgagatttttccttgggtttaacagttgggagtcctcatcagcagcagatgctgtctgtgacctatattacatgtccaaaagtacttaataagagagtcaaagaagatcaagaatacttaaaagcaaagtcaaagaggatgaaaatcagaaccatcccaacatcacaggagtaacattacccatcactcaatttatttaagttctccacaaattttgatatacggctgatagagggctccaactctttctgcatagaaagtgaaaggtatgtcccgagaacaagtacgtcaccaatccataacattgaaagttctttcattcaaaagtaaaggatagtcaaataccttgtatgcagagagaagatggatgaccaagttcacaaaatagtcctcatgtttctctaattcatcacttgaaaatacaaacaagcaacacaaatatggaatgcattgatgagaagaagtagtaactaactaggaacgaaacaaagacaaacaaataaataatatgagcgttggagaacccaggtatcacgccaagtacatacttgacctctttctccttcatttctgcatatgagcgttggagaacccaggtatcttccaaaaagttaagccatgtacttagaacatctgcttctattctacacgaggcaacagattttgatagctcatcctcctgtacaaagtccaaacaatgtttagacatttctctttaaggctgagagattcagtgaagtgagctctaagtactcagcacagtatcattttccaaaccacattaacatattaaaagtcaaattctgaaccacattcagatattgaatgtcgaattactctagcacttaagacagaacacgaatgcagacctttgttttcaaatgtgcaacaatctgatcgtttgcttcctcaaactgatctctctcttccctagcatttcgaagtcgggcattagctgctgccaacgagatattaacctacacaccaactcatattcgcatgtacaatcaataagtgtacaatgctcaataaaattaagaggtagacatagatctgactgaaaaggaaatagtgcaagacttgtcataacaatcaataactaaaaaaaaattggttctcttcaaaacgttttattcatttttacttattgctatgggagatggtaaataaagcattttaagtcagatcacaaaaataatagcaacactaatatttgtaataacaaagatatagagtgaacaaccttcttcaattgagcctcaagatcatctctttgtctttcaagctctgaaatctcagatgctaattcctgaaaatataccaataaaacaaagccttagatctttgccccaaataaatggcacggcacgtaaaatgaagatagaagaatacaattaatcaaataaaaatctgatcctacagcaactgacactcgtgctggtctagccaaagagcttaccagatcaagtgatagagtagaaattttaaaaacaaggaaagacctatcagcttacaaggacatacggtaaaattttgatgtaattattaacaccactttaaccttgcggacagggttcgtctttggctaggcgaagaaataaagggtaaagatagaattagataggcttggccaatgtggcatcaaaggagacagctaagagagaaagaggttgggaagtagagtacataaatagcacagattggaaaggggtttatcttttggctgggacatcgtgttgttaagagactacttggggagggctgggggtctccaaataaccttccaaattgtatttgttcataatttctactaggaaaaatttcagttagtttttgctcttgttttcttaagcatttgcaatcatagagaatagggtcctaataggattacaatttcaccacttaatctccaaacacaataatgtcaacgtaaatgcaagcacaaaatataattggcaatcaattattcaagctatccaattatagctcattgtgcccacattccatttgcattgctatggcattatctactgcagtacaaactagaactgcttatcattgccttgcgaataaaaatgcatttgctaggaagacagcttaccttctccctttcacttgcctcatctgctttagtaacacgaacttttagtgcctctgccttttgtgatctaccaaacatttttttatacgtccacattttagatgctagttctgataatattcaataaaagctccaaaaactattaaaattggttttgtacctgtgctctgagatacgcttttcagatttcacagaggagctagtgagagattctgacaagaccttcaacttatcaacctacttatacagctcaaataatgttaatataaaagtttgtagattacaatttctatgattacactaaaatttctaaaaataccactcattcagacaaataaaccagcacttaatatgagcacttccatctaagaacacaaagaccttcatcatgaaacaagaaggcagaaagcacaaaccttttgtgcatgaatctcaggagaatctccattgttgagaactttcttctttagtaaaagcgcttccaatttggaacaagctcgaatttgtgcaagtgcttctttaaactactgacacaaaagtaaaacagttaaacttcagtccaaaaagtttaaccacaaaattctgagagttaaatgcgttcacaaaaacattagaatccaagttttacaagtctatttttgtatgataaatagagcaagttttagggagttactttgcaagcaagttcactattttggaataattaaagtggatgttatcattaagtttctttaataaaattttggaccaacagcacacagcatgtcatgccacattttctaagtaaaacatagtgtacggtgaaaatatatagcaatatatatgagtgtgtactaagtatcagttatattacaagcatttgatgtttttacttccgtgcaaaagatacagaaccaggtgatatcaattacaaggatcatcagaagtaaacagcccacctctatcatctctgacattgttccttcacaaacttcagacaacttttgtgaagcagccatctcatcaagctttccctttagcctagatgcttcagtgtttattctgtaaccagaaatcatgatgaattaaaaatacgttaagcataactagaacataatttgtctccagtcttcctgtttttcttttgtgtcatttacaacctaggagcatttagttagagcataaaattctcattaaattttgaacaactaacttctgaatcttttcagctaaaagtaaacagaaaatatctagatacagttcataaaattagtttctgaaaactagataaccatatctgaaaattggtcctacatgcaacaatgcaaaccaggaggagagagagagagagagagagagagggacttccattagtcaccagagaccaacaaaacactggaccaacttggtttgttattaccagactgtgcctcattctcaatggtgaagtgtgaggcacaactaagtcatcgcaggggatgcaagtaattatttaatgtcatatttcctattctgcgtaaaactggattttttttctctttttccatttgctctcgtaaaagttagagaaactagtcaatatataatcaacacgcaaaatctgagtggaaacctgtacagaaaggcttcatcttgatacctcaaagcttaatgagtattaacagcagattaatgataaaagcttattttttctcaccttccaatatcagcattaattttaagcccagaaatggccccttgagcaaattgaagcagttcctctcgctttacctagagaaaaaaatacaaaaatgaataaactaacacaatttacttgtaagcacaaaaagaatgaacaaggccatgcattcatgtataaccataaatgagggaatgttgtattgaatattgatgtggctttagttgcatttagagtcttaatggtattattgtggtttactctagaagaaaaggaggtcaattacatatttagcagaaaagacaaatagtgtatatataaatatacatacatatatttaaatgaatatccccaaacttatacagtttcttaggtcactaagccactttttcaaaatgatgtaatcaaaattttgttttccgaaagggtaccaatagagaagagaggatatgaaaccaaaaaactagcacttcaagtgtaattaaacatggtaaggatattagatgttccaaaagggtctgctgttacatggcattcattattaagtatataaagcaagacatatcactaagcagaattcctaccacaagagggtaagacatttttcttttaaacatattccatcaataattttcttgatgtttcattagaatatatatatatatatatatattatatatgtataatattatataaaatacacatttatacatagatatatttgactaatttcagtaaactcaggagtataaccaaattcttcatttatttaccaatacttcatcttcatagctggataaagcttttgacagatccagtatactgctaagtaccgcattgtgaacttccttcccacctgtaaggcagagcctgcaagcaacaagttagttagacttcagttcccatcgtcctatctgccctaatcacaagttatttgtgtatattttccagtcagaacaaatactaccaagattaggaagcccaaaacaatatgataatgaatcctgtgagtgtatgacactaaagagcctactttacattttttttcagagaaaagtatattagtacccatgttggcactctgcggatcattctgaagcctcaaaacactaatatggtttaaagcatactcacccaaacatctccaggagaagagaaacttcttcctcagttggtgcttccagaatctaagcccaaataaggaaaagcgagttgacattaggttaaactcaacatttataactttctctggctcacgctaatattagaggcaatgttttatcatcagttattcccaaaaaagtcatatagtccagcttgaataaccaagcacacaggtactattttttggaatcaagtcttgtgcaaacttacaacaatgtcaaagaaaccctaatcaagtttttatttatttgtttacttaataaataaagggcattgtaaacaccacaccaatacatgcatcactatgcttatctcaattgttatttaattaggagtcgtttatcatgtattattggtgtacattttcaactgtctatgattgatgaattcatcttaagtaaagctatctgcatatcgaagttcagcaataaaataatttgattcacagaaattgatgtaaaacattactaagaattgcttagcatgcttccaaagacagctcacgtatcatatcaaaaacttacaagtagtaggaccaactcttaattattgataaagtgggtgtaacataccatagacaatgttatgccttctagagcttggctttgaagaaagacatcatgaaaattcattggttcaccacccaaatccaagtcataatacagaacctacacagaacagaatgtcagcactaagcaacacagcaaaatgacaaacttcagcaataactggaagaaaagataatcaactgacaactaattcagaggcttacaaatcatgaaattaagtactgaatgtatgataagttctggtcctttacctaaattacatataccttaatcatttctacaaaatggaataaaattacaataactgcctggttgcagttgaaagcaagtcaacaaggtgtttgaagtcatagatacaaataaaaatatgggctctagggacgtttccaggttatgtaagtgtagatctcaacccaactaatttcatacaaagagagagaaaaaaaaaacacttctcaccatggatggttttcttggactatctttcaattcatcagaagctgaattttgctcaagagtgctttgcttatcttcagaagaaccgtcagacaacttttcaatctctttaagcacagccaaccatcttttaagtaaatgagttctttcattgcccctacaagagacagctgcttcttccaatctttttatagtctgcttgacacttctaaaatttcgagcactctgaatatgcataacattaaaggaaaaatagaaaataaaacagcaataatgataatgataaatagataacatataaattcacccaaatacatacccaataaatatatgtaagttgtaaattattgaaaaatgataacgagacaactacagctctaagttacctctaatatcaaattgatcctaaagattagcaggttcccagttttattgtaaagaaattaatttcatttccaaacagataatttatgaccgtctcatacatagatggagttacaagaatagttctaaattagggttaaatttgtctaaatatgattctccctagacaaaaaattaacaggttttcctatttcacattcttccacatctcatctaatctggccctttactattagatatataatattaaattagcgatatcaacaacaaagctcacatacaatgttctttaattcatttatatattttttctatgagaggcccctcttttttttttttttttgaacaagtgagaggccccctctttgaagatctactagtatggaaattagtaaattcatcgataattattttctctcttgttctctttaaatgcaaaacgataaattacacttgctaaactcatagatccactaatgtgaattggcaattcccaaaaatttcccaaaaattcactaataaggaaacttgccaaatccaacactttcaaaaaaaataaagctttttgaatcaaaaagcacatttttcaggtggtcttcaatgctatgactgtaagtacaaattcttacactttggtgtgctcacatgaaggcgcatttcatacattttctgataacaagtacgatatcacaatattgtttgctaaacggattagtttcatacagccacacacaccaatagttcactgtctatcttgaaagtaactgtcaaaatctgagaacccgattaggttagtcttcaacgcaaattgccatataagtttattttctctataactgttgcatttttgcttttagattcgcatgttgagctaagtttaaatgaaacttttttactttacaagtagcatttaaggatttatattacacactcacatatcaaagaaaaattcctaaacccaaaaaatttcagctacacctatgctcaacatacgaaaccaaatgcaaacagtgaaaaaaaatatacaagaaaaaaaaaataaaaaaggagagattaacggacaccaaaattcaataacgcattttaagataaaacgccatcataactgggaaaaattcgagaaattgagaaaattactatgcgttcttgaaggattttagcaccgccagctacagcttgtccggcctgatgaacgacggagtcggcgtagtttttgacagtgcgagtgaggttgttcttgttcccaacctccacggctttgctcacggctttgctcagccacgacattttcaaaattcagcccagaagaatcaatcgaagtgaagaggaagaagaagaagaagaaaaatgagagagatggggaaggagttgagggagggtttaggagaaatggaggaagttagcattcgtgtctgtttcaaaaagggccattgacaaagaaggacgacgatgacacagtcttaagcgtggatcggccacctatacgctttatacgacgtcgtactttgctttcatgttctaattttttttttgaataaaatgcgtaattatattcggttcaacttttatcaaagtaaacaatatagttgaagaggttacgtgcttcccatgtgcctcttctcaagttagaaaaaaatatatatattacatataaagttataaataccttttaatataattttattaaggctaattaggatttttgcccctgaacttttaaggtcgttaaaaatgctccctgaactattgagattgtt
